United States Patent Application Publication US 2011/0183924 A1 - sequence listing, part 21

SEQ ID NO: 52044 - DNA, 4492 bp, Homo sapiens
gcagtgaggggggtcggcgcgcgtgtctacgcggacgcaccggctaagctgcttctgccgccgccggccgcctgggaccttgcggtgaggctgcgcggggccgaggccgcctccgagcgccaggtttattcagtcaccatgaagctgctgctgctgcacccggccttccagagctgcctcctgctgaccctgcttggcttatggagaaccacccctgaggctcacgcttcatccccgggtgcaccagctatcagcgctgcctccttcctgcaggatctaatacatcggtatggcgagggtgacagcctcactctgcagcagctgaaggccctgctcaaccacctggatgtgggagtgggccggggtaatgtcacccagcacgtgcaaggacacaggaacctctccacgtgctttagttctggagacctcttcactgcccacaatttcagcgagcagtcgcggattgggagcagcgagctccaggagttctgccccaccatcctccagcagctggattcccgggcctgcacctcggagaaccaggaaaacgaggagaatgagcagacggaggaggggcggccaagcgctgttgaagtgtggggatacggtctcctctgtgtgaccgtcatctccctctgctccctcctgggggccagcgtggtgcccttcatgaagaagaccttttacaagaggctgctgctctacttcatagctctggcgattggaaccctctactccaacgccctcttccagctcatcccggaggcatttggtttcaaccctctggaagattattatgtctccaagtctgcagtggtgtttgggggcttttatcttttctttttcacagagaagatcttgaagattcttcttaagcagaaaaatgagcatcatcatggacacagccattatgcctctgagtcgcttccctccaagaaggaccaggaggagggggtgatggagaagctgcagaacggggacctggaccacatgattcctcagcactgcagcagtgagctggacggcaaggcgcccatggtggacgagaaggtcattgtgggctcgctctctgtgcaggacctgcaggcttcccagagtgcttgctactggctgaaaggtgtccgctactctgatatcggcactctggcctggatgatcactctgagcgacggcctccataatttcatcgatggcctggccatcggtgcttccttcactgtgtcagttttccaaggcatcagcacctcggtggccatcctctgtgaggagttcccacatgagctaggagactttgtcatcctgctcaacgctgggatgagcatccaacaagctctcttcttcaacttcctttctgcctgctgctgctacctgggtctggcctttggcatcctggccggcagccacttctctgccaactggatttttgcgctagctggaggaatgttcttgtatatttctctggctgatatgttccctgagatgaatgaggtctgtcaagaggatgaaaggaagggcagcatcttgattccatttatcatccagaacctgggcctcctgactggattcaccatcatggtggtcctcaccatgtattcaggacagatccagattgggtagggctctgccaagagcctgtgggactggaagtcgggccctgggctgcccgatcgccagcccgaggacttaccatccacaatgcaccacggaagaggccgttctatgaaaaactgacacagactgtattcctgcattcaaatgtcagccgtttgtaaaatgctgtatcctaggaataagctgccctggtaaccagtctctagctagtgcctcttgccctctcctcacctccttttctctcagtgactctggaacctgaatgcagcttacaagacaagcctgacttttttctctgattaccttggcctcctcttggaaccagtgctgaaaggttttgaatcctttacccaacaatgcaaaaatagagccaatggttataacttggctagaaatatcaagagttgaatccatagtgtggggcccatgactctagctgggcaccttggacctccagctggccaatagaagagacaggagacaggaagccttcccattttttcaaagtctgtttaattgcctattacttctctcaaagagaacctgaagtcagaacacatgagcagggtgagaggtgaggcaaggttcatcctgaatgggagaggaagtcgaaccactgctgtgtgtcttgtcaggatgctcacttgttcctactgagatgctggatattgattttgtaacagcacctggtgtttcacggctgtccgagtgagctaacgtggcggtgtggctgcctggacctcctctttcaggttaacgctgacagaatggaggctcaggctgtctgcaagaaaacagttggtttggctgtgattttgacctcctcttccccactgccatcttctaagagactttgtagctgcctcctagaagcacattctgagcacatttgagacctctgtgttagaggggagactgcacaaactatcctcccccaggttgagacgtctgcagagtggcaagctgacttgtagaaatggggtgccatttatgctctacttagacaagggtaatcagaaatggaatcagtgcaggcaaaatttaggatttgccgcttccataaatcaaagcatgactaatagggggtctctgaaatgtaagggcacaaacttcacttagggcatcgcagatgtttgcagaatggttggcctaatgattatgctacagatgggttttaaatgacccgtctaggttactgcttccttgcaaaaaaagtcgaatcctgcattgaattgaatatgaatttctctaactctctccagaaaatggatggagataacttgtctttaaaactgtaggccagccttagccactgtggagcccttgcctccgagctctggcttcaaggggagctcttctccaggttcactaggtgaattgatttattattatcatattgataatgtgagattctttagccactttggggagcctgtctctccagaagcctttcttagtggtgcccacagttggagcccaggggccatgtttgcaaactgattcatgtgcatggctgacaggagtactggttcactaccaatgcctgagcttttctcttacatagaaaaactgtccactctcagtaatcacaagcagcatccgttttgttttctcttcttgggagacatctgtcaaaccaggaatattcttgaaaagaacgtgagcaggaaaaactgctggtgatactttttttaagttttgtttttatcttgcctgttggcttcaatacatttgagaatacgctgaagagggaaaatttcagtgatggagattctagattaaatatcaggactgatttcctggtgggattatggtccagttttaccaaagaaccaattccttgaatgttggaatctaactttttatattgtcattattattgttgtttttaaacggttctttgtcttttctgttttatttttctcaagctgctttcaggagctagcagaaaataactcaaagttgaagactctggaagattttgctttaacctaactcgcattgatgtattaaatttataattttagcattcccaatagatcctatcattccttaaacataataccctttgtcttggagtagaatactaagttagagttagtggatttctagtttaggagaggagctcaaaactataatctttaacaaattgaaaaatgaaatagggtgttttccctttttgtgcacacctatattaccttaagaaatttccttccatagacagctgcctcaaagggaaatcctctttaaaccgtaaaaattggcaatttcttttgatttttagttgttgaatttgctgtttcaagcatttgtacatattagaagtctaaggagtagcaagtcagtgggaggactttttcacccctggcattagcagcttcgacctcattttccagatgcaccagctcctattaataagttagcaaggaaagtgtatgtcacgtgcaggaacagtgaggcagggacaggggttctgctccttctcacttcaccaccggcacacagcttgcccctgtctttgcccccaaaggtattttgtgtctagtgtcaaattggagctattcttcactggtccttaaccttgggttttaaaaagaaggcttctctgtttgggtagcgtaagagctgagtatagtaagtcctcttccaaagagatggcaatatgctgggcatctactttaaaacaaagttgtctgatttttgcaagagaggttaggattttattgttcttatttccctttacagttctgcagttccatcacagtatttttttaaataactcaggtgtatgagaagaaattagaaaagaaaattaacttatgtggactgtaaatgttttatttgtaagattctataaataaagctatattctgtaattgtt

SEQ ID NO: 52045 - DNA, 4569 bp, Homo sapiens
gcagtgaggggggtcggcgcgcgtgtctacgcggacgcaccggctaagctgcttctgccgccgccggccgcctgggaccttgcggtgaggctgcgcggggccgaggccgcctccgagcgccaggtttattcagtcaccatgaagctgctgctgctgcacccggccttccagagctgcctcctgctgaccctgcttggcttatggagaaccacccctgaggctcacgcttcatccccgggtgcaccagctatcagcgctgcctccttcctgcaggatctaatacatcggtatggcgagggtgacagcctcactctgcagcagctgaaggccctgctcaaccacctggatgtgggagtgggccggggtaatgtcacccagcacgtgcaaggacacaggaacctctccacgtgctttagttctggagacctcttcactgcccacaatttcagcgagcagtcgcggattgggagcagcgagctccaggagttctgccccaccatcctccagcagctggattcccgggcctgcacctcggagaaccaggaaaacgaggagaatgagcagacggaggaggggcggccaagcgctgttgaagtgtggggatacggtctcctctgtgtgaccgtcatctccctctgctccctcctgggggccagcgtggtgcccttcatgaagaagaccttttacaagaggctgctgctctacttcatagctctggcgattggaaccctctactccaacgccctcttccagctcatcccggaggcatttggtttcaaccctctggaagattattatgtctccaagtctgcagtggtgtttgggggcttttatcttttctttttcacagagaagatcttgaagattcttcttaagcagaaaaatgagcatcatcatggacacagccattatgcctctgagtcgcttccctccaagaaggaccaggaggagggggtgatggagaagctgcagaacggggacctggaccacatgattcctcagcactgcagcagtgagctggacggcaaggcgcccatggtggacgagaaggtcattgtgggctcgctctctgtgcaggacctgcaggcttcccagagtgcttgctactggctgaaaggtgtccgctactctgatatcggcactctggcctggatgatcactctgagcgacggcctccataatttcatcgatggcctggccatcggtgcttccttcactgtgtcagttttccaaggcatcagcacctcggtggccatcctctgtgaggagttcccacatgagctaggagactttgtcatcctgctcaacgctgggatgagcatccaacaagctctcttcttcaacttcctttctgcctgctgctgctacctgggtctggcctttggcatcctggccggcagccacttctctgccaactggatttttgcgctagctggaggaatgttcttgtatatttctctggctgatatgttccctgagatgaatgaggtctgtcaagaggatgaaaggaagggcagcatcttgattccatttatcatccagaacctgggcctcctgactggattcaccatcatggtggtcctcaccatgtattcaggacagatccagattgggtagggctctgccaagagcctgtgggactggaagtcgggccctgggctgcccgatcgccagcccgaggacttaccatccacaatgcaccacggaagaggccgttctatgaaaaactgacacagactgtattcctgcattcaaatgtcagccgtttgtaaaatgctgtatcctaggaataagctgccctggtaaccagtctctagctagtgcctcttgccctctcctcacctccttttctctcagtgactctggaacctgaatgcagcttacaagacaagcctgacttttttctctgattaccttggcctcctcttggaaccagtgctgaaaggttttgaatcctttacccaacaatgcaaaaatagagccaatggttataacttggctagaaatatcaagagttgaatccatagtgtggggcccatgactctagctgggcaccttggacctccagctggccaatagaagagacaggagacaggaagccttcccattttttcaaagtctgtttaattgcctattacttctctcaaagagaacctgaagtcagaacacatgagcagggtgagaggtgaggcaaggttcatcctgaatgggagaggaagtcgaaccactgctgtgtgtcttgtcaggatgctcacttgttcctactgagatgctggatattgattttgtaacagcacctggtgtttcacggctgtccgagtgagctaacgtggcggtgtggctgcctggacctcctctttcaggttaacgctgacagaatggaggctcaggctgtctgcaagaaaacagttggtttggctgtgattttgacctcctcttccccactgccatcttctaagagactttgtagctgcctcctagaagcacattctgagcacatttgagacctctgtgttagaggggagactgcacaaactatcctcccccaggttgagacgtctgcagagtggcaagctgacttgtagaaatggggtgccatttatgctctacttagacaagggtaatcagaaatggaatcagtgcaggcaaaatttaggatttgccgcttccataaatcaaagcatgactaatagggggtctctgaaatgtaagggcacaaacttcacttagggcatcgcagatgtttgcagaatggttggcctaatgattatgctacagatgggttttaaatgacccgtctaggttactgcttccttgcaaaaaaagtcgaatcctgcattgaattgaatatgaatttctctaactctctccagaaaatggatggagataacttgtctttaaaactgtaggccagccttagccactgtggagcccttgcctccgagctctggcttcaaggggagctcttctccaggttcactaggtgaattgatttattattatcatattgataatgtgagattctttagccactttggggagcctgtctctccagaagcctttcttagtggtgcccacagttggagcccaggggccatgtttgcaaactgattcatgtgcatggctgacaggagtactggttcactaccaatgcctgagcttttctcttacatagaaaaactgtccactctcagtaatcacaagcagcatccgttttgttttctcttcttgggagacatctgtcaaaccaggaatattcttgaaaagaacgtgagcaggaaaaactgctggtgatactttttttaagttttgtttttatcttgcctgttggcttcaatacatttgagaatacgctgaagagggaaaatttcagtgatggagattctagattaaatatcaggactgatttcctggtgggattatggtccagttttaccaaagaaccaattccttgaatgttggaatctaactttttatattgtcattattattgttgtttttaaacggttctttgtcttttctgttttatttttctcaagctgctttcaggagctagcagaaaataactcaaagttgaagactctggaagattttgctttaacctaactcgcattgatgtattaaatttataattttagcattcccaatagatcctatcattccttaaacataataccctttgtcttggagtagaatactaagttagagttagtggatttctagtttaggagaggagctcaaaactataatctttaacaaattgaaaaatgaaatagggtgttttccctttttgtgcacacctatattaccttaagaaatttccttccatagacagctgcctcaaagggaaatcctctttaaaccgtagttggcgcagaggtcagtcctagtcggagcttaggaggggcggagacgctcacatcgtctgacttgagtcgccactgattgtggcaacagctttgcctcatgagtcaaaaattggcaatttcttttgatttttagttgttgaatttgctgtttcaagcatttgtacatattagaagtctaaggagtagcaagtcagtgggaggactttttcacccctggcattagcagcttcgacctcattttccagatgcaccagctcctattaataagttagcaaggaaagtgtatgtcacgtgcaggaacagtgaggcagggacaggggttctgctccttctcacttcaccaccggcacacagcttgcccctgtctttgcccccaaaggtattttgtgtctagtgtcaaattggagctattcttcactggtccttaaccttgggttttaaaggttcccggttgggtacgaagaacgatatatagtctctccaaagatgcaatgcggatctatcaacagtgttgattgccaaggagagaagtccatccctaagctggcccacgtttacaccgggttcatgacaacacgtcgggatataccaacaatcgtcgcgaacacaatttaacccggcttctctctatcactactactatatttgtgactcacgacacgacacgcagaagacaccacgacgcccacgacacgcatgt

SEQ ID NO: 52046 - DNA, 981 bp, Homo sapiens
gagccggcacctattttatgttgacccaatagatcctatcattccttaaacataataccctttgtcttggagtagaatactaagttagagttagtggatttctagtttaggagaggagctcaaaactataatctttaacaaattgaaaaatgaaatagggtgttttccctttttgtgcacacctatattaccttaagaaatttccttccatagacagctgcctcaaagggaaatcctctttaaaccgtagttggcgcagaggtcagtcctagtcggagcttaggaggggcggagacgctcacatcgtctgacttgagtcgccactgattgtggcaacagctttgcctcatgagtcaaaaattggcaatttcttttgatttttagttgttgaatttgctgtttcaagcatttgtacatattagaagtctaaggagtagcaagtcagtgggaggactttttcacccctggcattagcagcttcgacctcattttccagatgcaccagctcctattaataagttagcaaggaaagtgtatgtcacgtgcaggaacagtgaggcagggacaggggttctgctccttctcacttcaccaccggcacacagcttgcccctgtctttgcccccaaaggtattttgtgtctagtgtcaaattggagctattcttcactggtccttaaccttgggttttaaaaagaaggcttctctgtttgggtagcgtaagagctgagtatagtaagtcctcttccaaagagatggcaatatgctgggcatctactttaaaacaaagttgtctgatttttgcaagagaggttaggattttattgttcttatttccctttacagttctgcagttccatcacagtatttttttaaataactcaggtgtatgagaagaaattagaaaagaaaattaacttatgtggactgtaaatgttttatttgtaagattctataaataaagctatattctgtaattgtt

SEQ ID NO: 52047 - DNA, 948 bp, Homo sapiens
gagaatactaactctaacttagtattctactccaagacaaagggtattaagttagagttagtggatttctagtttaggagaggagctcaaaactataatctttaacaaattgaaaaatgaaatagggtgttttccctttttgtgcacacctatattaccttaagaaatttccttccatagacagctgcctcaaagggaaatcctctttaaaccgtagttggcgcagaggtcagtcctagtcggagcttaggaggggcggagacgctcacatcgtctgacttgagtcgccactgattgtggcaacagctttgcctcatgagtcaaaaattggcaatttcttttgatttttagttgttgaatttgctgtttcaagcatttgtacatattagaagtctaaggagtagcaagtcagtgggaggactttttcacccctggcattagcagcttcgacctcattttccagatgcaccagctcctattaataagttagcaaggaaagtgtatgtcacgtgcaggaacagtgaggcagggacaggggttctgctccttctcacttcaccaccggcacacagcttgcccctgtctttgcccccaaaggtattttgtgtctagtgtcaaattggagctattcttcactggtccttaaccttgggttttaaaaagaaggcttctctgtttgggtagcgtaagagctgagtatagtaagtcctcttccaaagagatggcaatatgctgggcatctactttaaaacaaagttgtctgatttttgcaagagaggttaggattttattgttcttatttccctttacagttctgcagttccatcacagtatttttttaaataactcaggtgtatgagaagaaattagaaaagaaaattaacttatgtggactgtaaatgttttatttgtaagattctataaataaagctatattctgtaattgtt

SEQ ID NO: 52048 - DNA, 2543 bp, Homo sapiens
gcagtgaggggggtcggcgcgcgtgtctacgcggacgcaccggctaagctgcttctgccgccgccggccgcctgggaccttgcggtgaggctgcgcggggccgaggccgcctccgagcgccaggtttattcagtcaccatgaagctgctgctgctgcacccggccttccagagctgcctcctgctgaccctgcttggcttatggagaaccacccctgaggctcacgcttcatccccgggtgcaccagctatcagcgctgcctccttcctgcaggatctaatacatcggtatggcgagggtgacagcctcactctgcagcagctgaaggccctgctcaaccacctggatgtgggagtgggccggggtaatgtcacccagcacgtgcaaggacacaggaacctctccacgtgctttagttctggagacctcttcactgcccacaatttcagcgagcagtcgcggattgggagcagcgagctccaggagttctgccccaccatcctccagcagctggattcccgggcctgcacctcggagaaccaggaaaacgaggagaatgagcagacggaggaggggcggccaagcgctgttgaagtgtggggatacggtctcctctgtgtgaccgtcatctccctctgctccctcctgggggccagcgtggtgcccttcatgaagaagaccttttacaagaggctgctgctctacttcatagctctggcgattggaaccctctactccaacgccctcttccagctcatcccggaggcatttggtttcaaccctctggaagattattatgtctccaagtctgcagtggtgtttgggggcttttatcttttctttttcacagagaagatcttgaagattcttcttaagcagaaaaatgagcatcatcatggacacagccattatgcctctgagtcgcttccctccaagaaggaccaggaggagggggtgatggagaagctgcagaacggggacctggaccacatgattcctcagcactgcagcagtgagctggacggcaaggcgcccatggtggacgagaaggtcattgtgggctcgctctctgtgcaggacctgcaggcttcccagagtgcttgctactggctgaaaggtgtccgctactctgatatcggcactctggcctggatgatcactctgagcgacggcctccataatttcatcgatggcctggccatcggtgcttccttcactgtgtcagttttccaaggcatcagcacctcggtggccatcctctgtgaggagttcccacatgagctaggagactttgtcatcctgctcaacgctgggatgagcatccaacaagctctcttcttcaacttcctttctgcctgctgctgctacctgggtctggcctttggcatcctggccggcagccacttctctgccaactggatttttgcgctagctggaggaatgttcttgtatatttctctggctgatatgttccctgagatgaatgaggtctgtcaagaggatgaaaggaagggcagcatcttgattccatttatcatccagaacctgggcctcctgactggattcaccatcatggtggtcctcaccatgtattcaggacagatccagattgggtagggctctgccaagagcctgtgggactggaagtcgggccctgggctgcccgatcgccagcccgaggacttaccatccacaatgcaccacggaagaggccgttctatgaaaaactgacacagactgtattcctgcattcaaatgtcagccgtttgtaaaatgctgtatcctaggaataagctgccctggtaaccagtctctagctagtgcctcttgccctctcctcacctccttttctctcagtgactctggaacctgaatgcagcttacaagacaagcctgacttttttctctgattaccttggcctcctcttggaaccagtgctgaaaggttttgaatcctttacccaacaatgcaaaaatagagccaatggttataacttggctagaaatatcaagagttgaatccatagtgtggggcccatgactctagctgggcaccttggacctccagctggccaatagaagagacaggagacaggaagccttcccattttttcaaagtctgtttaattgcctattacttctctcaaagagaacctgaagtcagaacacatgagcagggtgagaggtgaggcaaggttcatcctgaatgggagaggaagtcgaaccactgctgtgtgtcttgtcaggatgctcacttgttcctactgagatgctggatattgattttgtaacagcacctggtgtttcacggctgtccgagtgagctaacgtggcggtgtggctgcctggacctcctctttcaggttaacgctgacagaatggaggctcaggctgtctgcaagtgggagaggaagtcgaaccactgctgtgtgtccttgtcaggatgctcacttgttcctactgagatgctggatattgattttgtaacagcacctggtgtttcacggctgtccgagtgagctaactggcggcgttggatgcat

SEQ ID NO: 52049 - DNA, 277 bp, Homo sapiens
cagggccgccccaggcagcaggagtgtccccaccctcagtaatagaggccctcgtctgttcttgttcctccacagtgtggggctttggttttctcagtgtctcactgattaacctggcctctctcctgggagtcctcgtcctgccctgcacagagaaagcgtttttcagccgtgtgctcacttacttcatcgccctgtccattggaacgctgctgtctaacgcgctattccagctcatcccagaggtgcagtagaacagaaacttgcgcgtcctctt

SEQ ID NO: 52050 - DNA, 4599 bp, Homo sapiens
gcagtgaggggggtcggcgcgcgtgtctacgcggacgcaccggctaagctgcttctgccgccgccggccgcctgggaccttgcggtgaggctgcgcggggccgaggccgcctccgagcgccaggtttattcagtcaccatgaagctgctgctgctgcacccggccttccagagctgcctcctgctgaccctgcttggcttatggagaaccacccctgaggctcacgcttcatccccgggtgcaccagctatcagcgctgcctccttcctgcaggatctaatacatcggtatggcgagggtgacagcctcactctgcagcagctgaaggccctgctcaaccacctggatgtgggagtgggccggggtaatgtcacccagcacgtgcaaggacacaggaacctctccacgtgctttagttctggagacctcttcactgcccacaatttcagcgagcagtcgcggattgggagcagcgagctccaggagttctgccccaccatcctccagcagctggattcccgggcctgcacctcggagaaccaggaaaacgaggagaatgagcagacggaggaggggcggccaagcgctgttgaagtgtggggatacggtctcctctgtgtgaccgtcatctccctctgctccctcctgggggccagcgtggtgcccttcatgaagaagaccttttacaagaggctgctgctctacttcatagctctggcgattggaaccctctactccaacgccctcttccagctcatcccggaggcatttggtttcaaccctctggaagattattatgtctccaagtctgcagtggtgtttgggggcttttatcttttctttttcacagagaagatcttgaagattcttcttaagcagaaaaatgagcatcatcatggacacagccattatgcctctgagtcgcttccctccaagaaggaccaggaggagggggtgatggagaagctgcagaacggggacctggaccacatgattcctcagcactgcagcagtgagctggacggcaaggcgcccatggtggacgagaaggtcattgtgggctcgctctctgtgcaggacctgcaggcttcccagagtgcttgctactggctgaaaggtgtccgctactctgatatcggcactctggcctggatgatcactctgagcgacggcctccataatttcatcgatggcctggccatcggtgcttccttcactgtgtcagttttccaaggcatcagcacctcggtggccatcctctgtgaggagttcccacatgagctaggagactttgtcatcctgctcaacgctgggatgagcatccaacaagctctcttcttcaacttcctttctgcctgctgctgctacctgggtctggcctttggcatcctggccggcagccacttctctgccaactggatttttgcgctagctggaggaatgttcttgtatatttctctggctgatatgttccctgagatgaatgaggtctgtcaagaggatgaaaggaagggcagcatcttgattccatttatcatccagaacctgggcctcctgactggattcaccatcatggtggtcctcaccatgtattcaggacagatccagattgggtagggctctgccaagagcctgtgggactggaagtcgggccctgggctgcccgatcgccagcccgaggacttaccatccacaatgcaccacggaagaggccgttctatgaaaaactgacacagactgtattcctgcattcaaatgtcagccgtttgtaaaatgctgtatcctaggaataagctgccctggtaaccagtctctagctagtgcctcttgccctctcctcacctccttttctctcagtgactctggaacctgaatgcagcttacaagacaagcctgacttttttctctgattaccttggcctcctcttggaaccagtgctgaaaggttttgaatcctttacccaacaatgcaaaaatagagccaatggttataacttggctagaaatatcaagagttgaatccatagtgtggggcccatgactctagctgggcaccttggacctccagctggccaatagaagagacaggagacaggaagccttcccattttttcaaagtctgtttaattgcctattacttctctcaaagagaacctgaagtcagaacacatgagcagggtgagaggtgaggcaaggttcatcctgaatgggagaggaagtcgaaccactgctgtgtgtcttgtcaggatgctcacttgttcctactgagatgctggatattgattttgtaacagcacctggtgtttcacggctgtccgagtgagctaacgtggcggtgtggctgcctggacctcctctttcaggttaacgctgacagaatggaggctcaggctgtctgcaagaaaacagttggtttggctgtgattttgacctcctcttccccactgccatcttctaagagactttgtagctgcctcctagaagcacattctgagcacatttgagacctctgtgttagaggggagactgcacaaactatcctcccccaggttgagacgtctgcagagtggcaagctgacttgtagaaatggggtgccatttatgctctacttagacaagggtaatcagaaatggaatcagtgcaggcaaaatttaggatttgccgcttccataaatcaaagcatgactaatagggggtctctgaaatgtaagggcacaaacttcacttagggcatcgcagatgtttgcagaatggttggcctaatgattatgctacagatgggttttaaatgacccgtctaggttactgcttccttgcaaaaaaagtcgaatcctgcattgaattgaatatgaatttctctaactctctccagaaaatggatggagataacttgtctttaaaactgtaggccagccttagccactgtggagcccttgcctccgagctctggcttcaaggggagctcttctccaggttcactaggtgaattgatttattattatcatattgataatgtgagattctttagccactttggggagcctgtctctccagaagcctttcttagtggtgcccacagttggagcccaggggccatgtttgcaaactgattcatgtgcatggctgacaggagtactggttcactaccaatgcctgagcttttctcttacatagaaaaactgtccactctcagtaatcacaagcagcatccgttttgttttctcttcttgggagacatctgtcaaaccaggaatattcttgaaaagaacgtgagcaggaaaaactgctggtgatactttttttaagttttgtttttatcttgcctgttggcttcaatacatttgagaatacgctgaagagggaaaatttcagtgatggagattctagattaaatatcaggactgatttcctggtgggattatggtccagttttaccaaagaaccaattccttgaatgttggaatctaactttttatattgtcattattattgttgtttttaaacggttctttgtcttttctgttttatttttctcaagctgctttcaggagctagcagaaaataactcaaagttgaagactctggaagattttgctttaacctaactcgcattgatgtattaaatttataattttagcattcccaatagatcctatcattccttaaacataataccctttgtcttggagtagaatactaagttagagttagtggatttctagtttaggagaggagctcaaaactataatctttaacaaattgaaaaatgaaatagggtgttttccctttttgtgcacacctatattaccttaagaaatttccttccatagacagctgcctcaaagggaaatcctctttaaaccgtagttggcgcagaggtcagtcctagtcggagcttaggaggggcggagacgctcacatcgtctgacttgagtcgccactgattgtggcaacagctttgcctcatgagtcaaaaattggcaatttcttttgatttttagttgttgaatttgctgtttcaagcatttgtacatattagaagtctaaggagtagcaagtcagtgggaggactttttcacccctggcattagcagcttcgacctcattttccagatgcaccagctcctattaataagttagcaaggaaagtgtatgtcacgtgcaggaacagtgaggcagggacaggggttctgctccttctcacttcaccaccggcacacagcttgcccctgtctttgcccccaaaggtattttgtgtctagtgtcaaattggagctattcttcactggtccttaaccttgggttttaaaaagaaggcttctctgtttgggtagcgtaagagctgagtatagtaagtcctcttccaaagagatggcaatatgctgggcatctactttaaaacaaagttgtctgatttttgcaagagaggttaggattttattgttcttatttccctttacagttctgcagttccatcacagtatttttttaaataactcaggtgtatgagaagaaattagaaaagaaaattaacttatgtggactgtaaatgttttatttgtaagattctataaataaagctatattctgtaattgtt

SEQ ID NO: 52051 - DNA, 4599 bp, Homo sapiens
gcagtgaggggggtcggcgcgcgtgtctacgcggacgcaccggctaagctgcttctgccgccgccggccgcctgggaccttgcggtgaggctgcgcggggccgaggccgcctccgagcgccaggtttattcagtcaccatgaagctgctgctgctgcacccggccttccagagctgcctcctgctgaccctgcttggcttatggagaaccacccctgaggctcacgcttcatccccgggtgcaccagctatcagcgctgcctccttcctgcaggatctaatacatcggtatggcgagggtgacagcctcactctgcagcagctgaaggccctgctcaaccacctggatgtgggagtgggccggggtaatgtcacccagcacgtgcaaggacacaggaacctctccacgtgctttagttctggagacctcttcactgcccacaatttcagcgagcagtcgcggattgggagcagcgagctccaggagttctgccccaccatcctccagcagctggattcccgggcctgcacctcggagaaccaggaaaacgaggagaatgagcagacggaggaggggcggccaagcgctgttgaagtgtggggctttggttttctcagtgtctcactgattaacctggcctctctcctgggagtcctcgtcctgccctgcacagagaaagcgtttttcagccgtgtgctcacttacttcatcgccctgtccattggaacgctgctgtctaacgcgctattccagctcatcccagaggcatttggtttcaaccctctggaagattattatgtctccaagtctgcagtggtgtttgggggcttttatcttttctttttcacagagaagatcttgaagattcttcttaagcagaaaaatgagcatcatcatggacacagccattatgcctctgagtcgcttccctccaagaaggaccaggaggagggggtgatggagaagctgcagaacggggacctggaccacatgattcctcagcactgcagcagtgagctggacggcaaggcgcccatggtggacgagaaggtcattgtgggctcgctctctgtgcaggacctgcaggcttcccagagtgcttgctactggctgaaaggtgtccgctactctgatatcggcactctggcctggatgatcactctgagcgacggcctccataatttcatcgatggcctggccatcggtgcttccttcactgtgtcagttttccaaggcatcagcacctcggtggccatcctctgtgaggagttcccacatgagctaggagactttgtcatcctgctcaacgctgggatgagcatccaacaagctctcttcttcaacttcctttctgcctgctgctgctacctgggtctggcctttggcatcctggccggcagccacttctctgccaactggatttttgcgctagctggaggaatgttcttgtatatttctctggctgatatgttccctgagatgaatgaggtctgtcaagaggatgaaaggaagggcagcatcttgattccatttatcatccagaacctgggcctcctgactggattcaccatcatggtggtcctcaccatgtattcaggacagatccagattgggtagggctctgccaagagcctgtgggactggaagtcgggccctgggctgcccgatcgccagcccgaggacttaccatccacaatgcaccacggaagaggccgttctatgaaaaactgacacagactgtattcctgcattcaaatgtcagccgtttgtaaaatgctgtatcctaggaataagctgccctggtaaccagtctctagctagtgcctcttgccctctcctcacctccttttctctcagtgactctggaacctgaatgcagcttacaagacaagcctgacttttttctctgattaccttggcctcctcttggaaccagtgctgaaaggttttgaatcctttacccaacaatgcaaaaatagagccaatggttataacttggctagaaatatcaagagttgaatccatagtgtggggcccatgactctagctgggcaccttggacctccagctggccaatagaagagacaggagacaggaagccttcccattttttcaaagtctgtttaattgcctattacttctctcaaagagaacctgaagtcagaacacatgagcagggtgagaggtgaggcaaggttcatcctgaatgggagaggaagtcgaaccactgctgtgtgtcttgtcaggatgctcacttgttcctactgagatgctggatattgattttgtaacagcacctggtgtttcacggctgtccgagtgagctaacgtggcggtgtggctgcctggacctcctctttcaggttaacgctgacagaatggaggctcaggctgtctgcaagaaaacagttggtttggctgtgattttgacctcctcttccccactgccatcttctaagagactttgtagctgcctcctagaagcacattctgagcacatttgagacctctgtgttagaggggagactgcacaaactatcctcccccaggttgagacgtctgcagagtggcaagctgacttgtagaaatggggtgccatttatgctctacttagacaagggtaatcagaaatggaatcagtgcaggcaaaatttaggatttgccgcttccataaatcaaagcatgactaatagggggtctctgaaatgtaagggcacaaacttcacttagggcatcgcagatgtttgcagaatggttggcctaatgattatgctacagatgggttttaaatgacccgtctaggttactgcttccttgcaaaaaaagtcgaatcctgcattgaattgaatatgaatttctctaactctctccagaaaatggatggagataacttgtctttaaaactgtaggccagccttagccactgtggagcccttgcctccgagctctggcttcaaggggagctcttctccaggttcactaggtgaattgatttattattatcatattgataatgtgagattctttagccactttggggagcctgtctctccagaagcctttcttagtggtgcccacagttggagcccaggggccatgtttgcaaactgattcatgtgcatggctgacaggagtactggttcactaccaatgcctgagcttttctcttacatagaaaaactgtccactctcagtaatcacaagcagcatccgttttgttttctcttcttgggagacatctgtcaaaccaggaatattcttgaaaagaacgtgagcaggaaaaactgctggtgatactttttttaagttttgtttttatcttgcctgttggcttcaatacatttgagaatacgctgaagagggaaaatttcagtgatggagattctagattaaatatcaggactgatttcctggtgggattatggtccagttttaccaaagaaccaattccttgaatgttggaatctaactttttatattgtcattattattgttgtttttaaacggttctttgtcttttctgttttatttttctcaagctgctttcaggagctagcagaaaataactcaaagttgaagactctggaagattttgctttaacctaactcgcattgatgtattaaatttataattttagcattcccaatagatcctatcattccttaaacataataccctttgtcttggagtagaatactaagttagagttagtggatttctagtttaggagaggagctcaaaactataatctttaacaaattgaaaaatgaaatagggtgttttccctttttgtgcacacctatattaccttaagaaatttccttccatagacagctgcctcaaagggaaatcctctttaaaccgtagttggcgcagaggtcagtcctagtcggagcttaggaggggcggagacgctcacatcgtctgacttgagtcgccactgattgtggcaacagctttgcctcatgagtcaaaaattggcaatttcttttgatttttagttgttgaatttgctgtttcaagcatttgtacatattagaagtctaaggagtagcaagtcagtgggaggactttttcacccctggcattagcagcttcgacctcattttccagatgcaccagctcctattaataagttagcaaggaaagtgtatgtcacgtgcaggaacagtgaggcagggacaggggttctgctccttctcacttcaccaccggcacacagcttgcccctgtctttgcccccaaaggtattttgtgtctagtgtcaaattggagctattcttcactggtccttaaccttgggttttaaaaagaaggcttctctgtttgggtagcgtaagagctgagtatagtaagtcctcttccaaagagatggcaatatgctgggcatctactttaaaacaaagttgtctgatttttgcaagagaggttaggattttattgttcttatttccctttacagttctgcagttccatcacagtatttttttaaataactcaggtgtatgagaagaaattagaaaagaaaattaacttatgtggactgtaaatgttttatttgtaagattctataaataaagctatattctgtaattgtt

SEQ ID NO: 52052 - DNA, 4548 bp, Homo sapiens
gcagtgaggggggtcggcgcgcgtgtctacgcggacgcaccggctaagctgcttctgccgccgccggccgcctgggaccttgcggtgaggctgcgcggggccgaggccgcctccgagcgccaggtttattcagtcaccatgaagctgctgctgctgcacccggccttccagagctgcctcctgctgaccctgcttggcttatggagaaccacccctgaggctcacgcttcatccccgggtgcaccagctatcagcgctgcctccttcctgcaggatctaatacatcggtatggcgagggtgacagcctcactctgcagcagctgaaggccctgctcaaccacctggatgtgggagtgggccggggtaatgtcacccagcacgtgcaaggacacaggaacctctccacgtgctttagttctggagacctcttcactgcccacaatttcagcgagcagtcgcggattgggagcagcgagctccaggagttctgccccaccatcctccagcagctggattcccgggcctgcacctcggagaaccaggaaaacgaggagaatgagcagacggaggaggggcggccaagcgctgttgaagtgtggggatacggtctcctctgtgtgaccgtcatctccctctgctccctcctgggggccagcgtggtgcccttcatgaagaagaccttttacaagaggctgctgctctacttcatagctctggcgattggaaccctctactccaacgccctcttccagctcatcccggaggcatttggtttcaaccctctggaagattattatgtctccaagtctgcagtggtgtttgggggcttttatcttttctttttcacagagaagatcttgaagattcttcttaagcagaaaaatgagcatcatcatggacacagccattatgcctctgagtcgcttccctccaagaaggaccaggaggagggggtgatggagaagctgcagaacggggacctggaccacatgattcctcagcactgcagcagtgagctggacggcaaggcgcccatggtggacgagaaggtcattgtgggctcgctctctgtgcaggacctgcaggcttcccagagtgcttgctactggctgaaaggtgtccgctactctgatatcggcactctggcctggatgatcactctgagcgacggcctccataatttcatcgatggcctggccatcggtgcttccttcactgtgtcagttttccaaggcatcagcacctcggtggccatcctctgtgaggagttcccacatgagctaggagactttgtcatcctgctcaacgctgggatgagcatccaacaagctctcttcttcaacttcctttctgcctgctgctgctacctgggtctggcctttggcatcctggccggcagccacttctctgccaactggatttttgcgctagctggaggaatgttcttgtatatttctctggctgatatgttccctgagatgaatgaggtctgtcaagaggatgaaaggaagggcagcatcttgattccatttatcatccagaacctgggcctcctgactggattcaccatcatggtggtcctcaccatgtattcaggacagatccagattgggtagggctctgccaagagcctgtgggactggaagtcgggccctgggctgcccgatcgccagcccgaggacttaccatccacaatgcaccacggaagaggccgttctatgaaaaactgacacagactgtattcctgcattcaaatgtcagccgtttgtaaaatgctgtatcctaggaataagctgccctggtaaccagtctctagctagtgcctcttgccctctcctcacctccttttctctcagtgactctggaacctgaatgcagcttacaagacaagcctgacttttttctctgattaccttggcctcctcttggaaccagtgctgaaaggttttgaatcctttacccaacaatgcaaaaatagagccaatggttataacttggctagaaatatcaagagttgaatccatagtgtggggcccatgactctagctgggcaccttggacctccagctggccaatagaagagacaggagacaggaagccttcccattttttcaaagtctgtttaattgcctattacttctctcaaagagaacctgaagtcagaacacatgagcagggtgagaggtgaggcaaggttcatcctgaatgggagaggaagtcgaaccactgctgtgtgtcttgtcaggatgctcacttgttcctactgagatgctggatattgattttgtaacagcacctggtgtttcacggctgtccgagtgagctaacgtggcggtgtggctgcctggacctcctctttcaggttaacgctgacagaatggaggctcaggctgtctgcaagaaaacagttggtttggctgtgattttgacctcctcttccccactgccatcttctaagagactttgtagctgcctcctagaagcacattctgagcacatttgagacctctgtgttagaggggagactgcacaaactatcctcccccaggttgagacgtctgcagagtggcaagctgacttgtagaaatggggtgccatttatgctctacttagacaagggtaatcagaaatggaatcagtgcaggcaaaatttaggatttgccgcttccataaatcaaagcatgactaatagggggtctctgaaatgtaagggcacaaacttcacttagggcatcgcagatgtttgcagaatggttggcctaatgattatgctacagatgggttttaaatgacccgtctaggttactgcttccttgcaaaaaaagtcgaatcctgcattgaattgaatatgaatttctctaactctctccagaaaatggatggagataacttgtctttaaaactgtaggccagccttagccactgtggagcccttgcctccgagctctggcttcaaggggagctcttctccaggttcactaggtgaattgatttattattatcatattgataatgtgagattctttagccactttggggagcctgtctctccagaagcctttcttagtggtgcccacagttggagcccaggggccatgtttgcaaactgattcatgtgcatggctgacaggagtactggttcactaccaatgcctgagcttttctcttacatagaaaaactgtccactctcagtaatcacaagcagcatccgttttgttttctcttcttgggagacatctgtcaaaccaggaatattcttgaaaagaacgtgagcaggaaaaactgctggtgatactttttttaagttttgtttttatcttgcctgttggcttcaatacatttgagaatacgctgaagagggaaggattatggtccagttttaccaaagaaccaattccttgaatgttggaatctaactttttatattgtcattattattgttgtttttaaacggttctttgtcttttctgttttatttttctcaagctgctttcaggagctagcagaaaataactcaaagttgaagactctggaagattttgctttaacctaactcgcattgatgtattaaatttataattttagcattcccaatagatcctatcattccttaaacataataccctttgtcttggagtagaatactaagttagagttagtggatttctagtttaggagaggagctcaaaactataatctttaacaaattgaaaaatgaaatagggtgttttccctttttgtgcacacctatattaccttaagaaatttccttccatagacagctgcctcaaagggaaatcctctttaaaccgtagttggcgcagaggtcagtcctagtcggagcttaggaggggcggagacgctcacatcgtctgacttgagtcgccactgattgtggcaacagctttgcctcatgagtcaaaaattggcaatttcttttgatttttagttgttgaatttgctgtttcaagcatttgtacatattagaagtctaaggagtagcaagtcagtgggaggactttttcacccctggcattagcagcttcgacctcattttccagatgcaccagctcctattaataagttagcaaggaaagtgtatgtcacgtgcaggaacagtgaggcagggacaggggttctgctccttctcacttcaccaccggcacacagcttgcccctgtctttgcccccaaaggtattttgtgtctagtgtcaaattggagctattcttcactggtccttaaccttgggttttaaaaagaaggcttctctgtttgggtagcgtaagagctgagtatagtaagtcctcttccaaagagatggcaatatgctgggcatctactttaaaacaaagttgtctgatttttgcaagagaggttaggattttattgttcttatttccctttacagttctgcagttccatcacagtatttttttaaataactcaggtgtatgagaagaaattagaaaagaaaattaacttatgtggactgtaaatgttttatttgtaagattctataaataaagctatattctgtaattgtt

SEQ ID NO: 52053 - DNA, 4545 bp, Homo sapiens
gcagtgaggggggtcggcgcgcgtgtctacgcggacgcaccggctaagctgcttctgccgccgccggccgcctgggaccttgcggtgaggctgcgcggggccgaggccgcctccgagcgccaggtttattcagtcaccatgaagctgctgctgctgcacccggccttccagagctgcctcctgctgaccctgcttggcttatggagaaccacccctgaggctcacgcttcatccccgggtgcaccagctatcagcgctgcctccttcctgcaggatctaatacatcggtatggcgagggtgacagcctcactctgcagcagctgaaggccctgctcaaccacctggatgtgggagtgggccggggtaatgtcacccagcacgtgcaaggacacaggaacctctccacgtgctttagttctggagacctcttcactgcccacaatttcagcgagcagtcgcggattgggagcagcgagctccaggagttctgccccaccatcctccagcagctggattcccgggcctgcacctcggagaaccaggaaaacgaggagaatgagcagacggaggaggggcggccaagcgctgttgaagtgtggggatacggtctcctctgtgtgaccgtcatctccctctgctccctcctgggggccagcgtggtgcccttcatgaagaagaccttttacaagaggctgctgctctacttcatagctctggcgattggaaccctctactccaacgccctcttccagctcatcccggaggcatttggtttcaaccctctggaagattattatgtctccaagtctgcagtggtgtttgggggcttttatcttttctttttcacagagaagatcttgaagattcttcttaagcagaaaaatgagcatcatcatggacacagccattatgcctctgagtcgcttccctccaagaaggaccaggaggagggggtgatggagaagctgcagaacggggacctggaccacatgattcctcagcactgcagcagtgagctggacggcaaggcgcccatggtggacgagaaggtcattgtgggctcgctctctgtgcaggacctgcaggcttcccagagtgcttgctactggctgaaaggtgtccgctactctgatatcggcactctggcctggatgatcactctgagcgacggcctccataatttcatcgatggcctggccatcggtgcttccttcactgtgtcagttttccaaggcatcagcacctcggtggccatcctctgtgaggagttcccacatgagctaggagactttgtcatcctgctcaacgctgggatgagcatccaacaagctctcttcttcaacttcctttctgcctgctgctgctacctgggtctggcctttggcatcctggccggcagccacttctctgccaactggatttttgcgctagctggaggaatgttcttgtatatttctctggctgatatgttccctgagatgaatgaggtctgtcaagaggatgaaaggaagggcagcatcttgattccatttatcatccagaacctgggcctcctgactggattcaccatcatggtggtcctcaccatgtattcaggacagatccagattgggtagggctctgccaagagcctgtgggactggaagtcgggccctgggctgcccgatcgccagcccgaggacttaccatccacaatgcaccacggaagaggccgttctatgaaaaactgacacagactgtattcctgcattcaaatgtcagccgtttgtaaaatgctgtatcctaggaataagctgccctggtaaccagtctctagctagtgcctcttgccctctcctcacctccttttctctcagtgactctggaacctgaatgcagcttacaagacaagcctgacttttttctctgattaccttggcctcctcttggaaccagtgctgaaaggttttgaatcctttacccaacaatgcaaaaatagagccaatggttataacttggctagaaatatcaagagttgaatccatagtgtggggcccatgactctagctgggcaccttggacctccagctggccaatagaagagacaggagacaggaagccttcccattttttcaaagtctgtttaattgcctattacttctctcaaagagaacctgaagtcagaacacatgagcagggtgagaggtgaggcaaggttcatcctgaatgggagaggaagtcgaaccactgctgtgtgtcttgtcaggatgctcacttgttcctactgagatgctggatattgattttgtaacagcacctggtgtttcacggctgtccgagtgagctaacgtggcggtgtggctgcctggacctcctctttcaggttaacgctgacagaatggaggctcaggctgtctgcaagaaaacagttggtttggctgtgattttgacctcctcttccccactgccatcttctaagagactttgtagctgcctcctagaagcacattctgagcacatttgagacctctgtgttagaggggagactgcacaaactatcctcccccaggttgagacgtctgcagagtggcaagctgacttgtagaaatggggtgccatttatgctctacttagacaagggtaatcagaaatggaatcagtgcaggcaaaatttaggatttgccgcttccataaatcaaagcatgactaatagggggtctctgaaatgtaagggcacaaacttcacttagggcatcgcagatgtttgcagaatggttggcctaatgattatgctacagatgggttttaaatgacccgtctaggttactgcttccttgcaaaaaaagtcgaatcctgcattgaattgaatatgaatttctctaactctctccagaaaatggatggagataacttgtctttaaaactgtaggccagccttagccactgtggagcccttgcctccgagctctggcttcaaggggagctcttctccaggttcactaggtgaattgatttattattatcatattgataatgtgagattctttagccactttggggagcctgtctctccagaagcctttcttagtggtgcccacagttggagcccaggggccatgtttgcaaactgattcatgtgcatggctgacaggagtactggttcactaccaatgcctgagcttttctcttacatagaaaaactgtccactctcagtaatcacaagcagcatccgttttgttttctcttcttgggagacatctgtcaaaccaggaatattcttgaaaagaacgtgagcaggaaaaactgctggtgatactttttttaagttttgtttttatcttgcctgttggcttcaatacatttgagaatacgctgaagagggaaaatttcagtgatggagattctagattaaatatcaggactgatttcctggtgggattatggtccagttttaccaaagaaccaattccttgaatgttggaatctaactttttatattgtcattattattgttgtttttaaacggttctttgtcttttctgttttatttttctcaagctgctttcaggagctagcagaaaataactcaaagttgaagactctggaagattttgctttaacctaactcgcattgatgtattaaatttataattttagcattcccaatagatcctatcattccttaaacataataccctttgtcttggagtagaatactaagttagagttagtggatttctagtttaggagaggagctcaaaactataatctttaacaaattgaaaaatgaaatagggtgttttccctttttgtgcacacctatattaccttaagaaatttccttccatagacagctgcctcaaagggaaatcctctttaaaccgtagttggcgcagaggtcagtcctagtcggagcttaggaggggcggagacgctcacatcgtctgacttgagtcgccactgattgtggcaacagctttgcctcatgagtcatgtacatattagaagtctaaggagtagcaagtcagtgggaggactttttcacccctggcattagcagcttcgacctcattttccagatgcaccagctcctattaataagttagcaaggaaagtgtatgtcacgtgcaggaacagtgaggcagggacaggggttctgctccttctcacttcaccaccggcacacagcttgcccctgtctttgcccccaaaggtattttgtgtctagtgtcaaattggagctattcttcactggtccttaaccttgggttttaaaaagaaggcttctctgtttgggtagcgtaagagctgagtatagtaagtcctcttccaaagagatggcaatatgctgggcatctactttaaaacaaagttgtctgatttttgcaagagaggttaggattttattgttcttatttccctttacagttctgcagttccatcacagtatttttttaaataactcaggtgtatgagaagaaattagaaaagaaaattaacttatgtggactgtaaatgttttatttgtaagattctataaataaagctatattctgtaattgtt

SEQ ID NO: 52054 - DNA, 4662 bp, Homo sapiens
gcagtgaggggggtcggcgcgcgtgtctacgcggacgcaccggctaagctgcttctgccgccgccggccgcctgggaccttgcggtgaggctgcgcggggccgaggccgcctccgagcgccaggtttattcagtcaccatgaagctgctgctgctgcacccggccttccagagctgcctcctgctgaccctgcttggcttatggagaaccacccctgaggctcacgcttcatccccgggtgcaccagctatcagcgctgcctccttcctgcaggatctaatacatcggtatggcgagggtgacagcctcactctgcagcagctgaaggccctgctcaaccacctggatgtgggagtgggccggggtaatgtcacccagcacgtgcaaggacacaggaacctctccacgtgctttagttctggagacctcttcactgcccacaatttcagcgagcagtcgcggattgggagcagcgagctccaggagttctgccccaccatcctccagcagctggattcccgggcctgcacctcggagaaccaggaaaacgaggagaatgagcagacggaggaggggcggccaagcgctgttgaagtgtggggatacggtctcctctgtgtgaccgtcatctccctctgctccctcctgggggccagcgtggtgcccttcatgaagaagaccttttacaagaggctgctgctctacttcatagctctggcgattggaaccctctactccaacgccctcttccagctcatcccggaggcatttggtttcaaccctctggaagattattatgtctccaagtctgcagtggtgtttgggggcttttatcttttctttttcacagagaagatcttgaagattcttcttaagcagaaaaatgagcatcatcatggacacagccattatgcctctgagtcgcttccctccaagaaggaccaggaggagggggtgatggagaagctgcagaacggggacctggaccacatgattcctcagcactgcagcagtgagctggacggcaaggcgcccatggtggacgagaaggtcattgtgggctcgctctctgtgcaggacctgcaggcttcccagagtgcttgctactggctgaaaggtgtccgctactctgatatcggcactctggcctggatgatcactctgagcgacggcctccataatttcatcgatggcctggccatcggtgcttccttcactgtgtcagttttccaaggcatcagcacctcggtggccatcctctgtgaggagttcccacatgagctaggagactttgtcatcctgctcaacgctgggatgagcatccaacaagctctcttcttcaacttcctttctgcctgctgctgctacctgggtctggcctttggcatcctggccggcagccacttctctgccaactggatttttgcgctagctggaggaatgttcttgtatatttctctggctgatatgttccctgagatgaatgaggtctgtcaagaggatgaaaggaagggcagcatcttgattccatttatcatccagaacctgggcctcctgactggattcaccatcatggtggtcctcaccatgtattcaggacagatccagattgggtagggctctgccaagagcctgtgggactggaagtcgggccctgggctgcccgatcgccagcccgaggacttaccatccacaatgcaccacggaagaggccgttctatgaaaaactgacacagactgtattcctgcattcaaatgtcagccgtttgtaaaatgctgtatcctaggaataagctgccctggtaaccagtctctagctagtgcctcttgccctctcctcacctccttttctctcagtgactctggaacctgaatgcagcttacaagacaagcctgacttttttctctgattaccttggcctcctcttggaaccagtgctgaaaggttttgaatcctttacccaacaatgcaaaaatagagccaatggttataacttggctagaaatatcaagagttgaatccatagtgtggggcccatgactctagctgggcaccttggacctccagctggccaatagaagagacaggagacaggaagccttcccattttttcaaagtctgtttaattgcctattacttctctcaaagagaacctgaagtcagaacacatgagcagggtgagaggtgaggcaaggttcatcctgaatgggagaggaagtcgaaccactgctgtgtgtcttgtcaggatgctcacttgttcctactgagatgctggatattgattttgtaacagcacctggtgtttcacggctgtccgagtgagctaacgtggcggtgtggctgcctggacctcctctttcaggttaacgctgacagaatggaggctcaggctgtctgcaagaaaacagttggtttggctgtgattttgacctcctcttccccactgccatcttctaagagactttgtagctgcctcctagaagcacattctgagcacatttgagacctctgtgttagaggggagactgcacaaactatcctcccccaggttgagacgtctgcagagtggcaagctgacttgtagaaatggggtgccatttatgctctacttagacaagggtaatcagaaatggaatcagtgcaggcaaaatttaggatttgccgcttccataaatcaaagcatgactaatagggggtctctgaaatgtaagggcacaaacttcacttagggcatcgcagatgtttgcagaatggttggcctaatgattatgctacagatgggttttaaatgacccgtctaggttactgcttccttgcaaaaaaagtcgaatcctgcattgaattgaatatgaatttctctaactctctccagaaaatggatggagataacttgtctttaaaactgtaggccagccttagccactgtggagcccttgcctccgagctctggcttcaaggggagctcttctccaggttcactaggtgaattgatttattattatcatattgataatgtgagattctttagccactttggggagcctgtctctccagaagcctttcttagtggtgcccacagttggagcccaggggccatgtttgcaaactgattcatgtgcatggctgacaggagtactggttcactaccaatgcctgagcttttctcttacatagaaaaactgtccactctcagtaatcacaagcagcatccgttttgttttctcttcttgggagacatctgtcaaaccaggaatattcttgaaaagaacgtgagcaggaaaaactgctggtgatactttttttaagttttgtttttatcttgcctgttggcttcaatacatttgagaatacgctgaagagggaaaatttcagtgatggagattctagattaaatatcaggactgatttcctggtgggattatggtccagttttaccaaagaaccaattccttgaatgttggaatctaactttttatattgtcattattattgttgtttttaaacggttctttgtcttttctgttttatttttctcaagctgctttcaggagctagcagaaaataactcaaagttgaagactctggaagattttgctttaacctaactcgcattgatgtattaaatttataattttagcattcccaatagatcctatcattccttaaacataataccctttgtcttggagtagaatactaagttagagttagtggatttctagtttaggagaggagctcaaaactataatctttaacaaattgaaaaatgaaatagggtgttttccctttttgtgcacacctatattaccttaagaaatttccttccatagacagctgcctcaaagggaaatcctctttaaaccgtagttggcgcagaggtcagtcctagtcggagcttaggaggggcggagacgctcacatcgtctgacttgagtcgccactgattgtggcaacagctttgcctcatgagtcaaaaattggcaatttcttttgatttttagttgttgaatttgctgtttcaagcatttgtacatattagaagtctaaggagtagcaagtcagtgggaggactttttcacccctggcattagcagcttcgacctcattttccagatgcaccagctcctattaataagttagcaaggaaagtgtatgtcacgtgcaggaacagtgaggcagggacaggggttctgctccttctcacttcaccaccggcacacagcttgcccctgtctttgcccccaaaggtattttgtgtctagtgtcaaattggagctattcttcactggtccttaaccttgggttttaaaaagaaggcttctctgtttgggtagcgtaagagctgagtatagtaagtcctcttccaaagagatggcaatatgctgggcatctactttaaaacaaagttgtctgatttttgcaagagaggttaggattttattgttcttatttccctttacagttctgcagttccatcacagtatttttttaaataactcaggtgtatgagaagaaattagaaaagaaaattaacttatgtggactgtaaatgttttatttgtaagattctataaataaagctatattctgtaattgttaagaaaaaaacgggtgatcatttgcaataaatgtggatgtaatgaaggctgttgaacacaagg

SEQ ID NO: 52055 - DNA, 4278 bp, Homo sapiens
gcagtgaggggggtcggcgcgcgtgtctacgcggacgcaccggctaagctgcttctgccgccgccggccgcctgggaccttgcggtgaggctgcgcggggccgaggccgcctccgagcgccaggtttattcagtcaccatgaagctgctgctgctgcacccggccttccagagctgcctcctgctgaccctgcttggcttatggagaaccacccctgaggctcacgcttcatccccgggtgcaccagctatcagcgctgcctccttcctgcaggatctaatacatcggtatggcgagggtgacagcctcactctgcagcagctgaaggccctgctcaaccacctggatgtgggagtgggccggggtaatgtcacccagcacgtgcaaggacacaggaacctctccacgtgctttagttctggagacctcttcactgcccacaatttcagcgagcagtcgcggattgggagcagcgagctccaggagttctgccccaccatcctccagcagctggattcccgggcctgcacctcggagaaccaggaaaacgaggagaatgagcagacggaggaggggcggccaagcgctgttgaagtgtggggatacggtctcctctgtgtgaccgtcatctccctctgctccctcctgggggccagcgtggtgcccttcatgaagaagaccttttacaagaggctgctgctctacttcatagctctggcgattggaaccctctactccaacgccctcttccagctcatcccggaggcatttggtttcaaccctctggaagattattatgtctccaagtctgcagtggtgtttgggggcttttatcttttctttttcacagagaagatcttgaagattcttcttaagcagaaaaatgagcatcatcatggacacagccattatgcctctgagtcgcttccctccaagaaggaccaggaggagggggtgatggagaagctgcagaacggggacctggaccacatgattcctcagcactgcagcagtgagctggacggcaaggcgcccatggtggacgagaaggtcattgtgggctcgctctctgtgcaggacctgcaggcttcccagagtgcttgctactggctgaaaggtgtccgctactctgatatcggcactctggcctggatgatcactctgagcgacggcctccataatttcatcgatggcctggccatcggtgcttccttcactgtgtcagttttccaaggcatcagcacctcggtggccatcctctgtgaggagttcccacatgagctaggagactttgtcatcctgctcaacgctgggatgagcatccaacaagctctcttcttcaacttcctttctgcctgctgctgctacctgggtctggcctttggcatcctggccggcagccacttctctgccaactggatttttgcgctagctggaggaatgttcttgtatatttctctggctgatatgttccctgagatgaatgaggtctgtcaagaggatgaaaggaagggcagcatcttgattccatttatcatccagaacctgggcctcctgactggattcaccatcatggtggtcctcaccatgtattcaggacagatccagattgggtagggctctgccaagagcctgtgggactggaagtcgggccctgggctgcccgatcgccagcccgaggacttaccatccacaatgcaccacggaagaggccgttctatgaaaaactgacacagactgtattcctgcattcaaatgtcagccgtttgtaaaatgctgtatcctaggaataagctgccctggtaaccagtctctagctagtgcctcttgccctctcctcacctccttttctctcagtgactctggaacctgaatgcagcttacaagacaagcctgacttttttctctgattaccttggcctcctcttggaaccagtgctgaaaggttttgaatcctttacccaacaatgcaaaaatagagccaatggttataacttggctagaaatatcaagagttgaatccatagtgtggggcccatgactctagctgggcaccttggacctccagctggccaatagaagagacaggagacaggaagccttcccattttttcaaagtctgtttaattgcctattacttctctcaaagagaacctgaagtcagaacacatgagcagggtgagaggtgaggcaaggttcatcctgaatgggagaggaagtcgaaccactgctgtgtgtcttgtcaggatgctcacttgttcctactgagatgctggatattgattttgtaacagcacctggtgtttcacggctgtccgagtgagctaacgtggcggtgtggctgcctggacctcctctttcaggttaacgctgacagaatggaggctcaggctgtctgcaagaaaacagttggtttggctgtgattttgacctcctcttccccactgccatcttctaagagactttgtagctgcctcctagaagcacattctgagcacatttgagacctctgtgttagaggggagactgcacaaactatcctcccccaggttgagacgtctgcagagtggcaagctgacttgtagaaatggggtgccatttatgctctacttagacaagggtaatcagaaatggaatcagtgcaggcaaaatttaggatttgccgcttccataaatcaaagcatgactaatagggggtctctgaaatgtaagggcacaaacttcacttagggcatcgcagatgtttgcagaatggttggcctaatgattatgctacagatgggttttaaatgacccgtctaggttactgcttccttgcaaaaaaagtcgaatcctgcattgaattgaatatgaatttctctaactctctccagaaaatggatggagataacttgtctttaaaactgtaggccagccttagccactgtggagcccttgcctccgagctctggcttcaaggggagctcttctccaggttcactaggtgaattgatttattattatcatattgataatgtgagattctttagccactttggggagcctgtctctccagaagcctttcttagtggtgcccacagttggagcccaggggccatgtttgcaaactgattcatgtgcatggctgacaggagtactggttcactaccaatgcctgagcttttctcttacatagaaaaactgtccactctcagtaatcacaagcagcatccgttttgttttctcttcttgggagacatctgtcaaaccaggaatattcttgaaaagaacgtgagcaggaaaaactgctggtgatactttttttaagttttgtttttatcttgcctgttggcttcaatacatttgagaatacgctgaagagggaaaatttcagtgatggagattctagattaaatatcaggactgatttcctggtgggattatggtccagttttaccaaagaaccaattccttgaatgttggaatctaactttttatattgtcattattattgttgtttttaaacggttctttgtcttttctgttttatttttctcaagctgctttcaggagctagcagaaaataactcaaagttgaagactctggaagattttgctttaacctaactcgcattgatgtattaaatttataattttagcattcccaatagatcctatcattccttaaacataataccctttgtcttggagtagaatactaagttagagttagtggatttctagtttaggagaggagctcaaaactataatctttaacaaattgaaaaatgaaatagggtgttttccctttttgtgcacacctatattaccttaagaaatttccttccatagacagctgcctcaaagggaaatcctctttaaaccgtagttggcgcagaggtcagtcctagtcggagcttaggaggggcggagacgctcacatcgtctgacttgagtcgccactgattgtggcaacagctttgcctcatgagtcaaaaattggcaatttcttttgatttttagttgttgaatttgctgtttcaagcatttgtacatattagaagtctaaggagtagcaagtcagtgggaggactttttcacccctggcattagcagcttcgacctcattttccagatgcaccagctcctattaataagttagcaaggaaagtgtatgtcacgtgcaggaacagtgaggcagggacaggggttctgctccttctcacttcaccaccggcacacagcttgcccctgtctttgcccccaaaggtcgtctcgcggttgtagcctctagaaaca

SEQ ID NO: 52056 - DNA, 302 bp, Homo sapiens
tggtggagcctctaagaggttgactcaggcttaccttgagggcacatggtccagcctttgacgctgtgggccctgggggtgtgctttctcctaggacctgcaggcttcccagagtgcttgctactggctgaaaggtgtccgctactctgatatcggcactctggcctggatgatcactctgagcgacggcctccataatttcatcgatggcctggccatcggtgcttccttcactgtgtcagttttccaaggcatcagcacctcggtggccatcctctgtgaggagttcccacatgagctag

SEQ ID NO: 52057 - DNA, 1260 bp, Homo sapiens
gtgctccatcgtgggtggggtaaagcggggtgggagccgatggtccgtttcctgaaggcacaggccagcttagcctgggtgctcagaggacctcggctggggtacacgtttgggggctgggagaccgttgctgaaggcagcgatcatgtggcggcggcactaggcggagtcagacggtcacgtgattgggaggggatcacgtgacggagggcggctgaggagcgcggggtggctgcctttaagtcacgtgacatgaggagaggtgggcgggtacctggaggaagctcgcggcgtcggtggcggtggcgcgcggcggccgctgagaccggggctttgagtcgcaccccgcggcccgccccccgccgccaccctcgcagatccgtgctttttcccctttgcttctctcccgtactgggtcagtcctgtccgcgctcgcgcgtcggtttgcgggtgtgcgcaggcgcggcaggggccattagccctttgggtgggcggtggagcccgggagcgcgcgggcgagaccatggcgggtagcagcactgggggcggtggggttggggagacgaaggtgatttaccacctggatgaggaagagactccctacctggtgaagatccctgtccccgccgagcgcatcaccctcggcgatttcaagagcgtcctgcagcggcccgcgggcgccaagtactttttcaagtctatggatcaggatttcggggtggtgaaggaagaaatttcagatgacaacgcccgcctcccctgcttcaacggaagggtggtatcctggctggtgtcctcagataatccccaacccgagatggcccctccagtccatgagcctcgggcagaactggcgcctccagccccacctttacctcctttgccacccgagaggaccagcggcattggggactcaaggcctccatccttccaccctaatgtgtccagcagccatgagaatctggagcctgagacagaaaccgagtcagtagtgtcactgaggcgggagcggcctcgcaggagagacagcagtgagcatggcgttggggtccacgagtttgttgccccctcgggttgggtcccctttggccgtttgtggtgtttttcttttcctttttggccccgtgtttttttgtgttccccgggtttttttttttttttttattcttttcctcctggttttgggtcacagccacatcactcacagctgatcactggttggtggaaattaaactttgagcagcagattacgttaaaaaa

SEQ ID NO: 52058 - DNA, 703 bp, Homo sapiens
gataatgcctcccccctcgaatgccggggcgcggcacacagcagtgcgacggggaagaaagcccacaagcagggccatcagcaccgcaacatgcccgcagcccacaccagtgggcagagccaccaaccagccaagagcagctcgggcccatcaaacgtctggcccagatgcagcacgcaagcttcacatgcctggcatcccacgagtcttgtgagttagtaccacatgggcaagctggccggcgctcctgggtgtgatgggtgtcctgcccttaagtgctgctcttacatgcctggcaaccaaccaggctccacagaattggcacggattcacacagctgtctcctcctcaggggtagacaagggacctttgattatttttagctttgtttttttataagcctttttgggggttaaaatagagtttcttacatttttgggacttttttaataggcatttcctcttttatatgaagaattcccatccattgggccccttctaaccccagaatgtgacctcctcctccagttacccacagccctgccctttgcagggttgggggtggtcagcggtaccccggggttaggcatcctagacagcagcctgaggaagctgggagatttgggccatgtagctgcctttgttactctatttattttagtcacttgtataaaacaccaaataaagcaatagaggcaaactc

SEQ ID NO: 52059 - DNA, 205 bp, Homo sapiens
tctgacccacttgccgtcgcttccaggtgaatgacatgaactttgagaacatgagcaacgatgacgctgtgcgggtgctgagggacattgtgcacaagcctggccccattgtgctgactgtggccaagtgctgggatccctctcctcaggcctatttcactctcccccgaaccgttacatgcaaggggtcccgagctcgaaattc

SEQ ID NO: 52060 - DNA, 2658 bp, Homo sapiens
agataggaccggcgggggctttgctagagtggattgggcgacatggaggggcacacgtctactttgggccacactgggattttctggcctatggtggagcagattgtactatgctgagggtggtgaaggaagaaatttcagatgacaacgcccgcctcccctgcttcaacggaagggtggtatcctggctggtgtcctcagataatccccaacccgagatggcccctccagtccatgagcctcgggcagaactggcgcctccagccccacctttacctcctttgccacccgagaggaccagcggcattggggactcaaggcctccatccttccaccctaatgtgtccagcagccatgagaatctggagcctgagacagaaaccgagtcagtagtgtcactgaggcgggagcggcctcgcaggagagacagcagtgagcatggcgctgggggccacaggactggtggcccctcaaggctggagcgccacctggccggatacgagagctcctctaccctcatgaccagcgagctggagagtaccagcctgggggactcggacgaggaggacaccatgagcaggttcagcagctccacggagcagagcagtgcctcccgcctccttaagcgccaccggcggcgaaggaagcagaggccaccccgcctggagaggacgtcatccttcagcagcgtcacagattccacaatgtctctcaatatcatcacagtcacgctaaacatggagaagtacaacttcctgggtatctccattgttggccagagcaatgagcggggagacggaggcatctacattggctccatcatgaagggtggggctgtggcggccgacgggcgcattgagccaggggacatgcttttgcaggtgaatgacatgaactttgagaacatgagcaacgatgacgctgtgcgggtgctgagggacattgtgcacaagcctggccccattgtgctgactgtggccaagtgctgggatccctctcctcaggcctatttcactctcccccgaaatgagcccatccagccaattgaccctgctgcctgggtgtcccattccgcggctctgactggcaccttcccagcctatccaggttcctcctccatgagcaccattacatctggatcgtctttgcctgatggctgtgaaggccggggtctctccgtccatacggacatggcatcggtgaccaaggccatggcagctccagagtctggactggaagtccgggaccgcatgtggctcaagatcaccatccctaatgcctttctgggctcggatgtggttgactggctctaccatcacgtggagggctttcctgagcggcgggaggcccgcaagtatgccagcgggctgctcaaagcaggcctgatccgacacaccgtcaacaagatcaccttctctgagcagtgctattacgtcttcggagacctcagtggtggctgtgagagctacctagtcaacctgtctctcaatgacaacgatggctccagtggggcttcagaccaggataccctggctcctctgcctggggccaccccctggcccctgctgcccactttctcctaccagtaccctgccccacacccctacagcccgcagcctccaccctaccatgagctttcatcttacacctatggtgggggcagtgccagcagccagcatagtgagggcagccggagcagtgggtcgacacggagtgatgggggggcagggcgcacggggaggcccgaggagcgggcccccgagtccaagtccggcagtggcagtgagtctgagccctccagccgagggggcagccttcggcggggtggggaagcaagtgggactagcgatgggggccctcctccatccagaggctcaactgggggtgcccctaatctccgagcccacccagggctccatccctatggaccgccccctggcatggccctcccctacaaccccatgatggtggtcatgatgcccccacctccacctccagtccctccagcagtgcagcctccgggggcccctccagtcagagacctgggctctgtgcccccagaactgacagccagccgccaaagcttccacatggccatgggcaatcccagcgagttctttgtggatgttatgtagcccactgtggggccaggctgggccgggcgctcctggtgtgtgactgggtgtcctggccgtcatgtgcttgctcttacagtgcctgggctcagcctaccagctgctgccatacaggagattgtggccactgtgactctcaccagcagtgcctggttcctcccccttccctcaggggtagacaagggacctttgattatttttagctttgtttttttataagcctttttgggggttaaaatagagtttcttacatttttgggacttttttaataggcatttcctcttttatatgaagaattcccatccattgggccccttctaaccccagaatgtgacctcctcctccagttacccacagccctgccctttgcagggttgggggtggtcagcggtaccccggggttaggcatcctagacagcagcctgaggaagctgggagatttgggccatgtagctgcctttgttactctatttattttagtcacttgtataaaacaccaaataaagcaatagaggcaaactc

SEQ ID NO: 52061 - DNA, 2807 bp, Homo sapiens
gtgctccatcgtgggtggggtaaagcggggtgggagccgatggtccgtttcctgaaggcacaggccagcttagcctgggtgctcagaggacctcggctggggtacacgtttgggggctgggagaccgttgctgaaggcagcgatcatgtggcggcggcactaggcggagtcagacggtcacgtgattgggaggggatcacgtgacggagggcggctgaggagcgcggggtggctgcctttaagtcacgtgacatgaggagaggtgggcgggtacctggaggaagctcgcggcgtcggtggcggtggcgcgcggcggccgctgagaccggggctttgagtcgcaccccgcggcccgccccccgccgccaccctcgcagatccgtgctttttcccctttgcttctctcccgtactgggtcagtcctgtccgcgctcgcgcgtcggtttgcgggtgtgcgcaggcgcggcaggggccattagccctttgggtgggcggtggagcccgggagcgcgcgggcgagaccatggcgggtagcagcactgggggcggtggggttggggagacgaaggtgatttaccacctggatgaggaagagactccctacctggtgaagatccctgtccccgccgagcgcatcaccctcggcgatttcaagagcgtcctgcagcggcccgcgggcgccaagtactttttcaagtctatggatcaggatttcggggtggtgaaggaagaaatttcagatgacaacgcccgcctcccctgcttcaacggaagggtggtatcctggctggtgtcctcagataatccccaacccgagatggcccctccagtccatgagcctcgggcagaactggcgcctccagccccacctttacctcctttgccacccgagaggaccagcggcattggggactcaaggcctccatccttccaccctaatgtgtccagcagccatgagaatctggagcctgagacagaaaccgagtcagtagtgtcactgaggcgggagcggcctcgcaggagagacagcagtgagcatggcgctgggggccacaggactggtggcccctcaaggctggagcgccacctggccggatacgagagctcctctaccctcatgaccagcgagctggagagtaccagcctgggggactcggacgaggaggacaccatgagcaggttcagcagctccacggagcagagcagtgcctcccgcctccttaagcgccaccggcggcgaaggaagcagaggccaccccgcctggagaggacgtcatccttcagcagcgtcacagattccacaatgtctctcaatatcatcacagtcacgctaaacatggagaagtacaacttcctgggtatctccattgttggccagagcaatgagcggggagacggaggcatctacattggctccatcatgaagggtggggctgtggcggccgacgggcgcattgagccaggggacatgcttttgcaggtgaatgacatgaactttgagaacatgagcaacgatgacgctgtgcgggtgctgagggacattgtgcacaagcctggccccattgtgctgactgtggccaagtgctgggatccctctcctcaggcctatttcactctcccccgaaatgagcccatccagccaattgaccctgctgcctgggtgtcccattccgcggctctgactggcaccttcccagcctatccaggttcctcctccatgagcaccattacatctggatcgtctttgcctgatggctgtgaaggccggggtctctccgtccatacggacatggcatcggtgaccaaggccatggcagctccagagtctggactggaagtccgggaccgcatgtggctcaagatcaccatccctaatgcctttctgggctcggatgtggttgactggctctaccatcacgtggagggctttcctgagcggcgggaggcccgcaagtatgccagcgggctgctcaaagcaggcctgatccgacacaccgtcaacaagatcaccttctctgagcagtgctattacgtcttcggagacctcagtggtggctgtgagagctacctagtcaacctgtctctcaatgacaacgatggctccagtggggcttcagaccaggataccctggctcctctgcctggggccaccccctggcccctgctgcccactttctcctaccagtaccctgccccacacccctacagcccgcagcctccaccctaccatgacttccacatggccatgggcaatcccagcgagttctttgtggatgttatgtagcccactgtggggccaggctgggccgggcgctcctggtgtgtgactgggtgtcctggccgtcatgtgcttgctcttacagtgcctgggctcagcctaccagctgctgccatacaggagattgtggccactgtgactctcaccagcagtgcctggttcctcccccttccctcaggggtagacaagggacctttgattatttttagctttgtttttttataagcctttttgggggttaaaatagagtttcttacatttttgggacttttttaataggcatttcctcttttatatgaagaattcccatccattgggccccttctaaccccagaatgtgacctcctcctccagttacccacagccctgccctttgcagggttgggggtggtcagcggtaccccggggttaggcatcctagacagcagcctgaggaagctgggagatttgggccatgtagctgcctttgttactctatttattttagtcacttgtataaaacaccaaataaagcaatagaggcaaactc

SEQ ID NO: 52062 - DNA, 221 bp, Homo sapiens
gcagaggcgagagcaggagttggaagaagaacctgaggcctttttccactgtgggtgctcccaggctcggatgtggttgactggctctaccatcacgtggagggctttcctgagcggcgggaggcccgcaagtatgccagcgggctgctcaaagcaggcctgatccgacacaccgtcaacaagatcaccttctctgagcagtgctattacgtcttcggaga

SEQ ID NO: 52063 - DNA, 401 bp, Homo sapiens
gtgcgggattgcttttgaaactggactaagaggtttgagtcagactcaaggaagtctttggagcagcactgtgcccctgagggtgcgttagggagaggagaaataaggaaaggggattgagtttggagatttcttaggtgtcggagtgagttctttcaatgtaagagaagacctgaacagggcaggagaaagtcaacatcctggagccaggtgaagattgggagaaagtttgatgggggtcggggtggggatggttggtccagctcactgacctctaccttgtcgcttggcagggtggtgaaggaagaaatttcagatgacaacgcccgcctcccctgcttcaacggaagggtggtatcctgggtaagaggttctgacaccgaggaccaggccccctcagc

SEQ ID NO: 52064 - DNA, 3257 bp, Homo sapiens
gtgctccatcgtgggtggggtaaagcggggtgggagccgatggtccgtttcctgaaggcacaggccagcttagcctgggtgctcagaggacctcggctggggtacacgtttgggggctgggagaccgttgctgaaggcagcgatcatgtggcggcggcactaggcggagtcagacggtcacgtgattgggaggggatcacgtgacggagggcggctgaggagcgcggggtggctgcctttaagtcacgtgacatgaggagaggtgggcgggtacctggaggaagctcgcggcgtcggtggcggtggcgcgcggcggccgctgagaccggggctttgagtcgcaccccgcggcccgccccccgccgccaccctcgcagatccgtgctttttcccctttgcttctctcccgtactgggtcagtcctgtccgcgctcgcgcgtcggtttgcgggtgtgcgcaggcgcggcaggggccattagccctttgggtgggcggtggagcccgggagcgcgcgggcgagaccatggcgggtagcagcactgggggcggtggggttggggagacgaaggtgatttaccacctggatgaggaagagactccctacctggtgaagatccctgtccccgccgagcgcatcaccctcggcgatttcaagagcgtcctgcagcggcccgcgggcgccaagtactttttcaagtctatggatcaggatttcggggtggtgaaggaagaaatttcagatgacaacgcccgcctcccctgcttcaacggaagggtggtatcctggctggtgtcctcagataatccccaacccgagatggcccctccagtccatgagcctcgggcagaactggcgcctccagccccacctttacctcctttgccacccgagaggaccagcggcattggggactcaaggcctccatccttccaccctaatgtgtccagcagccatgagaatctggagcctgagacagaaaccgagtcagtagtgtcactgaggcgggagcggcctcgcaggagagacagcagtgagcatggcgctgggggccacaggactggtggcccctcaaggctggagcgccacctggccggatacgagagctcctctaccctcatgaccagcgagctggagagtaccagcctgggggactcggacgaggaggacaccatgagcaggttcagcagctccacggagcagagcagtgcctcccgcctccttaagcgccaccggcggcgaaggaagcagaggccaccccgcctggagaggacgtcatccttcagcagcgtcacagattccacaatgtctctcaatatcatcacagtcacgctaaacatggagaagtacaacttcctgggtatctccattgttggccagagcaatgagcggggagacggaggcatctacattggctccatcatgaagggtggggctgtggcggccgacgggcgcattgagccaggggacatgcttttgcaggtgaatgacatgaactttgagaacatgagcaacgatgacgctgtgcgggtgctgagggacattgtgcacaagcctggccccattgtgctgactgtggccaagtgctgggatccctctcctcaggcctatttcactctcccccgaaatgagcccatccagccaattgaccctgctgcctgggtgtcccattccgcggctctgactggcaccttcccagcctatccaggttcctcctccatgagcaccattacatctggatcgtctttgcctgatggctgtgaaggccggggtctctccgtccatacggacatggcatcggtgaccaaggccatggcagctccagagtctggactggaagtccgggaccgcatgtggctcaagatcaccatccctaatgcctttctgggctcggatgtggttgactggctctaccatcacgtggagggctttcctgagcggcgggaggcccgcaagtatgccagcgggctgctcaaagcaggcctgatccgacacaccgtcaacaagatcaccttctctgagcagtgctattacgtcttcggagacctcagtggtggctgtgagagctacctagtcaacctgtctctcaatgacaacgatggctccagtggggcttcagaccaggataccctggctcctctgcctggggccaccccctggcccctgctgcccactttctcctaccagtaccctgccccacacccctacagcccgcagcctccaccctaccatgagctttcatcttacacctatggtgggggcagtgccagcagccagcatagtgagggcagccggagcagtgggtcgacacggagtgatgggggggcagggcgcacggggaggcccgaggagcgggcccccgagtccaagtccggcagtggcagtgagtctgagccctccagccgagggggcagccttcggcggggtggggaagcaagtgggactagcgatgggggccctcctccatccagaggctcaactgggggtgcccctaatctccgagcccacccagggctccatccctatggaccgccccctggcatggccctcccctacaaccccatgatggtggtcatgatgcccccacctccacctccagtccctccagcagtgcagcctccgggggcccctccagtcagagacctgggctctgtgcccccagaactgacagccagccgccaaagcttccacatggccatgggcaatcccagcgagttctttgtggatgttatgtagcccactgtggggccaggctgggccgggcgctcctggtgtgtgactgggtgtcctggccgtcatgtgcttgctcttacagtgcctgggctcagcctaccagctgctgccatacaggagattgtggccactgtgactctcaccagcagtgcctggttcctcccccttccctcaggggtagacaagggacctttgattatttttagctttgtttttttataagcctttttgggggttaaaatagagtttcttacatttttgggacttttttaataggcatttcctcttttatatgaagaattcccatccattgggccccttctaaccccagaatgtgacctcctcctccagttacccacagccctgccctttgcagggttgggggtggtcagcggtaccccggggttaggcatcctagacagcagcctgaggaagctgggagatttgggccatgtagctgcctttgttactctatttattttagtcacttgtataaaacaccaaataaagcaatagaggcaaactc

SEQ ID NO: 52065 - DNA, 3291 bp, Homo sapiens
gtgctccatcgtgggtggggtaaagcggggtgggagccgatggtccgtttcctgaaggcacaggccagcttagcctgggtgctcagaggacctcggctggggtacacgtttgggggctgggagaccgttgctgaaggcagcgatcatgtggcggcggcactaggcggagtcagacggtcacgtgattgggaggggatcacgtgacggagggcggctgaggagcgcggggtggctgcctttaagtcacgtgacatgaggagaggtgggcgggtacctggaggaagctcgcggcgtcggtggcggtggcgcgcggcggccgctgagaccggggctttgagtcgcaccccgcggcccgccccccgccgccaccctcgcagatccgtgctttttcccctttgcttctctcccgtactgggtcagtcctgtccgcgctcgcgcgtcggtttgcgggtgtgcgcaggcgcggcaggggccattagccctttgggtgggcggtggagcccgggagcgcgcgggcgagaccatggcgggtagcagcactgggggcggtggggttggggagacgaaggtgatttaccacctggatgaggaagagactccctacctggtgaagatccctgtccccgccgagcgcatcaccctcggcgatttcaagagcgtcctgcagcggcccgcgggcgccaagtactttttcaagtctatggatcaggatttcggggtggtgaaggaagaaatttcagatgacaacgcccgcctcccctgcttcaacggaagggtggtatcctggctggtgtcctcagataatccccaacccgagatggcccctccagtccatgagcctcgggcagaactggcgcctccagccccacctttacctcctttgccacccgagaggaccagcggcattggggactcaaggcctccatccttccaccctaatgtgtccagcagccatgagaatctggagcctgagacagaaaccgagtcagtagtgtcactgaggcgggagcggcctcgcaggagagacagcagtgagcatggcgctgggggccacaggactggtggcccctcaaggctggagcgccacctggccggatacgagagctcctctaccctcatgaccagcgagctggagagtaccagcctgggggactcggacgaggaggacaccatgagcaggttcagcagctccacggagcagagcagtgcctcccgcctccttaagcgccaccggcggcgaaggaagcagaggccaccccgcctggagaggacgtcatccttcagcagcgtcacagattccacaatgtctctcaatatcatcacagtcacgctaaacatggagaagtacaacttcctgggtatctccattgttggccagagcaatgagcggggagacggaggcatctacattggctccatcatgaagggtggggctgtggcggccgacgggcgcattgagccaggggacatgcttttgcaggtgaatgacatgaactttgagaacatgagcaacgatgacgctgtgcgggtgctgagggacattgtgcacaagcctggccccattgtgctgactgtggccaagtgctgggatccctctcctcaggcctatttcactctcccccgaaatgagcccatccagccaattgaccctgctgcctgggtgtcccattccgcggctctgactggcaccttcccagcctatccaggttcctcctccatgagcaccattacatctggatcgtctttgcctgatggctgtgaaggccggggtctctccgtccatacggacatggcatcggtgaccaaggccatggcagctccagagtctggactggaagtccgggaccgcatgtggctcaagatcaccatccctaatgcctttctgggctcggatgtggttgactggctctaccatcacgtggagggctttcctgagcggcgggaggcccgcaagtatgccagcgggctgctcaaagcaggcctgatccgacacaccgtcaacaagatcaccttctctgagcagtgctattacgtcttcggagacctcagtggtggctgtgagagctacctagtcaacctgtctctcaatgacaacgatggctccagtggggcttcagaccaggataccctggctcctctgcctggggccaccccctggcccctgctgcccactttctcctaccagtaccctgccccacacccctacagcccgcagcctccaccctaccatgagctttcatcttacacctatggtgggggcagtgccagcagccagcatagtgagggcagccggagcagtgggtcgacacggagtgatgggggggcagggcgcacggggaggcccgaggagcgggcccccgagtccaagtccggcagtggcagtgagtctgagccctccagccgagggggcagccttcggcggggtggggaagcaagtgggactagcgatgggggccctcctccatccagaggctcaactgggggtgcccctaatctccgagcccacccagggctccatccctatggaccgccccctggcatggccctcccctacaaccccatgatggtggtcatgatgcccccacctccacctccagtccctccagcagtgcagcctccgggggcccctccagtcagagacctgggctctgtgcccccagaactgacagccagccgccaaagcttccacatggccatgggcaatcccagcgagttctttgtggatgttatgtagcccactgtggggccaggctgggccgggcgctcctggtgtgtgactgggtgtcctggccgtcatgtgcttgctcttacagtgcctgggctcagcctaccagctgctgccatacaggagattgtggccactgtgactctcaccagcagtgcctggttcctcccccttccctcaggggtagacaagggacctttgattatttttagctttgtttttttataagcctttttgggggttaaaatagagtttcttacatttttgggacttttttaataggcatttcctcttttatatgaagaattcccatccattgggccccttctaaccccagaatgtgacctcctcctccagttacccacagccctgccctttgcagggttgggggtggtcagcggtaccccggggttaggcatcctagacagcagcctgaggaagctgggagatttgggccatgtagctgcctttgttactctatttattttagtcacttgtataaaacaccaaataaagcaatagaggcaaactcaaaaaaacgcaaaaccaatcaaacaaaaaagggg

SEQ ID NO: 52066 - DNA, 2000 bp, Homo sapiens
gtgctccatcgtgggtggggtaaagcggggtgggagccgatggtccgtttcctgaaggcacaggccagcttagcctgggtgctcagaggacctcggctggggtacacgtttgggggctgggagaccgttgctgaaggcagcgatcatgtggcggcggcactaggcggagtcagacggtcacgtgattgggaggggatcacgtgacggagggcggctgaggagcgcggggtggctgcctttaagtcacgtgacatgaggagaggtgggcgggtacctggaggaagctcgcggcgtcggtggcggtggcgcgcggcggccgctgagaccggggctttgagtcgcaccccgcggcccgccccccgccgccaccctcgcagatccgtgctttttcccctttgcttctctcccgtactgggtcagtcctgtccgcgctcgcgcgtcggtttgcgggtgtgcgcaggcgcggcaggggccattagccctttgggtgggcggtggagcccgggagcgcgcgggcgagaccatggcgggtagcagcactgggggcggtggggttggggagacgaaggtgatttaccacctggatgaggaagagactccctacctggtgaagatccctgtccccgccgagcgcatcaccctcggcgatttcaagagcgtcctgcagcggcccgcgggcgccaagtactttttcaagtctatggatcaggatttcggggtggtgaaggaagaaatttcagatgacaacgcccgcctcccctgcttcaacggaagggtggtatcctggctggtgtcctcagataatccccaacccgagatggcccctccagtccatgagcctcgggcagaactggcgcctccagccccacctttacctcctttgccacccgagaggaccagcggcattggggactcaaggcctccatccttccaccctaatgtgtccagcagccatgagaatctggagcctgagacagaaaccgagtcagtagtgtcactgaggcgggagcggcctcgcaggagagacagcagtgagcatggcgctgggggccacaggactggtggcccctcaaggctggagcgccacctggccggatacgagagctcctctaccctcatgaccagcgagctggagagtaccagcctgggggactcggacgaggaggacaccatgagcaggttcagcagctccacggagcagagcagtgcctcccgcctccttaagcgccaccggcggcgaaggaagcagaggccaccccgcctggagaggacgtcatccttcagcagcgtcacagattccacaatgtctctcaatatcatcacagtcacgctaaacatggagaagtacaacttcctgggtatctccattgttggccagagcaatgagcggggagacggaggcatctacattggctccatcatgaagggtggggctgtggcggccgacgggcgcattgagccaggggacatgcttttgcaggtgaatgacatgaactttgagaacatgagcaacgatgacgctgtgcgggtgctgagggacattgtgcacaagcctggccccattgtgctgactgtggccaagtgctgggatccctctcctcaggcctatttcactctcccccgaaatgagcccatccagccaattgaccctgctgcctgggtgtcccattccgcggctctgactggcaccttcccagcctatccaggttcctcctccatgagcaccattacatctggatcgtctttgcctgatggctgtgaaggccggggtctctccgtccatacggacatggcatcggtgaccaaggccatggcagctccagagtctggactggaagtccgggaccgcatgtggctcaagatcaccatccctaatgcctttctgggctcggatgtggttgactggctctaccatcacgtggagggctttcctgagcggcgggaggcccgcgggtgcagcgggggcgccgggggccacgtagtggctggggaagacgccc

SEQ ID NO: 52067 - DNA, 308 bp, Homo sapiens
ggaaaagggttaagagataataaatacaaaaacataggtgcctcagaacactgtttttaaaaaaactttgtattcattttaaaaaatgacttttggtgtacaattctgtgagttttaacaaatgtacagatttgtgaaaccaccacaacaatcaggatacagaacaatttcatcactggtcaaaagacttctttatgctgctcttttgtagtcaaatcctgcccagcccttaccccctctagcaaccactgatgtattctctgtttttacagttttttgtgggtttttgttgctgttgttcttatttt

SEQ ID NO: 52068 - DNA, 286 bp, Homo sapiens
ggagtgagactctgtctcaaacaaagaaacaaacagcaacaacaacgaaagcatatggaataaacatgctgcaaccatccctgcaaaggatcctgccaggcaggcggttctgcttccttttgtaatagtttgcctggcagcagcttttgtaacactccagtgaggtaaagatggagtaacatcaatttgaggcttagatttataatttctaattgtacatactagccataaacagaatgttttactttacaacgtattatgagaggaacactcttaaaaaaaaaaa

SEQ ID NO: 52069 - DNA, 859 bp, Homo sapiens
cagtctggacttaagtgcagtactttctaattaaccacggcacagtgacaggcaacttcaccctactgcaacccaagacctgactggcacgaggaaaggtgcaataatgaagagttttcttctagtgtcaatgccctggcattaaccctgccttttttggctgtggaggttcaaaaccagaaacaaccagcatgccatgagaatgatgaaagaccattctatcagaaaacagctccatatgtcccaatgtattatgtgccaaatagctatccttattatggaaccaatttgtaccaacgtagaccagctatagcaattaataatccatatgtgcctcgcacatattatgcaaacccagctgtagttaggccacatgcccaaattcctcagcggcaatacctgccaaatagccacccacccactgtggtacgtcgcccaaacctgcatccatcatttattgccatccccccaaagaaaattcaggataaaataatcatccctaccatcaataccattgctactgttgaacctacaccagctcctgccactgaaccaacggtggacagtgtagtcactccagaagctttttcagagtccatcatcacgagcacccctgagacaaccacagttgcagttactccacctacggcataaaaacaccaaggaaatatcaaagaacacaacgcaggacttgctgaaaccaaattactacttcacactctccttcagccatttgtctgccttcagtcaacagaaaatgtgattttcacagattcagctcttctctccttacattttacattcatgccacattcaatattttgattcttgcacaataaagccaactgattgcaactga

SEQ ID NO: 52070 - DNA, 296 bp, Homo sapiens
gtgaccctgagccaggagtgagtaactctgaacctcatccgtaaacagatcattctacggtcgagtgtccctcatctgaaatgcttcagaacagagtgtttcgttttttgggtttttgtttttttgagacggagtctcgctctacctcccaggctggagtatagtggccagatcttggctcactgcaaccttcacctcctgggctcaagccatcctcctacctcagcctcctaagtagctgagactacaggcacacgccaccacgtccagctaatttttgtacttttagtagagat

SEQ ID NO: 52071 - DNA, 936 bp, Homo sapiens
tttggcaagcctggtttatatccatctacaaggtttgcgaacccatgttgccgatttttttttctgctacagaacaactcccttggtacaataaaaaagacgagtatttacttttcattgaaagtggagaacctgaaaaggaacctggaaagaagcagctggaaaaggtgagaggaaaacctagagtgtgtgttatcctgcaagccaattgagaatggagcttgcttgatatttcactagataaagaatttaaggcgagtatctatctttgttctccttggcaactgagagtctgcccttggaaacatcaggcaccatggggaagcgggataatcgggtagcctatatgaatcctatagcaatggccagatggagaggcccaactcaatctgtgggcccaacaatccaagattatctaaatcgaccaagacccacctgggaagaagtaaagaaacaattagaaaataaaaaaacaggttcaaaagcattagctgaatttgaagaaaaaatgaatgaaaattggaagaaagaacttgaaaaaagcagagagaaattattaagtggaaatgagagctcatctaaaaaaagagaaagaaagaaaaagagaaagaagaaatcttgtcggtcttcatcttcttcatcaagctctgattcttcaagcagttcttcagattctgaggatgaggaaaagaaacaaggaaaaaggagaaagaaaaagaagaaccgttcatacaaatcatcccaaagctctacgcatgaatcagaatcagagagcaaggagtctgtaaaaaagaaaaagaagtcaaaggatgaaacagagaaagaaaaggatgtaagaagcctcagcaaaaaaagaaagaaaagttaccctgatgataaacctttatcatctgagtcctcatctgaatcagattatgaagaggatgtgcaagcaaa

SEQ ID NO: 52072 - DNA, 230 bp, Homo sapiens
attttaccaagacacatacatagtgaaaatcaaatagtctgaaaagacttacagtgagaaaaagtaaaccttgaccacttctcaattttcaattctgcttccaagaagtaaccatttttcaattctctgcaatttttatcaggtaaacttctttcttcatgcaccctgccaccctacatcagatccaacacagtagccagagtgatttttaaaatgtaagtcagacctgg

SEQ ID NO: 52073 - DNA, 391 bp, Homo sapiens
ttcccagcactttgggaggctgaggtgggaggatcacctgaggtcagaagttcgagaccagcctggccaacatggtgaaacctcatctctactaaaaatacaaaaattagtcaggggtggtggtgcacacctgtagtcccagctactcaggaggctgaggcaggagaatcgcttgaacccaggagatggaggttgcagtgagctgagatcacgccactgcactccagcctgggcaacagagtgagactccgtctcaaagagaaaaaccaaaactctcgtgtttgctttctaggacactactcagggccaccgtgactcagcttacccaaattacaatcctttgtttcccaaataaatgcttaatactattaaaagtgaacaatgaaaaagc

SEQ ID NO: 52074 - DNA, 595 bp, Homo sapiens
tgagacggagtctcactctgttgccaggctggagtgtagtggcgcattctgctcactgcaacctccgcctcctgggttcaagcgattcttctgcctcagcttcccaagtagctgggattacaggcacacgccatcatgcccagctaaattttttgtattttgtttttagtagagatggggtttcacggtgttggtcaggctggtcttgaactcctgacctcatgatccgcccacctcggcctcccaaagtgctgggattacaggcgtgagccaccgcccccggcctgtgtctggtgtcattttaactgaagttcttgagggatagtttcaaagcctggttttcaaaacctgacaagtctgtgatttcccaatttccttatttgttgttgttgttgtttttcagacagggtcttaccctgtcatttaggctggagtgcagtagggcgatcgtagttttttactgcagcttcaaaatcctagacgcatgtgatcctagctactcaggaggctgaagcaggagcccatgagttcaaggttacagtgagctatgatcgtgccactacacttcagcttgggcaacagagataccttgtca

SEQ ID NO: 52075 - DNA, 735 bp, Homo sapiens
gaggtcttcacttcaacatacgagttgaccatggcatgctctgggctccagtcctctacaaagacgtagggcaggaactaccagttgtcagcacagcaccatcccacattgctcttctaatggagcctttcaccccagatgttctttctcgtctgatgggaaggatccaagtatgtaaagattatgttatagatcagctttggtctgtcctaaaagaaatttgccagtggattattccatatggataaaagtcagtttctctggtcttcctggaatgtgtctagaaaggcaaatagattatttacaagttcatagtaggatccaatgtattgggattaaaatatggacaaacataatttgggtccattgtgagcatgccagcttggtcaactattcaccacacatgatgccctaaatataactctaggttttcttatgcccaagagagggacatactcttgggtgtctggactagggaaacatgtatgaaaaaccatttggccactctacatcttgttattggagaattgaaaccatctatattcaaagatattattaaaaggcaagaagttaaaaaataaaaaaataaattgcatgtctgttgttatggaattttataactgtacataccttttatttaatccattcacaggtcatattataggatatctttcatttaataagtatactaaatccataccttatactgttgagttttgatagtaccagagggaa

SEQ ID NO: 52076 - DNA, 1666 bp, Homo sapiens
accgtgaccctgccgtgatgggcggggcggcaggggaggaaccagactgcgagcggagaagcggagtttgcagcctcggaattggctagagcgccagagccgagtcagccataaagctacgcgctaggctcttggccctgacgtgaggcgcgcagagatggcgtaacgggaatagttttcaacgtctatttcattccctgcttcagaggacctctttaatctttgattttggtccctgtttctaagaaaagcaactgaaaaggtcgtaataccgcccctgagaaaaaaggagcagcgctaaataatcgagaaaatgcctcctcttgaaacggatatagagatggaaacaagatataagaaggattgagaatcatataatacaggagcttaaacacctatgcgcgatgataaagagggtactattagagcgcttggaaaataccaggaagttgagagagttaacagaagggcgcacgctggattggccacaaaatcgaattactgaaggccactactgattaggacacttatggagaacgtgggtagcactgaagcagcattctagtttccagtgccgtcaacctcatacgtatctacctggtctctgatcgaagctaccgtaatgtgttcttgaggtcaacatgttttgtggaagtcactgtatttgcccctttatgtcaattacctattataaaccgagagaaatgggaaaattaaaaacctgttttgaattatttttaatgcagaactattttttcaagtgaaatcttatacagaagtctggtatatgaaacagataaaaatgaaccaatgagattgaagggaatgagtagcatgtaatcctgcccactcttcggagaatttgaggcaactttgtagagccttaggagttcagtttgtatgttactgggtaatttaaagcagaaattttaatctgactgcacttaagaatcatctgaagtgtttgtattggttagtcttatttttaatactgatgtcctggtctctctcccctcaaaaaaactctgctgctgggaccaagcacatagatgctttttaaaaagctcccgaaaatgactctaatatgcagccaggattgaaaataactaccctacacagcatttttcctgattctgagcactcagcttttcattgattttccctagggcaagtccttcatcttattctgggtccttgtgttttctttctgaacctacaatttctccataggtcccatggttttcaaaatttctcattttccattttctgtccttttatattacctacttgaaaaccacagtcatctttcaaaacaaaacactgcctgtttcttaggtctttattgtgggcttgttattcctcaatacaaatttacataaaataataacaattaagacatgggccttggtgtcagaattattttatatctttcttattaactctgcagcttaccagctctggataagttaaaggacagctatagtcttactacatagaatcattataaggaattggtggagtgatccttataaagtgtttgcatggtacctagcacagagaaagtgcttgaagttgttaactgttatggttacaaaatatgtaaataatttttattgtccaattttctctcttcatatacactaaattgttctaattcttgaaccac

SEQ ID NO: 52077 - DNA, 2186 bp, Homo sapiens
accgtgaccctgccgtgatgggcggggcggcaggggaggaaccagactgcgagcggagaagcggagtttgcagcctcggaattggctagagcgccagagccgagtcagccataaagctacgcgctaggctcttggccctgacgtgaggcgcgcagagatggcgtaacgggaatagttttcaacgtctatttcattccctgcttcagaggacctctttaatctttgattttggtccctgtttctaagaaaagcaactgaaaaggtcgtaataccgcccctgagaaaaaaggagcagcgctaaataatcgagaaaatgcctcctcttgaaacggatatagagatggaaacaagatataagaaggattgagaatcatataatacaggagcttaaacacctatgcgcgatgataaagagggtactattagagcgcttggaaaataccaggaagttgagagagttaacagaagggcgcacgctggattggccacaaaatcgaattactgaagtaagtgcaaaacgacaaattgtcacagaatacagagaaaaggggaaaagaaattaagaggagaaaaagagagatctagagggccggtccaggagatacaatctatgcataataggaatacctgaaactgaggacagagcaagtggagctgaaacaataaaggatctacttgaaaaaattttccagaattgaagaacgaactagatctacaaatggaaaaggctcataggatacctttaaagtttaatgaaaagaaagcagcatctagacatatccgggtgacgtttttgaatttcaaagacgaaacattttacaagcatccagtcagagaaagcaggttacttacaaaggggcaaaagtcaggctgacctcagatttttctcctgcaattctaaatgccagaagacagtggaacaatatctagagtgttaagggaaaataattttgagccaagaattatatactctgccaagttatcatttctttacaaaggaaactggaagacattcttagatatacaggggttaggaaagtatatcaaccaagaactttccctgaaaattttgctgaaggatttactgcagctaacagagaacctgaattaaaataagaatagggaggcaattgtatgaaagaactgatggtatgcattaaaactagttaaggagcattaagtttaaattgttatgtatagggcattaaaactaaatacaaaaatagaaacataagctgggtgtaaaatttcagtttacgtttaaactggaagggcataccacatgttcaatatattggacaaatactgttttatttttagcatgtagtattgtagatacaaatacgcatgttcttaagctaaacctaagtaaaagggctttgtcactgtagatttgacaaataacattctaaatgtcaaatctgacaattggaaaacagtacagttttatttcccttatttttaagtatagcaggaaaaaaataacaagtttgtccatgttactactgatactgtaaagaaacttccaaatcactggtttgggagggggtggatacatcctcattttctgtacatgatgcatggggaaaaacagtagttactgcatcatatagttccaagtaaatcatatagttccaagtaaatttgacatggaaataagtgttaactacaaaaatagaatatatacattccaatgtttggaaaagaagtggtaaaaagaaaaatagcaaaaagacattaaaattagcaaaaagtagattgacagtacagatgacctataaactggttaaatagccctattacaattgaaattgggtcaaaaatcaatctctaacctgagatacatttgtataaaacaaatgatcaaagagtttaaagataatggaaactataaatcatagaaatggcaacatttttcttaaaatctaaacataagacattttatgtaaaacatacaatataggatgtaacatttaacaaactatatggtaaataatatgacattaatatataaaatatatgttccagatcttgatgtgggtgatagttttacttatgtacatcgatatacatctatttaaaaacatgtacatttaaattgttgcattttatgtatttaaaatttattgagtaatccttctgtatgtattattaaagagaatatagcaaaaaaaaaatgttggact

SEQ ID NO: 52078 - DNA, 2160 bp, Homo sapiens
accgtgaccctgccgtgatgggcggggcggcaggggaggaaccagactgcgagcggagaagcggagtttgcagcctcggaattggctagagcgccagagccgagtcagccataaagctacgcgctaggctcttggccctgacgtgaggcgcgcagagatggcgtaacgggaatagttttcaacgtctatttcattccctgcttcagaggacctctttaatctttgattttggtccctgtttctaagaaaagcaactgaaaaggtcgtaataccgcccctgagaaaaaaggagcagcgctaaataatcgagaaaatgcctcctcttgaaacggatatagagatggaaacaagatataagaaggattgagaatcatataatacaggagcttaaacacctatgcgcgatgataaagagggtactattagagcgcttggaaaataccaggaagttgagagagttaacagaagggcgcacgctggattggccacaaaatcgaattactgaagtaagtgcaaaacgacaaattgtcacagaatacagagaaaaggggaaaagaaattaagaggagaaaaagagagatctagagggccggtccaggagatacaatctatgcataataggaatacctgaaactgaggacagagcaagtggagctgaaacaataaaggatctacttgaaaaaattttccagaattgaagaacgaactagatctacaaatggaaaaggctcataggatacctttaaagtttaatgaaaagaaagcagcatctagacatatccgggtgacgtttttgaatttcaaagacgaaacattttacaagcatccagtcagagaaagcaggttacttacaaaggggcaaaagtcaggctgacctcagatttttctcctgcaattctaaatgccagaagacagtggaacaatatctagagtgttaagggaaaataattttgagccaagaattatatactctgccaagttatcatttctttacaaaggaaactggaagacattcttagatatacaggggttaggaaagtatatcaaccaagaactttccctgaaaattttgctgaaggatttactgcagctaacagagaacctgaattaaaataagaatagggaggcaattgtatgaaagaactgatggtatgcattaaaactagttaaggagcattaagtttaaattgttatgtatagggcattaaaactaaatacaaaaatagaaacataagctgggtgtaaaatttcagtttacgtttaaactggaagggcataccacatgttcaatatattggacaaatactgttttatttttagcatgtagtattgtagatacaaatacgcatgttcttaagctaaacctaagtaaaagggctttgtcactgtagatttgacaaataacattctaaatgtcaaatctgacaattggaaaacagtacagttttatttcccttatttttaagtatagcaggaaaaaaataacaagtttgtccatgttactactgatactgtaaagaaacttccaaatcactggtttgggagggggtggatacatcctcattttctgtacatgatgcatggggaaaaacagtagttactgcatcatatagttccaagtaaatcatatagttccaagtaaatttgacatggaaataagtgttaactacaaaaatagaatatatacattccaatgtttggaaaagaagtggtaaaaagaaaaatagcaaaaagacattaaaattagcaaaaagtagattgacagtacagatgacctataaactggttaaatagccctattacaattgaaattgggtcaaaaatcaatctctaacctgagatacatttgtataaaacaaatgatcaaagagtttaaagataatggaaactataaatcatagaaatggcaacatttttcttaaaatctaaacataagacattttatgtaaaacatacaatataggatgtaacatttaacaaactatatggtaaataatatgacattaatatataaaatatatgttccagatcttgatgtgggtgatagttttacttatgtacatcgatatacatctatttaaaaacatgtacatttaaattgttgcattttatgtatttaaaatttattgagtaatcgtgagggggaatcctcgagagtcg

SEQ ID NO: 52079 - DNA, 1882 bp, Homo sapiens
gaaaaattataaccaagcataatatagcaaggactaacccctataccttctgcataatgaattaactagaaataactttgcaaggagagccaaagctaagacccccctcgtgccgaattcggcacgagagttttcaacgtctatttcattccctgcttcagaggacctctttaatctttgattttggtccctgtttctaagaaaagcaactgaaaaggtcgtaataccgcccctgagaaaaaaggagcagcgctaaataatcgagaaaaagagagatctagagggccggtccaggagatacaatctatgcataataggaatacctgaaactgaggacagagcaagtggagctgaaacaataaaggatctacttgaaaaaattttccagaattgaagaacgaactagatctacaaatggaaaaggctcataggatacctttaaagtttaatgaaaagaaagcagcatctagacatatccgggtgacgtttttgaatttcaaagacgaaacattttacaagcatccagtcagagaaagcaggttacttacaaaggggcaaaagtcaggctgacctcagatttttctcctgcaattctaaatgccagaagacagtggaacaatatctagagtgttaagggaaaataattttgagccaagaattatatactctgccaagttatcatttctttacaaaggaaactggaagacattcttagatatacaggggttaggaaagtatatcaaccaagaactttccctgaaaattttgctgaaggatttactgcagctaacagagaacctgaattaaaataagaatagggaggcaattgtatgaaagaactgatggtatgcattaaaactagttaaggagcattaagtttaaattgttatgtatagggcattaaaactaaatacaaaaatagaaacataagctgggtgtaaaatttcagtttacgtttaaactggaagggcataccacatgttcaatatattggacaaatactgttttatttttagcatgtagtattgtagatacaaatacgcatgttcttaagctaaacctaagtaaaagggctttgtcactgtagatttgacaaataacattctaaatgtcaaatctgacaattggaaaacagtacagttttatttcccttatttttaagtatagcaggaaaaaaataacaagtttgtccatgttactactgatactgtaaagaaacttccaaatcactggtttgggagggggtggatacatcctcattttctgtacatgatgcatggggaaaaacagtagttactgcatcatatagttccaagtaaatcatatagttccaagtaaatttgacatggaaataagtgttaactacaaaaatagaatatatacattccaatgtttggaaaagaagtggtaaaaagaaaaatagcaaaaagacattaaaattagcaaaaagtagattgacagtacagatgacctataaactggttaaatagccctattacaattgaaattgggtcaaaaatcaatctctaacctgagatacatttgtataaaacaaatgatcaaagagtttaaagataatggaaactataaatcatagaaatggcaacatttttcttaaaatctaaacataagacattttatgtaaaacatacaatataggatgtaacatttaacaaactatatggtaaataatatgacattaatatataaaatatatgttccagatcttgatgtgggtgatagttttacttatgtacatcgatatacatctatttaaaaacatgtacatttaaattgttgcattttatgtatttaaaatttattgagtaatccttctgtatgtattattaaagagaatatagcaaaaaaaaaatgttggact

SEQ ID NO: 52080 - DNA, 1621 bp, Homo sapiens
gaaaaattataaccaagcataatatagcaaggactaacccctataccttctgcataatgaattaactagaaataactttgcaaggagagccaaagctaagacccccctcgtgccgaattcggcacgagagttttcaacgtctatttcattccctgcttcagaggacctctttaatctttgattttggtccctgtttctaagaaaagcaactgaaaaggtcgtaataccgcccctgagaaaaaaggagcagcgctaaataatcgagaaaatgcctcctcttgaaacggatatagagatggaaacaagatataagaaggattgagaatcatataatacaggagcttaaacacctatgcgcgatgataaagagggtactattagagcgcttggaaaataccaggaagttgagagagttaacagaagggcgcacgctggattggccacaaaatcgaattactgaaggccactactgattaggacacttatggagaacgtgggtagcactgaagcagcattctagtttccagtgccgtcaacctcatacgtatctacctggtctctgatcgaagctaccgtaatgtgttcttgaggtcaacatgttttgtggaagtcactgtatttgcccctttatgtcaattacctattataaaccgagagaaatgggaaaattaaaaacctgttttgaattatttttaatgcagaactattttttcaagtgaaatcttatacagaagtctggtatatgaaacagataaaaatgaaccaatgagattgaagggaatgagtagcatgtaatcctgcccactcttcggagaatttgaggcaactttgtagagccttaggagttcagtttgtatgttactgggtaatttaaagcagaaattttaatctgactgcacttaagaatcatctgaagtgtttgtattggttagtcttatttttaatactgatgtcctggtctctctcccctcaaaaaaactctgctgctgggaccaagcacatagatgctttttaaaaagctcccgaaaatgactctaatatgcagccaggattgaaaataactaccctacacagcatttttcctgattctgagcactcagcttttcattgattttccctagggcaagtccttcatcttattctgggtccttgtgttttctttctgaacctacaatttctccataggtcccatggttttcaaaatttctcattttccattttctgtccttttatattacctacttgaaaaccacagtcatctttcaaaacaaaacactgcctgtttcttaggtctttattgtgggcttgttattcctcaatacaaatttacataaaataataacaattaagacatgggccttggtgtcagaattattttatatctttcttattaactctgcagcttaccagctctggataagttaaaggacagctatagtcttactacatagaatcattataaggaattggtggagtgatccttataaagtgtttgcatggtacctagcacagagaaagtgcttgaagttgttaactgttatggttacaaaatatgtaaataatttttattgtccaattttctctcttcatatacactaaattgttctaattcttgaaccac

SEQ ID NO: 52081 - DNA, 1347 bp, Homo sapiens
accgtgaccctgccgtgatgggcggggcggcaggggaggaaccagactgcgagcggagaagcggagtttgcagcctcggaattggctagagcgccagagccgagtcagccataaagctacgcgctaggctcttggccctgacgtgaggcgcgcagagatggcgtaacgggaatagttttcaacgtctatttcattccctgcttcagaggacctctttaatctttgattttggtccctgtttctaagaaaagcaactgaaaaggtcgtaataccgcccctgagaaaaaaggagcagcgctaaataatcgagaaaatgcctcctcttgaaacggatatagagatggaaacaagatataagaaggattgagaatcatataatacaggagcttaaacacctatgcgcgatgataaagagggtactattagagcgcttggaaaataccaggaagttgagagagttaacagaagggcgcacgctggattggccacaaaatcgaattactgaaggccactactgattaggacacttatggagaacgtgggtagcactgaagcagcattctagtttccagtgccgtcaacctcatacgtatctacctggtctctgatcgaagctaccgtaatgtgttcttgaggtcaacatgttttgtggaagtcactgtatttgcccctttatgtcaattacctattataaaccgagagaaatgggaaaattaaaaacctgttttgaattaaaacaaaacaaaaaaaaacaaaaaaacaagaaaaaaaaaaaaaaaaaaagaagaaacaaagaaaaaaaaaaaacaaaaaaaagaacacacacaagaaaacaaacaaaaaaacaaaagaacaaaaaaacaaagagagaagaagaggggagggagcgacatgcgagaaaacacttaccgagagcctgacacagcgcgaaatgaaagaccggcagaccacaccgaaacaacagaagacgagcgacaaccccaagacacaactcagagagccaccgaagatataactaataggaacaaccagaggagaatgcgccaatagacataataaaatacaacaagagacacaagtgagaaggggaagcgacgagaagagacaagacggcgagcggcggagggactggaggtgggatgaagggaggaagacaaagaacaagtggagtaggggcgtggtgggagtagatacatacaggcaccagagagcggagacaaaacaacaatacacacgagacgagcgagaaaatgaaagagtggaagtgggagaggaagagaaaggaaagaaatcacgggagcgaagagagcaggggaagagggcgataggagatagactgaacgaggt

SEQ ID NO: 52082 - DNA, 918 bp, Homo sapiens
aaattttaaaaataagaacaaatggtgactggagggaaaaacaagaggaaagaaaacgagcagtaatcaaaatcttgggagaattattttcagtttgattttgtgaattttatttatacaataaataataatgctaactgagggtcaaattaatctatgagaatgttataaatgaccttaaatcagcacatttggagaagtaaaaaactgaatctgtgactgaactctgtcttcatttatcataaaaaccgtacacaatttttaatcttccaatgtctcagtgacacctatttccagattagtggtcctcgaactttagtacatgtcagaatgtcccagaatgcttgtgaaaaatacggatttctgggttccatcctcaaatactcaagttcagtagatgttggttgggacccagaaagatgcaaggacttcaggacatcttttaaaaacattaatatggagaataatgagccaggagggaaataactctttgagtcagagaatgccactgattttaggaattctgaccgtatcaaatacaaattttagaatttaaatatttgttcatggtgatatattagaaatctaacataacacatattggtgaaaaaataattataaaattgtctgcagttaggtaacttggttgtttataatcaaactgtttagacaataacattgaaatagttactgaattgaacacttccttattttatagacgaataatatggagctcaggtagtcaaagtaatttgcacaatatcatgtcactagctagggaccaggcaagatatttgctctttccattcattatgttgtgttcctttcaaaagtctctataagtctccaatattatcagaaggacttggggtaagccaagaaccccattagacgataccttcggctcatgtaggaaaa

SEQ ID NO: 52083 - DNA, 907 bp, Homo sapiens
agagtaaactgaacgatctactcatagcagaattcctggtataattgagtccatcctcctttattcttctgcaggtgtcttggctactccttttctctccaggctgtgggcaaactctctgctcctgagttggtctagaatcttgttcctggggccactgcttgccagggcgttacaccaaattaaattattggaaacatacatgtgctgagactcttccacatccaaggtgctgtctaggggctgctcagggtgcacagataagtaggtgccaatatcctgcctctggcggctccagtaggagaacaaagcaagtgtggggaaggtgtggggttggaagagttacagagggccttgattttcaaagggagaaattatacttggctgagtagttgccagtgtggagcaaatgggggtttcagatgggagagtgaatgtacattcagaattctgctttaggtagagcagcaggtgagcagggcatgaggtttagcaggatgcaggataacccatcaaaagcattgaagtgagaagctgaccaccagcaaagcagtgggtttgaacggtaaagacagatgggagccacataagagacagcatctattgagacccccccaacccaaccgacctaagtgaaagcaaaagagaagcaatgaaagctcaagatgaggctgaggtttggagcccctgggactgaggctatggagaagcctttaatagaataagaaacaatagatcaagtgtctcagggtgtcattagggatgagcttagcttccacaataccactacaaactccccacatacactgaccctgcctcttaattttccagcctgcccgcctagccaaaagcatagggaaggccctcggggtgcatttctgtaggcaggggtcattcctgagcagat

SEQ ID NO: 52084 - DNA, 590 bp, Homo sapiens
agtacaagcaacagcacatttccttcccccttctccttactgcctcccataaatatgcacacccttggccagggcctgtgcagacacaagggtcagggtacttagtgatcatccagacagaatttcagaccttctgttggaggcatttaggcaattctggaagcctttctggcagaagtgtatgtagagcaagattgggaggtaaggagggataggactggatgtgaaggctcttgaggcatggggaggaacctcagagccagggaggatgagatgggacaaaaggatatgcttatctgaaggagtacaaggtgagatggtaaattctagattatggaagggataataggacacgtacagtgcctcacgcctgtaatcccagcactttgggaggccgaggcgggcggattgagcccaggagttcaagacccagcctgggcaacatagtgagactcttgtctctaaaaagttaaaaaaaaaaaaaaaagaatctttgataagtagttggatccttggaagagttgagaacagatgagatgtggttggaattgatggtgcctactcctcatcagggccctaggcccctaatg

SEQ ID NO: 52085 - DNA, 922 bp, Homo sapiens
agcctctctgggaagatgctgcttcttcctctccccctgctgctctttctcttgtgctccagagctgaagctggggagatcatcgggggcacagaatgcaagccacattcccgcccctacatggcctacctggaaattgtaacttccaacggtccctcaaaattttgtggtggtttccttataagacggaactttgtgctgacggctgctcattgtgcaggaaggtctataacagtcacccttggagcccataacataacagaggaagaagacacatggcagaagcttgaggttataaagcaattccgtcatccaaaatataacacttctactcttcaccacgatatcatgttactaaagttgaaggagaaagccagcctgaccctggctgtggggacactccccttcccatcacaattcaactttgtcccacctgggagaatgtgccgggtggctggctggggaagaacaggtgtgttgaagccgggctcagacactctgcaagaggtgaagctgagactcatggatccccaggcctgcagccacttcagagactttgaccacaatcttcagctgtgtgtgggcaatcccaggaagacaaaatctgcatttaagggagactctgggggccctcttctgtgtgctggggtggcccagggcatcgtatcctatggacggtcggatgcaaagccccctgctgtcttcacccgaatctcccattaccggccctggatcaaccagatcctgcaggcaaattaatcctggatcctgagccagcctgaaagggaagctggaactggacctgagcagcaaagtgtgtgccactcattctggtctacccttggtccctcagccacaaccctaagcctccagaagtatcctacaggtcacagaactctcaataaacctcagtgaagacaca

SEQ ID NO: 52086 - DNA, 384 bp, Homo sapiens
tggctaatttttgtatttatgtagagatgggattttgtcatgttgcccaggctggacttgaactactgggctcaagcaatcctcctgctttgccctcccaaagtgctgggattacaggcgtgagccaccgcgcccggcccccccaattactcttaaaggtaacatcactattgtgaacctaagatcagctttttgagatgccttttcaggtgtaatggttaatactgagtgtcagcttgattggattgaaggctacaaagtattgatcctgggtgtgtctgtgagggtgttgcaaaagagattacctggggaaggcagatgcacagttaatctggtgggcacaatctaatcagataccagcgaatataaagcaggcagaaaaac

SEQ ID NO: 52087 - DNA, 353 bp, Homo sapiens
aggggtaatgggggcattggtgagctgcccagcatgcaccaggctccactcccgctgcccggccagatcaaggagtccacggagggaggccagcgagtccagcagcaggaaaacccctgacctcagccatgagggatttatctttggggttaataagaaggtaatttagaaagtggattttgcaggaactggaagctgaggattatgatttcagattgcagcactgacggtcctatcctgttgcctcttaacctgcccacactcaagcccaggttatggggagacagcctgacttagctcagaaggccgctgggaggggaggctggaggctcccagggctatcagacatcggg

SEQ ID NO: 52088 - DNA, 303 bp, Homo sapiens
atgtatacatgtgccatgttggtgtgctgcacccattaactcatcatttaacattaggtatatctcctaatgctatccctcccccctccccccaccccacaacaggccaatttctaatattccataatctctctctgtctctctctttggtcttcgtatgctacttcttcttcctctgaattttgttgagctaaatgtagtgatgcatgtatttctgccatggcgagtattgatttgcgcagccagagccttccttttgcatgatcagcaaaatatgccagccctaggtgtgaataacccggc

SEQ ID NO: 52089 - DNA, 517 bp, Homo sapiens
ccaaataaaataaaaccagaaaagagcagtgccggcctgtgtcccctgaattcctacaattgtcagattgacatggatgttccactgggggccgtgagctggaatcccgggggcaaaaagcctcactcttttagttttctgttctattccgatgatgctgacacttgctggttcatttggccttcctgatagcaaagaaagggcttgagactccaggagataattttccatgaaaaggagaagccttgtcatccacaactcagcgtaaggcagagttcaaagtgaagacttcccagagcagcccaggcactgttggtcctctttgcctgtctcatttttctccatagtgcttgttactgcgtgccttcatatgcatgtatgtgtctgcttatttttgtcttcactaaattgtaggcaccttaaggggagagggctttgctttcctgattgctctgtgtcaggatcctgcttaacctatagcacgtgctcataaacccagttgacagactgtgtggaa

SEQ ID NO: 52090 - DNA, 360 bp, Homo sapiens
tcctcccttcatttattcattcattcctttggtaaatacttgtgtcgttatgtgccaggcactgttctgattgctggagcttacgttctattaataaagacacactagtaaaatctgtagtgtattagaagcgattaagagaaaaatcatgcagggatgaagggaaggaagcatctctcagttctttggggaagtctccaaacgatgtcccccctctgttcttggtcatgaccttctcctaccctaacccggcagtggtggtttctgaggccagccatgaggtttcagggaaaccaggcccatgtccagctagaacccagccattccttcctgcccatgttgctgctgcagttgtgccga

SEQ ID NO: 52091 - DNA, 831 bp, Homo sapiens
cgagattctgactcaaaaaaaaaaaaaaaatgctaatttaaattaatcttggcttcatcctggaccattccctgaggggcagcacagggcagctaagcttaaggtatttctcctatataggttttttgttttgttttgtttttgatacaagatctggctctatcgcccaggttggagtgcagtggcatgatctcagctcactgtaacctgtgcctcccgggctcaacggattctcccacctcagcctcccaagtagctgggactacaggtgcacaccaccatacctggggtagttttttgcatttttagtagaaatggtgttgtgccatgttgcccaggctggtcttgaacccctgggcctcaagcgatttcgcccgcctggggcttcccaaagtagttgggattacaggtgtctgagccactgtaatccaaaaactgcacctggcaggttttgtttttgatgtttaaaaatctaataagtaccttttcttttaataggtgagtgtctcatttacattctaatagatatgtttaaccctagtcctttcttttttctgctttacatgcttcttaattttcttacaattgctatgtgagaggtgttctttttgttttcttctttatggtattttggaaactatgtagtttatttagagttattccagtgattacttgtataactttaaataataggctgaaaattattggctttgaaaactaaaagtttgtataacttccataggaaaggtgaggagaccaggatacctcttattcccatgtgtctgagtctttcctttcctaggttccttaagtgttgtatctgaaaaaaaa

SEQ ID NO: 52092 - DNA, 581 bp, Homo sapiens
ttgttttaaattaatgattctcagtcttgactgtacattgcaatctcttcaagagttaaaaaaaatatatcgactcctggatctcacccttaaaaatgctgatttaggccgggtgcagtggctcacgcctggggcttcccaaagtagttgggattacaggtgtctgagccactgtaatccaaaaactgcacctggcaggttttgtttttgatgtttaaaaatctaataagtaccttttcttttaataggtgagtgtctcatttacattctaatagatatgtttaaccctagtcctttcttttttctgctttacatgcttcttaattttcttacaattgctatgtgagaggtgttctttttgttttcttctttatggtattttggaaactatgtagtttatttagagttattccagtgattacttgtataactttaaataataggctgaaaattattggctttgaaaactaaaagtttgtataacttccataggaaaggtgaggagaccaggatacctcttattcccatgtgtctgagtctttcctttcctaggttccttaagtgttgtatctgaaaaaaaa

SEQ ID NO: 52093 - DNA, 242 bp, Homo sapiens
ttataaggaagaaagggagaatggatattaagggatatttaacaatctcaaagacttatcgtgtcaaggtttggtatacatggtaggtagacaatcaccagaatgttagtttttcttctcctcgcccttttatgagtttggaaaaatggacatttcattcagactgcatcatttagaaatacctatgacaaaacacaacgacatgttggcacaggcgtaattgccatgaactgcatttttgg

SEQ ID NO: 52094 - DNA, 449 bp, Homo sapiens
cttttagtaactggtccttgtctgcacttgttactctgagctgcccgctgccagcctacatcagtcgcatgcactgggagtcttggtgaggcagcatgttcctgagctcaagttgcaggcactgccatccccactgcatggggccctgtctcagagagaaaagaatgtgaagccccacttcctgtggaatctttgagccccctgctaacttcttgccatcacagtaacctcagctacttatgcttcttgtctctccttgctccacaggcctccctctgccttcacaggggcattttcacctcgcattagtcattgcgggaagacaggaagcaccatacctatcaagcagctcctgctttctggcctggaagaaactattaagaatcaggccatgttcttgaaatggagaaaagcatttcagggagaacaaatgtaaattaatatttaat

SEQ ID NO: 52095 - DNA, 842 bp, Homo sapiens
agcccaaagtgaaaacacagtggaggttgggcacggtggctcaagcctgcaatcccagcactttggaagctaccatacccagccccaaactctaactttatagtacagtggggaaaagtctgcttatcttaattatggataaatgggcacttagtctctacaatgttggcatacatgctctccctcaaactgatggcataatgattttatatatatgtgtgtgtgtgtgtgtgtgtgtatatatataccattaaaaggtgggctaatgtggctttccactacagctcttaccagatttttttattttcagtgtgatttggctggaatattaataacagttggttgacatgtattcacaattgcatgacttctctttggaggctggtaggttgagtattgttctttttatccatcctttcccctcccctaaatgtcagtctttctgcttttaggattatatttgaattttcaggggtttatacaccaccactggagagtagaaggccactaacttgcaggcagttaacttatatctttacaagctacattctattttaagagcctatttagggtaacatttaaagatttgcttatcactgtattctcatccactgaaatcagtccagctttaccttggagaaaaagcagatgggaaacaggcaaggggaaaagcaaaaaagaggaaaaaaaagactggggtcacagtttcgatgaatgttattccctgtatttggtgagtggtgggcactagcagctcaatttcactgctagctaatagtggcaaattaagattaaactataaactatttgacattactccattatgtattttgagtctcatg

SEQ ID NO: 52096 - DNA, 830 bp, Homo sapiens
gaaaaatatttttgttggaatttaagtttaatggctaaatatgaagactccttgatataaaatattgtgtttaaaatgtcatgcatgttatactgaaatattctggagatgtctgaagcagttctttaagcagcactgtgtattatggaaaaatgtttgtcttttacctagcatatttgtaaatagacctttaataagaagtgtgtgtgtgtgtgtgtgtgtgtgtatatatataccattaaaaggtgggctaatgtggctttccactacagctcttaccagatttttttattttcagtgtgatttggctggaatattaataacagttggttgacatgtattcacaattgcatgacttctctttggaggctggtaggttgagtattgttctttttatccatcctttcccctcccctaaatgtcagtctttctgcttttaggattatatttgaattttcaggggtttatacaccaccactggagagtagaaggccactaacttgcaggcagttaacttatatctttacaagctacattctattttaagagcctatttagggtaacatttaaagatttgcttatcactgtattctcatccactgaaatcagtccagctttaccttggagaaaaagcagatgggaaacaggcaaggggaaaagcaaaaaagaggaaaaaaaagactggggtcacagtttcgatgaatgttattccctgtatttggtgagtggtgggcactagcagctcaatttcactgctagctaatagtggcaaattaagattaaactataaactatttgacattactccattatgtattttgagtctcatg

SEQ ID NO: 52097 - DNA, 304 bp, Homo sapiens
aagaatatcagactcaaaggtcaagtgtttaagattagggagaaagcagccttaaaagtacattttaaagagcctcacaggtcaacaagtcagccttagagcctgccatgcaaccaccacttccaggctgctaggggaatcagaaatgtcactatctttcaaacttagaatattgattatatccactctactcataggggctttattccatgacatctcttagttagcaatttaagaaaatgatttcatcctatataatgccagattagctcaatgacaaaaaatgttacactaggagctcttc

SEQ ID NO: 52098 - DNA, 732 bp, Homo sapiens
tagccggctccattgggtggacgaccgatttgcacgtcaggaccctattttgcttcttctccaaaacactgtctatatcttgttaatgcttgttttgaattatctccatattgttggaggcaattcacagagaacacagttaagatggcagtcagatacataaatgaaatgccaccctttccttctgctttggactgccctgagaattcttgaacttcctcctgtcctaccttcccttatcaacaatcatgtggtcccatgatcagtggcatgaacattttaaagtttttcaaaatttactattttcctacgagacactgaactccctgaaaataggaagtctcaattaaaaaatcaatttgtcatggtccacataaagataatcaatacattttgctctcagtccttgggatggtttttgtaaataatattagcttgacaaaaacaaacaggaagatcccacccccaacacataccacattccaatgttacctggaattaaaatatataccaacatgcatctttaggttactctggtccatggtttcctccagtggcaatggaatttacaaaaatgtaagacgtaatagatatataattatcttttttcctaaatgaaactagccttaaaaactggtacataatgttcctggttcaatgatcaaaattatgaagtacacttaacctatcttccattgagtggctttaaatggaaccttaaactgtgactca

SEQ ID NO: 52099 - DNA, 331 bp, Homo sapiens
cccccagaaccctgtctgcttcatggtccctttcacaacttcaaagcctctttcctccctgtctccccaagaaagggccaatctgaactaattaggtaatcagactcagctgaaaatttaaaagcaaaaatgcctatctgggcacacacaaaaaaatctgatacatgtatgtgctgcaaatgcagactcatcaagtttcagcaagaaactttccgtgttttttttatcccacaaaagccttctttgtctgctattttcttaaaagtcacaaagagagccttagagatctgcagcttaccctttaaatggaatgggaaagtatttccagaca

SEQ ID NO: 52100 - DNA, 142 bp, Homo sapiens
gtatatgcaggaattagaatgagactatcaggaaaatctatcacataaagagagcagattttagataaattataaactcattgttgaaaattatgagttatccatgaaaagcttttacaattttttagatagatctgctaaa

SEQ ID NO: 52101 - DNA, 308 bp, Homo sapiens
aagtaaattgagtagcaacataaatagggggctccattagtgataacaggtgaaaatagatgggttcagattctgggactgaaaccccagaaacaaagatggtaaagaacatacaggttagattcagtaacctcagttgtaacagataaaccctgaagactctataacttaagacaagactattttaattattgctcatatcccaatttaacaagggttggtgaggaagaggctctgcttcataaactccttcaggaactcagtccttccaaatagtggaaatcctgtcctcctctgggccctggagt

SEQ ID NO: 52102 - DNA, 288 bp, Homo sapiens
  misc_feature (163)..(163): n is a, c, g, or t
  misc_feature (186)..(186): n is a, c, g, or t
  misc_feature (247)..(247): n is a, c, g, or t
  misc_feature (275)..(275): n is a, c, g, or t
gatgatttagtttccaggctagcctacagaagcttatttaacttattatgtctctgagatatactaaggggtagaaaggaagtatagctagctttcccctctctttccaagttacatggttagtcccaagcataattttgagagcacgggagagccggctctngaaccccagggctgtagtctctntggccctgccgtgcgctgacaccaaggcccaaggttcggcccggtagagattcaacacggnttttcttgccccgcgatgaatgtttttngcagaaagagctt

SEQ ID NO: 52103 - DNA, 908 bp, Homo sapiens
ctccagcatccaaggagagtgtgggcagctggagccaggtcctcctcctcctccttctcctcttcttcctccttcgtttcttcctttcctcctccacctgcctattgcagagcagcagaaagcaaaggagctagaaaagggtgaaatcaattctttttctgtaacctttttgctttgcttttattaagttcttaaggcttttggtcttgagtcctagataagatgcaaataattctgaagggatcataacttttaatattatcagtggatatttaagaaaaaaataaaaccataagatagactgatagatagtagagaataaaaagaagattcaggagaggccatggggaggcaaaggaagagaaaggagtggagagtgtgcatgagtgtgtgtgagtgtgtgtgtgtatgagtgcatgtgagagagagagggtgggggagggagggagagagagagtgagagagggagaaagagtggaaattctagaaagaaattgcctcttcttctgttcaactacttcactgttttgtcaaaagttagcactgcctctaaggtctcctgcaactcacccacccacccctcttactccatggtattcaacttctaaactaagaggaaagcccgagctagaggtcctatgcatcaatcagggaagagatattgagaagaataaacagagaaactgtattttttctctcaactaaaacatccattttaatcaatatttggcaagaaaatatatacctgtttcatcttcactggttatttccataaactggaaagaaggactgtctaaatggtagttatgtcccatgagatgtttaagcaaaagggaaaattatacaaaaaagaatgccatattttgtctgcgccaccagaatgacaataaaaatttatcatgctagaa

SEQ ID NO: 52104 - DNA, 822 bp, Homo sapiens
ctccagcatccaaggagagtgtgggcagctggagccaggtcctcctcctcctccttctcctcttcttcctccttcgtttcttcctttcctcctccacctgcctattgcagagcagcagaaagcaaaggagctagaaaagggtgaaatcaattctttttctgtaacctttttgctttgcttttattaagttcttaaggcttttggtcttgagtcctagataagatgcaaataattctgaagggatcataacttttaatattatcagtggatatttaagaaaaaaataaaaccataagatagactgatagatagtagagaataaaaagaagattcaggagaggccatggggaggcaaaggaagagaaaggagtggagagtgtgcatgagtgtgtgtgagtgtgtgtgtgtatgagtgcatgtgagagagagagggtgggggagggagggagagagagagtgagagagggagaaagagtggaaattctagaaagaaattgcctcttcttctgttcaactacttcactgttttgtcaaaagttagcactgcctctaaggtctcctgcaactcacccacccacccctcttactccatggtattcaacttctaaactaagaggaaagcccgagctagaggtcctatgcatcaatcagggaagagatattgagaagaataaacagagaaactcggtgctatctgaaagtggacaacttcagcattacagcccctttctgggacatccctgaaagacggtggagaagaaaaatgccccccacccctgtgggcagaacttctggcagtgcatctggttgtgtacttcgctt

SEQ ID NO: 52105 - DNA, 649 bp, Homo sapiens
  misc_feature (9)..(9): n is a, c, g, or t
  misc_feature (129)..(129): n is a, c, g, or t
  misc_feature (172)..(172): n is a, c, g, or t
  misc_feature (336)..(336): n is a, c, g, or t
  misc_feature (400)..(400): n is a, c, g, or t
  misc_feature (423)..(423): n is a, c, g, or t
  misc_feature (449)..(449): n is a, c, g, or t
ccctcaatntctaaccaaacagtattatcacatttgtagtttacaaaaagtaatttttgtgcatttcatttttaaaagtctgagatggtgtaatctcactaagaaaagagatactattctttctaaganaattgttggacagcataaagtattcctttgcaagcctaggaanaaaagtatagggaagttataactctgagaaagctgcaataaatcaatggacaaaaggaggaatgatatgtagagatttagtgatgtgccacatttcctactaaacacaacattaaatccagctattcacgctacactcattaactttatatccagagtctcatntcacataaagttaaactggcatcatgatgttaaaacaaaaacacttagggaacggcactgatgngagactattgaaaagatcatggnagagaactattttgaaattaaaatgnttcccttattttccagatctgcacagttttttgatacaaaatatttatcttcctttgtcacattttctccaggaaacagaaatgcctcacttatcctataactcatcttgcaactgctgcaaaagaaaaattcacgtttgaatgttctccttaaaaagcaaataaaatttaatacatttttcttaagagtagtccaaaaa

SEQ ID NO: 52106 - DNA, 542 bp, Homo sapiens
taagtttatggagtaaatagtagatctcaaataactaataagagatagtgaaggcttatgtttctatgttgtttagatttaaaggccatgaggttgtctctgggcctcagcctgggattcctgatgacacgacactgaggaagacatttaaatattaattcttaccaaagctgtcttgtttcagccctattttttgaacttccatttgtttatgctgatggatgacatgcaatagtaatagatgttttgagaaatacaggctgcagtgtgctcttgtttgggaaaaatctgttaactcagccaaatgcttaaactagcactgtttaccttcttggttttataatacaaaaaattatctagaaagcatcctgatttgccttttagttaatttgaataattaagaatgaactagcggccgggcgcggtggctcacgcctgtaatcccagcactctgggaggccgaagcgggcggatcacgaggttgggagatcaagatcatcctggctaacatggtgaaaccccgtctctaccaaaaattacca

SEQ ID NO: 52107 - DNA, 376 bp, Homo sapiens
tttatgaaaaaccccctgtatgaaaaacactgggggaatctctcagacacacggaaggaaaagcaaacgattccatttccatccgagtttccgtagtggaagacagcctttcccacagtgctcgcctgccaagcatcttcctgtaggaacttgtcagtgccgccattagttgtttgcaaagggattacgctttggcagccatgctaatcgctccaaggtgaccctttatttggagaaacaaatccttttcagttgttgttacggtacactaatccaaccatgcaagtagctgtttgggaaaaaaattatcaaagtgcattttctgcccactacttctttctctccagatcgctcctaactaaaagtgctgtttctt

SEQ ID NO: 52108 - DNA, 390 bp, Homo sapiens
agtacatgctgggccccaatctagatctcaagggaacggccttcagatccatttttgacaagttccttttgtgagtcctatgatcatgcaagtttgagaactgagaagggaggggaagacctacctccttgttactcagaccaccagcaacagcagcatcacctgggaacctgttacacatgcagaatctcaagccccaccccagacattgaatgagaatctgcattttaacaagttctccatgagatttgtgtaaacttaaagtgagagaagctcacatggactatgtctttttcctttacgtgaatatcgagtacaaagaattgagccagtcagtcctcttggttaatggcacattatgattaatgcatgcatgaactctgattcgaa

SEQ ID NO: 52109 - DNA, 321 bp, Homo sapiens
gggaccacaggcatgcaacaccatgctcagctaatttttgtatttttttgtagagacgaggtttcaccatgttgcccaggctggtctcaaacacctaggctcaagctatctgccagcctcagcctcccaaaatcctgggattacaggtgtgagccactgcccctggccaatatttatgtgtttgtcatttatttaaattagtaatattgatgttattgattttgtaatctgggtattattataaaaatatattctcttacaattgatattttgtttccctcagaaaagtcctaataaactgtttgaagacatcaaaataga

SEQ ID NO: 52110 - DNA, 490 bp, Homo sapiens
  misc_feature (441)..(441): n is a, c, g, or t
  misc_feature (477)..(477): n is a, c, g, or t
acttatctgcagacttgtaggcagcaactcaccctcactcagaggtcttctggttctggaaacaactctagctcagccttctccaccatgagcctcagacttgataccaccccttcctgtaacagtgcgagaccacttcatgccttgcaggtgctgctgcttctgtcattgctgctgactgctctggcttcctccaccaaaggacaaactaagagaaacttggcgaaaggcaaagaggaaagtctagacagtgacttgtatgctgaactccgctgcatgtgtataaagacaacctctgggaattcatcccaaaaacatccaaagtttgggaagtgatcggaaaggaacccattgcaaccaagtcgaagtgatagcacactgaaggatggaggaaatctgctggaccagtgtccaaatcagaaattgacagaaaatggcagngtgaatcgcgataattgtcggttcgcaacttcttantccagaaggagat

SEQ ID NO: 52111 - DNA, 401 bp, Homo sapiens
gcacgagcacaaatagcagttgtgttctttacaaaaattgtatctcagagatacaatttttgtaaagaacacaaatagcagttgtgaatattaaggtgtgattatctttccctgtccatgtgcttattgaaagaagatagtgaacaaatgattatattgaggatttttttaatttataagatctaatgtgaaatccacacttggaactttttagatctgtctgttgcttgtttaatatatttcttttatgacattacttaaagtttaaaagggttttctatccactgtcaatttcaattggataacattttgtcaagttttttttttcctgattatttgatgctagctggaattcaagaaatggcattgaccttattcaaataaagaaatattttagtaaa

SEQ ID NO: 52112 - DNA, 4828 bp, Homo sapiens
ctcctccgcgttccagaatccaagatggcgggatccaggcaaaggggtctccgggccagagttcggccgctgttctgcgccttgctgctgtcactcggtcgcttcgtccggggcgacggcgtgggaggagaccccgcggtcgcgttgccacatcgccgtttcgagtacaaatacagcttcaaggggccgcacctggtgcagagcgacgggaccgtgcccttctgggcccacgcggggaatgctattccaagttcagatcaaattcgagtagcaccatctttaaaaagccaaagaggctcagtgtggacaaagacaaaagcggcctttgagaactgggaagttgaggtgacatttcgagtgactggaagaggtcggattggagctgatggcctagcaatttggtatgcagaaaatcaaggcttggagggccctgtgtttggatcagctgatctgtggaatggtgttggaatattttttgattcttttgacaatgatggaaagaaaaataatcctgctatagtaattataggcaacaatggacaaatccattatgaccatcaaaatgacggggctagtcaagctttggcaagttgccagagggacttccgcaacaaaccctatcctgtccgagcaaagattacctattaccagaacacactgacagtaatgatcaataatggctttacaccagataaaaatgattatgaattttgtgccaaagtgggaaaatatgattatccctgcacaagggcattttggaatatctgctgcaactggaggtcttgcagatgaccatgatgtcctttcttttctgactttccagttgactgaacctggaaaagagccgcccacaccagataaagaaatttcggaaaaggaaaaagaaaagtatcaggaggaatttgagcactttcaacaagaattggataaaaaaaaagaggaattccagaagggccaccccgacctccaagggcagcctgcggaggaaatatttgagagtgtaggagatcgagagctaagacaagtctttgaaggacagaatcgtattcatcttgaaatcaagcagctgaaccggcagttagatatgattcttgatgaacagagaagatatgtctcttccttaacagaggaaatctctaaaagaggagcaggaatgcctgggcagcatgggcagattactcaacaagaactggatactgttgtgaaaactcagcatgagattctgagacaagtaaatgaaatgaaaaattccatgagtgaaaccgtcagactggtcagtggaatgcagcaccctggctctgctggaggcgtctatgagacaacacagcacttcattgacatcaaagagcacctgcacatagtaaagagggacatagataacttagtgcagcgaaatatgccatcaaatgaaaagccgaaatgcccagaactaccaccatttccatcatgtttgtctacggtccacttcattatatttgttgtggtgcaaactgtattattcattggttatatcatgtataggtctcagcaagaagcagctgccaaaaaattcttttgactaccattttcctgtgtacttcatctatttgtgtacaaaatgatgtcgttttgagggaatttaagtatttaaattgcttcatagtctaaattattaattttcttaataaaataactgtttaaacattgatttgcagttaagaataaaccttaaagcaaagacaaccacattttaatttgttcacagtatgtaaatctgtctaaatttcagtgaatttctggtcagtatgatgcagcctctgagcagaatattgaccagtaagagggtaaataaagtgggggcaacccctggatatgaatgttaccccctaagtctccaatattgcaggtttccctgtataacgtaaacacacttgccctcatgcctcccagaatatgaggtctaattaagaagtcccatcaggtttattttgtaaccaaagtcttttttagaggtcagacttcctaatcaaaggcctgggcctgcagtcctttcatcttaatgcaacttcctttgaaatcaaagaatattttgtctgagagctttaaggatctggtaatagacttcaaaatgttaagtgaaatttttttttcctctatttatcaatgatatatttcacttttaaaggaaattttagaggaaaattaatagctgctttttgcctaaaaaaccttgtgggtggaaacattcctctgagaatggcttttataggtattttgcctggtaatgtattcattcatgattgcccatattcttgaatgtcttcattccaatggggtcaggtcaatattatgaaaataatttttatatttatatttgtaacttaaggaatttatttctccctttactacagcatgtaaattcagctcaaattgcatgatctgaggatttaaattcacaaaacctgccactacattctggtttacattagttacttcatgctggctggggttagtgaccatttgcatactcttttaaatcaaggaggctgtagtagaagcagttttaagattcttgaaggcaaaatttgaaaaacagtgaatacttctaattgtttccttttagtgccagaactaaggacattgtgaagcacttgttagtaaacttaaccttgaaatgtcagactggaaggagtttttatagtctttgtgcatacttctaggtattacagaaacagtctgtaaatgacattttaagatgcaaatttaattctgttcacagctgatttatactgatttttgctgccttcaaaatactcttttacttcttttagctaaaatggttgtctttcatttgccatagaattccaaacaatactatcttataaaatagtactgttgaattattccaagcctccctaggtttgctctcaaatgtcatttacagattgggctaacgacctaaaatctatatataaagactttctgaagaactctgtattatagcaataccaaacgagtgctgtgtgtgcaaacagtctggcgttgctttttatgttgatatttatcctagaacactgaaagagaatatgccagtgataactcactttacttcagtcatttcaacacagaaaatgcttctctagcatttttcttttgtagtgttaacattttgaaattcatgtttcagaggcttcatcatcacagaatttactcttgctccatgaaaaaaaattaaataccttcagaggaatatttaagttgtaaactatgaaacttgagaaatcctcttgagataaaaggctgccaaatccagtattataaagtccatggtcatatgtgcctgtgcattaaaggaataccagatctatgcagtatacatttttcaggctgaaattcaaggggaatcattctgattattcttactacaaatggagatggctattatgaaacagcatgagcatgagccttttatcttttatacttagtgatatactttgcttgaaaatcactcagcaaagtagttcacatgatgtgtatcatatttgaagtgtggtttttctcaaaatcattgactttaaggagctcatttctgaacaaaaaggtttgctctgtggaaaaatcaatcactgccaggattctttcatttctgtactattttgtataattgaatttgttcacttctctcacaccagcaagtgttttacaggtgccttggattaaaacaaaattgattttaaaatttttatgtaagtcattgtgtctatgatgccacttttaaaaggaaaatgcaattgcgtaatggcttatatccttatttaatgtacctatttgtgttctaataattgtttgaatgttttattcagcttaaaactttaccatgaagtcataaacagtaaacaatgttttgttatgtattaaggggatatcagtgtttctcaaagtatgatccatggaccatctgggtcatggcgcctggtttcagacaacctgaatcaaatcttaggggtggggctttgggatgtcattgttcaataggcacctcaggagattctgagcacaccaatgtttgagaaccactaaaatgaggagtgggaaaaaaaaaataggtgttttgttaatttagagctgagctgagaagataatatatttttattgtcaatgacattaacagatatgcactgattcttttatacctacaatttacttaatgttccttttattaaaacgcgtggttcatgagcaactacagactgaatccagattattacctgttgctttcagtattttcgtgatggcttttaatcttatgaaatcatcttgagatcattcatggtcaagccatgaaaactcccatcttcaagcctgcctgctaaagcttctttgccttcctgattgtgattatggtaacaatttatatcagacagttgtactttttgataacttagggaaaacagaaatgacttgaacaagggattgcctgcctcactgcattgcagagatacaatttttgtaaagaacacaaatagcagttgtgaatattaaggtgtgattatctttccctgtccatgtgcttattgaaagaagatagtgaacaaatgattatattgaggatttttttaatttataagatctaatgtgaaatccacacttggaactttttagatctgtctgttgcttgtttaatatatttcttttatgacattacttaaagtttaaaagggttttctatccactgtcaatttcaattggataacattttgtcaagttttttttttcctgattatttgatgctagctggaattcaagaaatggcattgaccttattcaaataaagaaatattttagtaaa

SEQ ID NO: 52113 - DNA, 4792 bp, Homo sapiens
ctcctccgcgttccagaatccaagatggcgggatccaggcaaaggggtctccgggccagagttcggccgctgttctgcgccttgctgctgtcactcggtcgcttcgtccggggcgacggcgtgggaggagaccccgcggtcgcgttgccacatcgccgtttcgagtacaaatacagcttcaaggggccgcacctggtgcagagcgacgggaccgtgcccttctgggcccacgcggggaatgctattccaagttcagatcaaattcgagtagcaccatctttaaaaagccaaagaggctcagtgtggacaaagacaaaagcggcctttgagaactgggaagttgaggtgacatttcgagtgactggaagaggtcggattggagctgatggcctagcaatttggtatgcagaaaatcaaggcttggagggccctgtgtttggatcagctgatctgtggaatggtgttggaatattttttgattcttttgacaatgatggaaagaaaaataatcctgctatagtaattataggcaacaatggacaaatccattatgaccatcaaaatgacggggctagtcaagctttggcaagttgccagagggacttccgcaacaaaccctatcctgtccgagcaaagattacctattaccagaacacactgacagtaatgatcaataatggctttacaccagataaaaatgattatgaattttgtgccaaagtgggaaaatatgattatccctgcacaagggcattttggaatatctgctgcaactggaggtcttgcagatgaccatgatgtcctttcttttctgactttccagttgactgaacctggaaaagagccgcccacaccagataaagaaatttcggaaaaggaaaaagaaaagtatcaggaggaatttgagcactttcaacaagaattggataaaaaaaaagaggaattccagaagggccaccccgacctccaagggcagcctgcggaggaaatatttgagagtgtaggagatcgagagctaagacaagtctttgaaggacagaatcgtattcatcttgaaatcaagcagctgaaccggcagttagatatgattcttgatgaacagagaagatatgtctcttccttaacagaggaaatctctaaaagaggagcaggaatgcctgggcagcatgggcagattactcaacaagaactggatactgttgtgaaaactcagcatgagattctgagacaagtaaatgaaatgaaaaattccatgagtgaaaccgtcagactggtcagtggaatgcagcaccctggctctgctggaggcgtctatgagacaacacagcacttcattgacatcaaagagcacctgcacatagtaaagagggacatagataacttagtgcagcgaaatatgccatcaaatgaaaagccgaaatgcccagaactaccaccatttccatcatgtttgtctacggtccacttcattatatttgttgtggtgcaaactgtattattcattggttatatcatgtataggtctcagcaagaagcagctgccaaaaaattcttttgactaccattttcctgtgtacttcatctatttgtgtacaaaatgatgtcgttttgagggaatttaagtatttaaattgcttcatagtctaaattattaattttcttaataaaataactgtttaaacattgatttgcagttaagaataaaccttaaagcaaagacaaccacattttaatttgttcacagtatgtaaatctgtctaaatttcagtgaatttctggtcagtatgatgcagcctctgagcagaatattgaccagtaagagggtaaataaagtgggggcaacccctggatatgaatgttaccccctaagtctccaatattgcaggtttccctgtataacgtaaacacacttgccctcatgcctcccagaatatgaggtctaattaagaagtcccatcaggtttattttgtaaccaaagtcttttttagaggtcagacttcctaatcaaaggcctgggcctgcagtcctttcatcttaatgcaacttcctttgaaatcaaagaatattttgtctgagagctttaaggatctggtaatagacttcaaaatgttaagtgaaatttttttttcctctatttatcaatgatatatttcacttttaaaggaaattttagaggaaaattaatagctgctttttgcctaaaaaaccttgtgggtggaaacattcctctgagaatggcttttataggtattttgcctggtaatgtattcattcatgattgcccatattcttgaatgtcttcattccaatggggtcaggtcaatattatgaaaataatttttatatttatatttgtaacttaaggaatttatttctccctttactacagcatgtaaattcagctcaaattgcatgatctgaggatttaaattcacaaaacctgccactacattctggtttacattagttacttcatgctggctggggttagtgaccatttgcatactcttttaaatcaaggaggctgtagtagaagcagttttaagattcttgaaggcaaaatttgaaaaacagtgaatacttctaattgtttccttttagtgccagaactaaggacattgtgaagcacttgttagtaaacttaaccttgaaatgtcagactggaaggagtttttatagtctttgtgcatacttctaggtattacagaaacagtctgtaaatgacattttaagatgcaaatttaattctgttcacagctgatttatactgatttttgctgccttcaaaatactcttttacttcttttagctaaaatggttgtctttcatttgccatagaattccaaacaatactatcttataaaatagtactgttgaattattccaagcctccctaggtttgctctcaaatgtcatttacagattgggctaacgacctaaaatctatatataaagactttctgaagaactctgtattatagcaataccaaacgagtgctgtgtgtgcaaacagtctggcgttgctttttatgttgatatttatcctagaacactgaaagagaatatgccagtgataactcactttacttcagtcatttcaacacagaaaatgcttctctagcatttttcttttgtagtgttaacattttgaaattcatgtttcagaggcttcatcatcacagaatttactcttgctccatgaaaaaaaattaaataccttcagaggaatatttaagttgtaaactatgaaacttgagaaatcctcttgagataaaaggctgccaaatccagtattataaagtccatggtcatatgtgcctgtgcattaaaggaataccagatctatgcagtatacattttcttactacaaatggagatggctattatgaaacagcatgagcatgagccttttatcttttatacttagtgatatactttgcttgaaaatcactcagcaaagtagttcacatgatgtgtatcatatttgaagtgtggtttttctcaaaatcattgactttaaggagctcatttctgaacaaaaaggtttgctctgtggaaaaatcaatcactgccaggattctttcatttctgtactattttgtataattgaatttgttcacttctctcacaccagcaagtgttttacaggtgccttggattaaaacaaaattgattttaaaatttttatgtaagtcattgtgtctatgatgccacttttaaaaggaaaatgcaattgcgtaatggcttatatccttatttaatgtacctatttgtgttctaataattgtttgaatgttttattcagcttaaaactttaccatgaagtcataaacagtaaacaatgttttgttatgtattaaggggatatcagtgtttctcaaagtatgatccatggaccatctgggtcatggcgcctggtttcagacaacctgaatcaaatcttaggggtggggctttgggatgtcattgttcaataggcacctcaggagattctgagcacaccaatgtttgagaaccactaaaatgaggagtgggaaaaaaaaaataggtgttttgttaatttagagctgagctgagaagataatatatttttattgtcaatgacattaacagatatgcactgattcttttatacctacaatttacttaatgttccttttattaaaacgcgtggttcatgagcaactacagactgaatccagattattacctgttgctttcagtattttcgtgatggcttttaatcttatgaaatcatcttgagatcattcatggtcaagccatgaaaactcccatcttcaagcctgcctgctaaagcttctttgccttcctgattgtgattatggtaacaatttatatcagacagttgtactttttgataacttagggaaaacagaaatgacttgaacaagggattgcctgcctcactgcattgcagagatacaatttttgtaaagaacacaaatagcagttgtgaatattaaggtgtgattatctttccctgtccatgtgcttattgaaagaagatagtgaacaaatgattatattgaggatttttttaatttataagatctaatgtgaaatccacacttggaactttttagatctgtctgttgcttgtttaatatatttcttttatgacattacttaaagtttaaaagggttttctatccactgtcaatttcaattggataacattttgtcaagttttttttttcctgattatttgatgctagctggaattcaagaaatggcattgaccttattcaaataaagaaatattttagtaaa

SEQ ID NO: 52114 - DNA, 4893 bp, Homo sapiens
ctcctccgcgttccagaatccaagatggcgggatccaggcaaaggggtctccgggccagagttcggccgctgttctgcgccttgctgctgtcactcggtcgcttcgtccggggcgacggcgtgggaggagaccccgcggtcgcgttgccacatcgccgtttcgagtacaaatacagcttcaaggggccgcacctggtgcagagcgacgggaccgtgcccttctgggcccacgcggggaatgctattccaagttcagatcaaattcgagtagcaccatctttaaaaagccaaagaggctcagtgtggacaaagacaaaagcggcctttgagaactgggaagttgaggtgacatttcgagtgactggaagaggtcggattggagctgatggcctagcaatttggtatgcagaaaatcaaggcttggagggccctgtgtttggatcagctgatctgtggaatggtgttggaatattttttgattcttttgacaatgatggaaagaaaaataatcctgctatagtaattataggcaacaatggacaaatccattatgaccatcaaaatgacggggctagtcaagctttggcaagttgccagagggacttccgcaacaaaccctatcctgtccgagcaaagattacctattaccagaacacactgacagtaatgatcaataatggctttacaccagataaaaatgattatgaattttgtgccaaagtgggaaaatatgattatccctgcacaagggcattttggaatatctgctgcaactggaggtcttgcagatgaccatgatgtcctttcttttctgactttccagttgactgaacctggaaaagagccgcccacaccagataaagaaatttcggaaaaggaaaaagaaaagtatcaggaggaatttgagcactttcaacaagaattggataaaaaaaaagaggaattccagaagggccaccccgacctccaagggcagcctgcggaggaaatatttgagagtgtaggagatcgagagctaagacaagtctttgaaggacagaatcgtattcatcttgaaatcaagcagctgaaccggcagttagatatgattcttgatgaacagagaagatatgtctcttccttaacagaggaaatctctaaaagaggagcaggaatgcctgggcagcatgggcagattactcaacaagaactggatactgttgtgaaaactcagcatgagattctgagacaagtaaatgaaatgaaaaattccatgagtgaaaccgtcagactggtcagtggaatgcagcaccctggctctgctggaggcgtctatgagacaacacagcacttcattgacatcaaagagcacctgcacatagtaaagagggacatagataacttagtgcagcgaaatatgccatcaaatgaaaagccgaaatgcccagaactaccaccatttccatcatgtttgtctacggtccacttcattatatttgttgtggtgcaaactgtattattcattggttatatcatgtataggtctcagcaagaagcagctgccaaaaaattcttttgactaccattttcctgtgtacttcatctatttgtgtacaaaatgatgtcgttttgagggaatttaagtatttaaattgcttcatagtctaaattattaattttcttaataaaataactgtttaaacattgatttgcagttaagaataaaccttaaagcaaagacaaccacattttaatttgttcacagtatgtaaatctgtctaaatttcagtgaatttctggtcagtatgatgcagcctctgagcagaatattgaccagtaagagggtaaataaagtgggggcaacccctggatatgaatgttaccccctaagtctccaatattgcaggtttccctgtataacgtaaacacacttgccctcatgcctcccagaatatgaggtctaattaagaagtcccatcaggtttattttgtaaccaaagtcttttttagaggtcagacttcctaatcaaaggcctgggcctgcagtcctttcatcttaatgcaacttcctttgaaatcaaagaatattttgtctgagagctttaaggatctggtaatagacttcaaaatgttaagtgaaatttttttttcctctatttatcaatgatatatttcacttttaaaggaaattttagaggaaaattaatagctgctttttgcctaaaaaaccttgtgggtggaaacattcctctgagaatggcttttataggtattttgcctggtaatgtattcattcatgattgcccatattcttgaatgtcttcattccaatggggtcaggtcaatattatgaaaataatttttatatttatatttgtaacttaaggaatttatttctccctttactacagcatgtaaattcagctcaaattgcatgatctgaggatttaaattcacaaaacctgccactacattctggtttacattagttacttcatgctggctggggttagtgaccatttgcatactcttttaaatcaaggaggctgtagtagaagcagttttaagattcttgaaggcaaaatttgaaaaacagtgaatacttctaattgtttccttttagtgccagaactaaggacattgtgaagcacttgttagtaaacttaaccttgaaatgtcagactggaaggagtttttatagtctttgtgcatacttctaggtattacagaaacagtctgtaaatgacattttaagatgcaaatttaattctgttcacagctgatttatactgatttttgctgccttcaaaatactcttttacttcttttagctaaaatggttgtctttcatttgccatagaattccaaacaatactatcttataaaatagtactgttgaattattccaagcctccctaggtttgctctcaaatgtcatttacagattgggctaacgacctaaaatctatatataaagactttctgaagaactctgtattatagcaataccaaacgagtgctgtgtgtgcaaacagtctggcgttgctttttatgttgatatttatcctagaacactgaaagagaatatgccagtgataactcactttacttcagtcatttcaacacagaaaatgcttctctagcatttttcttttgtagtgttaacattttgaaattcatgtttcagaggcttcatcatcacagaatttactcttgctccatgaaaaaaaattaaataccttcagaggaatatttaagttgtaaactatgaaacttgagaaatcctcttgagataaaaggctgccaaatccagtattataaagtccatggtcatatgtgcctgtgcattaaaggaataccagatctatgcagtatacatttttcaggctgaaattcaaggggaatcattctgattattcttactacaaatggagatggctattatgaaacagcatgagcatgagccttttatcttttatacttagtgatatactttgcttgaaaatcactcagcaaagtagttcacatgatgtgtatcatatttgaagtgtggtttttctcaaaatcattgactttaaggagctcatttctgaacaaaaaggtttgctctgtggaaaaatcaatcactgccaggattctttcatttctgtactattttgtataattgaatttgttcacttctctcacaccagcaagtgttttacaggtgccttggattaaaacaaaattgattttaaaatttttatgtaagtcattgtgtctatgatgccacttttaaaaggaaaatgcaattgcgtaatggcttatatccttatttaatgtacctatttgtgttctaataattgtttgaatgttttattcagcttaaaactttaccatgaagtcataaacagtaaacaatgttttgttatgtattaaggggatatcagtgtttctcaaagtatgatccatggaccatctgggtcatggcgcctggtttcagacaacctgaatcaaatcttaggggtggggctttgggatgtcattgttcaataggcacctcaggagattctgagcacaccaatgtttgagaaccactaaaatgaggagtgggaaaaaaaaaataggtgttttgttaatttagagctgagctgagaagataatatatttttattgtcaatgacattaacagatatgcactgattcttttatacctacaatttacttaatgttccttttattaaaacgcgtggttcatgagcaactacagactgaatccagattattacctgttgctttcagtattttcgtgatggcttttaatcttatgaaatcatcttgagatcattcatggtcaagccatgaaaactcccatcttcaagcctgcctgctaaagcttctttgccttcctgattgtgattatggtaacaatttatatcagacagttgtactttttgataacttagggaaaacagaaatgacttgaacaagggattgcctgcctcactgcattgcagagatacaatttttgtaaagaacacaaatagcagttgtgaatattaaggtgtgattatctttccctgtccatgtgcttattgaaagaagatagtgaacaaatgattatattgaggatttttttaatttataagatctaatgtgaaatccacacttggaactttttagatctgtctgttgcttgtttaatatatttcttttatgacattacttaaagtttaaaagggttttctatccactgtcaatttcaattggataacattttgtcaagttttttttttcctgattatttgatgctagctggaattcaagaaatggcattgaccttattcaaataaagaaatattttagtaaaaaaataataatatataaaaaaaaactcgaggggggcccggacccaatctgcctttgtgagtcgat

SEQ ID NO: 52115 - DNA, 4980 bp, Homo sapiens
ctcctccgcgttccagaatccaagatggcgggatccaggcaaaggggtctccgggccagagttcggccgctgttctgcgccttgctgctgtcactcggtcgcttcgtccggggcgacggcgtgggaggagaccccgcggtcgcgttgccacatcgccgtttcgagtacaaatacagcttcaaggggccgcacctggtgcagagcgacgggaccgtgcccttctgggcccacgcggggaatgctattccaagttcagatcaaattcgagtagcaccatctttaaaaagccaaagaggctcagtgtggacaaagacaaaagcggcctttgagaactgggaagttgaggtgacatttcgagtgactggaagaggtcggattggagctgatggcctagcaatttggtatgcagaaaatcaaggcttggagggccctgtgtttggatcagctgatctgtggaatggtgttggaatattttttgattcttttgacaatgatggaaagaaaaataatcctgctatagtaattataggcaacaatggacaaatccattatgaccatcaaaatgacggggctagtcaagctttggcaagttgccagagggacttccgcaacaaaccctatcctgtccgagcaaagattacctattaccagaacacactgacagtaatgatcaataatggctttacaccagataaaaatgattatgaattttgtgccaaagtgggaaaatatgattatccctgcacaagggcattttggaatatctgctgcaactggaggtcttgcagatgaccatgatgtcctttcttttctgactttccagttgactgaacctggaaaagagccgcccacaccagataaagaaatttcggaaaaggaaaaagaaaagtatcaggaggaatttgagcactttcaacaagaattggataaaaaaaaagaggaattccagaagggccaccccgacctccaagggcagcctgcggaggaaatatttgagagtgtaggagatcgagagctaagacaagtctttgaaggacagaatcgtattcatcttgaaatcaagcagctgaaccggcagttagatatgattcttgatgaacagagaagatatgtctcttccttaacagaggaaatctctaaaagaggagcaggaatgcctgggcagcatgggcagattactcaacaagaactggatactgttgtgaaaactcagcatgagattctgagacaagtaaatgaaatgaaaaattccatgagtgaaaccgtcagactggtcagtggaatgcagcaccctggctctgctggaggcgtctatgagacaacacagcacttcattgacatcaaagagcacctgcacatagtaaagagggacatagataacttagtgcagcgaaatatgccatcaaatgaaaagccgaaatgcccagaactaccaccatttccatcatgtttgtctacggtccacttcattatatttgttgtggtgcaaactgtattattcattggttatatcatgtataggtctcagcaagaagcagctgccaaaaaattcttttgactaccattttcctgtgtacttcatctatttgtgtacaaaatgatgtcgttttgagggaatttaagtatttaaattgcttcatagtctaaattattaattttcttaataaaataactgtttaaacattgatttgcagttaagaataaaccttaaagcaaagacaaccacattttaatttgttcacagtatgtaaatctgtctaaatttcagtgaatttctggtcagtatgatgcagcctctgagcagaatattgaccagtaagagggtaaataaagtgggggcaacccctggatatgaatgttaccccctaagtctccaatattgcaggtttccctgtataacgtaaacacacttgccctcatgcctcccagaatatgaggtctaattaagaagtcccatcaggtttattttgtaaccaaagtcttttttagaggtcagacttcctaatcaaaggcctgggcctgcagtcctttcatcttaatgcaacttcctttgaaatcaaagaatattttgtctgagagctttaaggatctggtaatagacttcaaaatgttaagtgaaatttttttttcctctatttatcaatgatatatttcacttttaaaggaaattttagaggaaaattaatagctgctttttgcctaaaaaaccttgtgggtggaaacattcctctgagaatggcttttataggtattttgcctggtaatgtattcattcatgattgcccatattcttgaatgtcttcattccaatggggtcaggtcaatattatgaaaataatttttatatttatatttgtaacttaaggaatttatttctccctttactacagcatgtaaattcagctcaaattgcatgatctgaggatttaaattcacaaaacctgccactacattctggtttacattagttacttcatgctggctggggttagtgaccatttgcatactcttttaaatcaaggaggctgtagtagaagcagttttaagattcttgaaggcaaaatttgaaaaacagtgaatacttctaattgtttccttttagtgccagaactaaggacattgtgaagcacttgttagtaaacttaaccttgaaatgtcagactggaaggagtttttatagtctttgtgcatacttctaggtattacagaaacagtctgtaaatgacattttaagatgcaaatttaattctgttcacagctgatttatactgatttttgctgccttcaaaatactcttttacttcttttagctaaaatggttgtctttcatttgccatagaattccaaacaatactatcttataaaatagtactgttgaattattccaagcctccctaggtttgctctcaaatgtcatttacagattgggctaacgacctaaaatctatatataaagactttctgaagaactctgtattatagcaataccaaacgagtgctgtgtgtgcaaacagtctggcgttgctttttatgttgatatttatcctagaacactgaaagagaatatgccagtgataactcactttacttcagtcatttcaacacagaaaatgcttctctagcatttttcttttgtagtgttaacattttgaaattcatgtttcagaggcttcatcatcacagaatttactcttgctccatgaaaaaaaattaaataccttcagaggaatatttaagttgtaaactatgaaacttgagaaatcctcttgagataaaaggctgccaaatccagtattataaagtccatggtcatatgtgcctgtgcattaaaggaataccagatctatgcagtatacatttttcaggctgaaattcaaggggaatcattctgattattcttactacaaatggagatggctattatgaaacagcatgagcatgagccttttatcttttatacttagtgatatactttgcttgaaaatcactcagcaaagtagttcacatgatgtgtatcatatttgaagtgtggtttttctcaaaatcattgactttaaggagctcatttctgaacaaaaaggtttgctctgtggaaaaatcaatcactgccaggattctttcatttctgtactattttgtataattgaatttgttcacttctctcacaccagcaagtgttttacaggtgccttggattaaaacaaaattgattttaaaatttttatgtaagtcattgtgtctatgatgccacttttaaaaggaaaatgcaattgcgtaatggcttatatccttatttaatgtacctatttgtgttctaataattgtttgaatgttttattcagcttaaaactttaccatgaagtcataaacagtaaacaatgttttgttatgtattaaggggatatcagtgtttctcaaagtatgatccatggaccatctgggtcatggcgcctggtttcagacaacctgaatcaaatcttaggggtggggctttgggatgtcattgttcaataggcacctcaggagattctgagcacaccaatgtttgagaaccactaaaatgaggagtgggaaaaaaaaaataggtgttttgttaatttagagctgagctgagaagataatatatttttattgtcaatgacattaacagatatgcactgattcttttatacctacaatttacttaatgttccttttattaaaacgcgtggttcatgagcaactacagactgaatccagattattacctgttgctttcagtattttcgtgatggcttttaatcttatgaaatcatcttgagatcattcatggtcaagccatgaaaactcccatcttcaagcctgcctgctaaagcttctttgccttcctgattgtgattatggtaacaatttatatcagacagttgtactttttgataacttagggaaaacagaaatgacttgaacaagggattgcctgcctcactgcattgcagagatacaatttttgtaaagaacacaaatagcagttgtgaatattaaggtgtgattatctttccctgtccatgtgcttattgaaagaagatagtgaacaaatgattatattgaggatttttttaatttataagatctaatgtgaaatccacacttggaactttttagatctgtctgttgcttgtttaatatatttcttttatgacattacttaaagtttaaaagggttttctatccactgtcaatttcaattggataacattttgtcaagttttttttttcctgattatttgatgctagctggaattcaagaaatggcattgaccttattcaaataaagaaatattttagtaaaaaaaaaaaaaaaaaaactatagaaaggtgtccccactgtacacatactacttggtcaaggacccaaacccgtctggcccagcaacaattctgagcctttaagtcattctctgagcatataaactagaagttaccagagcctcctcctttagc

SEQ ID NO: 52116 - DNA, 4613 bp, Homo sapiens
ctcctccgcgttccagaatccaagatggcgggatccaggcaaaggggtctccgggccagagttcggccgctgttctgcgccttgctgctgtcactcggtcgcttcgtccggggcgacggcgtgggaggagaccccgcggtcgcgttgccacatcgccgtttcgagtacaaatacagcttcaaggggccgcacctggtgcagagcgacgggaccgtgcccttctgggcccacgcggggaatgctattccaagttcagatcaaattcgagtagcaccatctttaaaaagccaaagaggctcagtgtggacaaagacaaaagcggcctttgagaactgggaagttgaggtgacatttcgagtgactggaagaggtcggattggagctgatggcctagcaatttggtatgcagaaaatcaaggcttggagggccctgtgtttggatcagctgatctgtggaatggtgttggaatattttttgattcttttgacaatgatggaaagaaaaataatcctgctatagtaattataggcaacaatggacaaatccattatgaccatcaaaatgacggggctagtcaagctttggcaagttgccagagggacttccgcaacaaaccctatcctgtccgagcaaagattacctattaccagaacacactgacagtaatgatcaataatggctttacaccagataaaaatgattatgaattttgtgccaaagtgggaaaatatgattatccctgcacaagggcattttggaatatctgctgcaactggaggtcttgcagatgaccatgatgtcctttcttttctgactttccagttgactgaacctggaaaagagccgcccacaccagataaagaaatttcggaaaaggaaaaagaaaagtatcaggaggaatttgagcactttcaacaagaattggataaaaaaaaagaggaattccagaagggccaccccgacctccaagggcagcctgcggaggaaatatttgagagtgtaggagatcgagagctaagacaagtctttgaaggacagaatcgtattcatcttgaaatcaagcagctgaaccggcagttagatatgattcttgatgaacagagaagatatgtctcttccttaacagaggaaatctctaaaagaggagcaggaatgcctgggcagcatgggcagattactcaacaagaactggatactgttgtgaaaactcagcatgagattctgagacaagtaaatgaaatgaaaaattccatgagtgaaaccgtcagactggtcagtggaatgcagcaccctggctctgctggaggcgtctatgagacaacacagcacttcattgacatcaaagagcacctgcacatagtaaagagggacatagataacttagtgcagcgaaatatgccatcaaatgaaaagccgaaatgcccagaactaccaccatttccatcatgtttgtctacggtccacttcattatatttgttgtggtgcaaactgtattattcattggttatatcatgtataggtctcagcaagaagcagctgccaaaaaattcttttgactaccattttcctgtgtacttcatctatttgtgtacaaaatgatgtcgttttgagggaatttaagtatttaaattgcttcatagtctaaattattaattttcttaataaaataactgtttaaacattgatttgcagttaagaataaaccttaaagcaaagacaaccacattttaatttgttcacagtatgtaaatctgtctaaatttcagtgaatttctggtcagtatgatgcagcctctgagcagaatattgaccagtaagagggtaaataaagtgggggcaacccctggatatgaatgttaccccctaagtctccaatattgcaggtttccctgtataacgtaaacacacttgccctcatgcctcccagaatatgaggtctaattaagaagtcccatcaggtttattttgtaaccaaagtcttttttagaggtcagacttcctaatcaaaggcctgggcctgcagtcctttcatcttaatgcaacttcctttgaaatcaaagaatattttgtctgagagctttaaggatctggtaatagacttcaaaatgttaagtgaaatttttttttcctctatttatcaatgatatatttcacttttaaaggaaattttagaggaaaattaatagctgctttttgcctaaaaaaccttgtgggtggaaacattcctctgagaatggcttttataggtattttgcctggtaatgtattcattcatgattgcccatattcttgaatgtcttcattccaatggggtcaggtcaatattatgaaaataatttttatatttatatttgtaacttaaggaatttatttctccctttactacagcatgtaaattcagctcaaattgcatgatctgaggatttaaattcacaaaacctgccactacattctggtttacattagttacttcatgctggctggggttagtgaccatttgcatactcttttaaatcaaggaggctgtagtagaagcagttttaagattcttgaaggcaaaatttgaaaaacagtgaatacttctaattgtttccttttagtgccagaactaaggacattgtgaagcacttgttagtaaacttaaccttgaaatgtcagactggaaggagtttttatagtctttgtgcatacttctaggtattacagattgggctaacgacctaaaatctatatataaagactttctgaagaactctgtattatagcaataccaaacgagtgctgtgtgtgcaaacagtctggcgttgctttttatgttgatatttatcctagaacactgaaagagaatatgccagtgataactcactttacttcagtcatttcaacacagaaaatgcttctctagcatttttcttttgtagtgttaacattttgaaattcatgtttcagaggcttcatcatcacagaatttactcttgctccatgaaaaaaaattaaataccttcagaggaatatttaagttgtaaactatgaaacttgagaaatcctcttgagataaaaggctgccaaatccagtattataaagtccatggtcatatgtgcctgtgcattaaaggaataccagatctatgcagtatacatttttcaggctgaaattcaaggggaatcattctgattattcttactacaaatggagatggctattatgaaacagcatgagcatgagccttttatcttttatacttagtgatatactttgcttgaaaatcactcagcaaagtagttcacatgatgtgtatcatatttgaagtgtggtttttctcaaaatcattgactttaaggagctcatttctgaacaaaaaggtttgctctgtggaaaaatcaatcactgccaggattctttcatttctgtactattttgtataattgaatttgttcacttctctcacaccagcaagtgttttacaggtgccttggattaaaacaaaattgattttaaaatttttatgtaagtcattgtgtctatgatgccacttttaaaaggaaaatgcaattgcgtaatggcttatatccttatttaatgtacctatttgtgttctaataattgtttgaatgttttattcagcttaaaactttaccatgaagtcataaacagtaaacaatgttttgttatgtattaaggggatatcagtgtttctcaaagtatgatccatggaccatctgggtcatggcgcctggtttcagacaacctgaatcaaatcttaggggtggggctttgggatgtcattgttcaataggcacctcaggagattctgagcacaccaatgtttgagaaccactaaaatgaggagtgggaaaaaaaaaataggtgttttgttaatttagagctgagctgagaagataatatatttttattgtcaatgacattaacagatatgcactgattcttttatacctacaatttacttaatgttccttttattaaaacgcgtggttcatgagcaactacagactgaatccagattattacctgttgctttcagtattttcgtgatggcttttaatcttatgaaatcatcttgagatcattcatggtcaagccatgaaaactcccatcttcaagcctgcctgctaaagcttctttgccttcctgattgtgattatggtaacaatttatatcagacagttgtactttttgataacttagggaaaacagaaatgacttgaacaagggattgcctgcctcactgcattgcagagatacaatttttgtaaagaacacaaatagcagttgtgaatattaaggtgtgattatctttccctgtccatgtgcttattgaaagaagatagtgaacaaatgattatattgaggatttttttaatttataagatctaatgtgaaatccacacttggaactttttagatctgtctgttgcttgtttaatatatttcttttatgacattacttaaagtttaaaagggttttctatccactgtcaatttcaattggataacattttgtcaagttttttttttcctgattatttgatgctagctggaattcaagaaatggcattgaccttattcaaataaagaaatattttagtaaa

SEQ ID NO: 52117 - DNA, 4775 bp, Homo sapiens
ctcctccgcgttccagaatccaagatggcgggatccaggcaaaggggtctccgggccagagttcggccgctgttctgcgccttgctgctgtcactcggtcgcttcgtccggggcgacggcgtgggaggagaccccgcggtcgcgttgccacatcgccgtttcgagtacaaatacagcttcaaggggccgcacctggtgcagagcgacgggaccgtgcccttctgggcccacgcggggaatgctattccaagttcagatcaaattcgagtagcaccatctttaaaaagccaaagaggctcagtgtggacaaagacaaaagcggcctttgagaactgggaagttgaggtgacatttcgagtgactggaagaggtcggattggagctgatggcctagcaatttggtatgcagaaaatcaaggcttggagggccctgtgtttggatcagctgatctgtggaatggtgttggaatattttttgattcttttgacaatgatggaaagaaaaataatcctgctatagtaattataggcaacaatggacaaatccattatgaccatcaaaacctatcctgtccgagcaaagattacctattaccagaacacactgacagtaatgatcaataatggctttacaccagataaaaatgattatgaattttgtgccaaagtgggaaaatatgattatccctgcacaagggcattttggaatatctgctgcaactggaggtcttgcagatgaccatgatgtcctttcttttctgactttccagttgactgaacctggaaaagagccgcccacaccagataaagaaatttcggaaaaggaaaaagaaaagtatcaggaggaatttgagcactttcaacaagaattggataaaaaaaaagaggaattccagaagggccaccccgacctccaagggcagcctgcggaggaaatatttgagagtgtaggagatcgagagctaagacaagtctttgaaggacagaatcgtattcatcttgaaatcaagcagctgaaccggcagttagatatgattcttgatgaacagagaagatatgtctcttccttaacagaggaaatctctaaaagaggagcaggaatgcctgggcagcatgggcagattactcaacaagaactggatactgttgtgaaaactcagcatgagattctgagacaagtaaatgaaatgaaaaattccatgagtgaaaccgtcagactggtcagtggaatgcagcaccctggctctgctggaggcgtctatgagacaacacagcacttcattgacatcaaagagcacctgcacatagtaaagagggacatagataacttagtgcagcgaaatatgccatcaaatgaaaagccgaaatgcccagaactaccaccatttccatcatgtttgtctacggtccacttcattatatttgttgtggtgcaaactgtattattcattggttatatcatgtataggtctcagcaagaagcagctgccaaaaaattcttttgactaccattttcctgtgtacttcatctatttgtgtacaaaatgatgtcgttttgagggaatttaagtatttaaattgcttcatagtctaaattattaattttcttaataaaataactgtttaaacattgatttgcagttaagaataaaccttaaagcaaagacaaccacattttaatttgttcacagtatgtaaatctgtctaaatttcagtgaatttctggtcagtatgatgcagcctctgagcagaatattgaccagtaagagggtaaataaagtgggggcaacccctggatatgaatgttaccccctaagtctccaatattgcaggtttccctgtataacgtaaacacacttgccctcatgcctcccagaatatgaggtctaattaagaagtcccatcaggtttattttgtaaccaaagtcttttttagaggtcagacttcctaatcaaaggcctgggcctgcagtcctttcatcttaatgcaacttcctttgaaatcaaagaatattttgtctgagagctttaaggatctggtaatagacttcaaaatgttaagtgaaatttttttttcctctatttatcaatgatatatttcacttttaaaggaaattttagaggaaaattaatagctgctttttgcctaaaaaaccttgtgggtggaaacattcctctgagaatggcttttataggtattttgcctggtaatgtattcattcatgattgcccatattcttgaatgtcttcattccaatggggtcaggtcaatattatgaaaataatttttatatttatatttgtaacttaaggaatttatttctccctttactacagcatgtaaattcagctcaaattgcatgatctgaggatttaaattcacaaaacctgccactacattctggtttacattagttacttcatgctggctggggttagtgaccatttgcatactcttttaaatcaaggaggctgtagtagaagcagttttaagattcttgaaggcaaaatttgaaaaacagtgaatacttctaattgtttccttttagtgccagaactaaggacattgtgaagcacttgttagtaaacttaaccttgaaatgtcagactggaaggagtttttatagtctttgtgcatacttctaggtattacagaaacagtctgtaaatgacattttaagatgcaaatttaattctgttcacagctgatttatactgatttttgctgccttcaaaatactcttttacttcttttagctaaaatggttgtctttcatttgccatagaattccaaacaatactatcttataaaatagtactgttgaattattccaagcctccctaggtttgctctcaaatgtcatttacagattgggctaacgacctaaaatctatatataaagactttctgaagaactctgtattatagcaataccaaacgagtgctgtgtgtgcaaacagtctggcgttgctttttatgttgatatttatcctagaacactgaaagagaatatgccagtgataactcactttacttcagtcatttcaacacagaaaatgcttctctagcatttttcttttgtagtgttaacattttgaaattcatgtttcagaggcttcatcatcacagaatttactcttgctccatgaaaaaaaattaaataccttcagaggaatatttaagttgtaaactatgaaacttgagaaatcctcttgagataaaaggctgccaaatccagtattataaagtccatggtcatatgtgcctgtgcattaaaggaataccagatctatgcagtatacatttttcaggctgaaattcaaggggaatcattctgattattcttactacaaatggagatggctattatgaaacagcatgagcatgagccttttatcttttatacttagtgatatactttgcttgaaaatcactcagcaaagtagttcacatgatgtgtatcatatttgaagtgtggtttttctcaaaatcattgactttaaggagctcatttctgaacaaaaaggtttgctctgtggaaaaatcaatcactgccaggattctttcatttctgtactattttgtataattgaatttgttcacttctctcacaccagcaagtgttttacaggtgccttggattaaaacaaaattgattttaaaatttttatgtaagtcattgtgtctatgatgccacttttaaaaggaaaatgcaattgcgtaatggcttatatccttatttaatgtacctatttgtgttctaataattgtttgaatgttttattcagcttaaaactttaccatgaagtcataaacagtaaacaatgttttgttatgtattaaggggatatcagtgtttctcaaagtatgatccatggaccatctgggtcatggcgcctggtttcagacaacctgaatcaaatcttaggggtggggctttgggatgtcattgttcaataggcacctcaggagattctgagcacaccaatgtttgagaaccactaaaatgaggagtgggaaaaaaaaaataggtgttttgttaatttagagctgagctgagaagataatatatttttattgtcaatgacattaacagatatgcactgattcttttatacctacaatttacttaatgttccttttattaaaacgcgtggttcatgagcaactacagactgaatccagattattacctgttgctttcagtattttcgtgatggcttttaatcttatgaaatcatcttgagatcattcatggtcaagccatgaaaactcccatcttcaagcctgcctgctaaagcttctttgccttcctgattgtgattatggtaacaatttatatcagacagttgtactttttgataacttagggaaaacagaaatgacttgaacaagggattgcctgcctcactgcattgcagagatacaatttttgtaaagaacacaaatagcagttgtgaatattaaggtgtgattatctttccctgtccatgtgcttattgaaagaagatagtgaacaaatgattatattgaggatttttttaatttataagatctaatgtgaaatccacacttggaactttttagatctgtctgttgcttgtttaatatatttcttttatgacattacttaaagtttaaaagggttttctatccactgtcaatttcaattggataacattttgtcaagttttttttttcctgattatttgatgctagctggaattcaagaaatggcattgaccttattcaaataaagaaatattttagtaaa

SEQ ID NO: 52118 - DNA, 4073 bp, Homo sapiens
acccgactaccgctaagaaaccctctcttgcagatgaccatgatgtcctttcttttctgactttccagttgactgaacctggaaaagagccgcccacaccagataaagaaatttcggaaaaggaaaaagaaaagtatcaggaggaatttgagcactttcaacaagaattggataaaaaaaaagaggaattccagaagggccaccccgacctccaagggcagcctgcggaggaaatatttgagagtgtaggagatcgagagctaagacaagtctttgaaggacagaatcgtattcatcttgaaatcaagcagctgaaccggcagttagatatgattcttgatgaacagagaagatatgtctcttccttaacagaggaaatctctaaaagaggagcaggaatgcctgggcagcatgggcagattactcaacaagaactggatactgttgtgaaaactcagcatgagattctgagacaagtaaatgaaatgaaaaattccatgagtgaaaccgtcagactggtcagtggaatgcagcaccctggctctgctggaggcgtctatgagacaacacagcacttcattgacatcaaagagcacctgcacatagtaaagagggacatagataacttagtgcagcgaaatatgccatcaaatgaaaagccgaaatgcccagaactaccaccatttccatcatgtttgtctacggtccacttcattatatttgttgtggtgcaaactgtattattcattggttatatcatgtataggtctcagcaagaagcagctgccaaaaaattcttttgactaccattttcctgtgtacttcatctatttgtgtacaaaatgatgtcgttttgagggaatttaagtatttaaattgcttcatagtctaaattattaattttcttaataaaataactgtttaaacattgatttgcagttaagaataaaccttaaagcaaagacaaccacattttaatttgttcacagtatgtaaatctgtctaaatttcagtgaatttctggtcagtatgatgcagcctctgagcagaatattgaccagtaagagggtaaataaagtgggggcaacccctggatatgaatgttaccccctaagtctccaatattgcaggtttccctgtataacgtaaacacacttgccctcatgcctcccagaatatgaggtctaattaagaagtcccatcaggtttattttgtaaccaaagtcttttttagaggtcagacttcctaatcaaaggcctgggcctgcagtcctttcatcttaatgcaacttcctttgaaatcaaagaatattttgtctgagagctttaaggatctggtaatagacttcaaaatgttaagtgaaatttttttttcctctatttatcaatgatatatttcacttttaaaggaaattttagaggaaaattaatagctgctttttgcctaaaaaaccttgtgggtggaaacattcctctgagaatggcttttataggtattttgcctggtaatgtattcattcatgattgcccatattcttgaatgtcttcattccaatggggtcaggtcaatattatgaaaataatttttatatttatatttgtaacttaaggaatttatttctccctttactacagcatgtaaattcagctcaaattgcatgatctgaggatttaaattcacaaaacctgccactacattctggtttacattagttacttcatgctggctggggttagtgaccatttgcatactcttttaaatcaaggaggctgtagtagaagcagttttaagattcttgaaggcaaaatttgaaaaacagtgaatacttctaattgtttccttttagtgccagaactaaggacattgtgaagcacttgttagtaaacttaaccttgaaatgtcagactggaaggagtttttatagtctttgtgcatacttctaggtattacagaaacagtctgtaaatgacattttaagatgcaaatttaattctgttcacagctgatttatactgatttttgctgccttcaaaatactcttttacttcttttagctaaaatggttgtctttcatttgccatagaattccaaacaatactatcttataaaatagtactgttgaattattccaagcctccctaggtttgctctcaaatgtcatttacagattgggctaacgacctaaaatctatatataaagactttctgaagaactctgtattatagcaataccaaacgagtgctgtgtgtgcaaacagtctggcgttgctttttatgttgatatttatcctagaacactgaaagagaatatgccagtgataactcactttacttcagtcatttcaacacagaaaatgcttctctagcatttttcttttgtagtgttaacattttgaaattcatgtttcagaggcttcatcatcacagaatttactcttgctccatgaaaaaaaattaaataccttcagaggaatatttaagttgtaaactatgaaacttgagaaatcctcttgagataaaaggctgccaaatccagtattataaagtccatggtcatatgtgcctgtgcattaaaggaataccagatctatgcagtatacatttttcaggctgaaattcaaggggaatcattctgattattcttactacaaatggagatggctattatgaaacagcatgagcatgagccttttatcttttatacttagtgatatactttgcttgaaaatcactcagcaaagtagttcacatgatgtgtatcatatttgaagtgtggtttttctcaaaatcattgactttaaggagctcatttctgaacaaaaaggtttgctctgtggaaaaatcaatcactgccaggattctttcatttctgtactattttgtataattgaatttgttcacttctctcacaccagcaagtgttttacaggtgccttggattaaaacaaaattgattttaaaatttttatgtaagtcattgtgtctatgatgccacttttaaaaggaaaatgcaattgcgtaatggcttatatccttatttaatgtacctatttgtgttctaataattgtttgaatgttttattcagcttaaaactttaccatgaagtcataaacagtaaacaatgttttgttatgtattaaggggatatcagtgtttctcaaagtatgatccatggaccatctgggtcatggcgcctggtttcagacaacctgaatcaaatcttaggggtggggctttgggatgtcattgttcaataggcacctcaggagattctgagcacaccaatgtttgagaaccactaaaatgaggagtgggaaaaaaaaaataggtgttttgttaatttagagctgagctgagaagataatatatttttattgtcaatgacattaacagatatgcactgattcttttatacctacaatttacttaatgttccttttattaaaacgcgtggttcatgagcaactacagactgaatccagattattacctgttgctttcagtattttcgtgatggcttttaatcttatgaaatcatcttgagatcattcatggtcaagccatgaaaactcccatcttcaagcctgcctgctaaagcttctttgccttcctgattgtgattatggtaacaatttatatcagacagttgtactttttgataacttagggaaaacagaaatgacttgaacaagggattgcctgcctcactgcattgcagagatacaatttttgtaaagaacacaaatagcagttgtgaatattaaggtgtgattatctttccctgtccatgtgcttattgaaagaagatagtgaacaaatgattatattgaggatttttttaatttataagatctaatgtgaaatccacacttggaactttttagatctgtctgttgcttgtttaatatatttcttttatgacattacttaaagtttaaaagggttttctatccactgtcaatttcaattggataacattttgtcaagttttttttttcctgattatttgatgctagctggaattcaagaaatggcattgaccttattcaaataaagaaatattttagtaaa

SEQ ID NO: 52119 - DNA, 5391 bp, Homo sapiens
ctcctccgcgttccagaatccaagatggcgggatccaggcaaaggggtctccgggccagagttcggccgctgttctgcgccttgctgctgtcactcggtcgcttcgtccggggcgacggcgtgggaggagaccccgcggtcgcgttgccacatcgccgtttcgagtacaaatacagcttcaaggggccgcacctggtgcagagcgacgggaccgtgcccttctgggcccacgcggggaatgctattccaagttcagatcaaattcgagtagcaccatctttaaaaagccaaagaggctcagtgtggacaaagacaaaagcggcctttgagaactgggaagttgaggtgacatttcgagtgactggaagaggtcggattggagctgatggcctagcaatttggtatgcagaaaatcaaggcttggagggccctgtgtttggatcagctgatctgtggaatggtgttggaatattttttgattcttttgacaatgatggaaagaaaaataatcctgctatagtaattataggcaacaatggacaaatccattatgaccatcaaaatgacggggctagtcaagctttggcaagttgccagagggacttccgcaacaaaccctatcctgtccgagcaaagattacctattaccagaacacactgacagtaatgatcaataatggctttacaccagataaaaatgattatgaattttgtgccaaagtgggaaaatatgattatccctgcacaagggcattttggaatatctgctgcaactggaggtcttgcagatgaccatgatgtcctttcttttctgactttccagttgactgaacctggaaaagagccgcccacaccagataaagaaatttcggaaaaggaaaaagaaaagtatcaggaggaatttgagcactttcaacaagaattggataaaaaaaaagaggaattccagaagggccaccccgacctccaagggcagcctgcggaggaaatatttgagagtgtaggagatcgagagctaagacaagtctttgaaggacagaatcgtattcatcttgaaatcaagcagctgaaccggcagttagatatgattcttgatgaacagagaagatatgtctcttccttaacagaggaaatctctaaaagaggagcaggaatgcctgggcagcatgggcagattactcaacaagaactggatactgttgtgaaaactcagcatgagattctgagacaagtaaatgaaatgaaaaattccatgagtgaaaccgtcagactggtcagtggaatgcagcaccctggctctgctggaggcgtctatgagacaacacagcacttcattgacatcaaagagcacctgcacatagtaaagagggacatagataacttagtgcagcgaaatatgccatcaaatgaaaagccgaaatgcccagaactaccaccatttccatcatgtttgtctacggtccacttcattatatttgttgtggtgcaaactgtattattcattggttatatcatgtataggtctcagcaagaagcagctgccaaaaaattcttttgactaccattttcctgtgtacttcatctatttgtgtacaaaatgatgtcgttttgagggaatttaagtatttaaattgcttcatagtctaaattattaattttcttaataaaataactgtttaaacattgatttgcagttaagaataaaccttaaagcaaagacaaccacattttaatttgttcacagtatgtaaatctgtctaaatttcagtgaatttctggtcagtatgatgcagcctctgagcagaatattgaccagtaagagggtaaataaagtgggggcaacccctggatatgaatgttaccccctaagtctccaatattgcaggtttccctgtataacgtaaacacacttgccctcatgcctcccagaatatgaggtctaattaagaagtcccatcaggtttattttgtaaccaaagtcttttttagaggtcagacttcctaatcaaaggcctgggcctgcagtcctttcatcttaatgcaacttcctttgaaatcaaagaatattttgtctgagagctttaaggatctggtaatagacttcaaaatgttaagtgaaatttttttttcctctatttatcaatgatatatttcacttttaaaggaaattttagaggaaaattaatagctgctttttgcctaaaaaaccttgtgggtggaaacattcctctgagaatggcttttataggtattttgcctggtaatgtattcattcatgattgcccatattcttgaatgtcttcattccaatggggtcaggtcaatattatgaaaataatttttatatttatatttgtaacttaaggaatttatttctccctttactacagcatgtaaattcagctcaaattgcatgatctgaggatttaaattcacaaaacctgccactacattctggtttacattagttacttcatgctggctggggttagtgaccatttgcatactcttttaaatcaaggaggctgtagtagaagcagttttaagattcttgaaggcaaaatttgaaaaacagtgaatacttctaattgtttccttttagtgccagaactaaggacattgtgaagcacttgttagtaaacttaaccttgaaatgtcagactggaaggagtttttatagtctttgtgcatacttctaggtattacagaaacagtctgtaaatgacattttaagatgcaaatttaattctgttcacagctgatttatactgatttttgctgccttcaaaatactcttttacttcttttagctaaaatggttgtctttcatttgccatagaattccaaacaatactatcttataaaatagtactgttgaattattccaagcctccctaggtttgctctcaaatgtcatttacagattgggctaacgacctaaaatctatatataaagactttctgaagaactctgtattatagcaataccaaacgagtgctgtgtgtgcaaacagtctggcgttgctttttatgttgatatttatcctagaacactgaaagagaatatgccagtgataactcactttacttcagtcatttcaacacagaaaatgcttctctagcatttttcttttgtagtgttaacattttgaaattcatgtttcagaggcttcatcatcacagaatttactcttgctccatgaaaaaaaattaaataccttcagaggaatatttaagttgtaaactatgaaacttgagaaatcctcttgagataaaaggctgccaaatccagtattataaagtccatggtcatatgtgcctgtgcattaaaggaataccagatctatgcagtatacatttttcaggctgaaattcaaggggaatcattctgattattcttactacaaatggagatggctattatgaaacagcatgagcatgagccttttatcttttatacttagtgatatactttgcttgaaaatcactcagcaaagtagttcacatgatgtgtatcatatttgaagtgtggtttttctcaaaatcattgactttaaggagctcatttctgaacaaaaaggtttgctctgtggaaaaatcaatcactgccaggattctttcatttctgtactattttgtataattgaatttgttcacttctctcacaccagcaagtgttttacaggtgccttggattaaaacaaaattgattttaaaatttttatgtaagtcattgtgtctatgatgccacttttaaaaggaaaatgcaattgcgtaatggcttatatccttatttaatgtacctatttgtgttctaataattgtttgaatgttttattcagcttaaaactttaccatgaagtcataaacagtaaacaatgttttgttatgtattaaggggatatcagtgtttctcaaagtatgatccatggaccatctgggtcatggcgcctggtttcagacaacctgaatcaaatcttaggggtggggctttgggatgtcattgttcaataggcacctcaggagattctgagcacaccaatgtttgagaaccactaaaatgaggagtgggaaaaaaaaaataggtgttttgttaatttagagctgagctgagaagataatatatttttattgtcaatgacattaacagatatgcactgattcttttatacctacaatttacttaatgttccttttattaaaacgcgtggttcatgaaaaaaaaaaaaaaaaaaaaaaaaaaaaatttggtgtggcggcggcacaccgcaccctcgaaaaaggcgtctcgaaacacactgcatgcgaggcaccgcgcccacaaaggataacgacacctgggtccagacggataccacaagaacacagcggacaaccaacagggtcccggttacccaccaaaaaaaaacgcgcgggacaccagacgtcctgaacacaccacggaggacgtcagggcgcaccaagggggcctaccaaaggggtccaggggagcggaataatccacccgccgggggatcaacagaaacaagaacaagacgaagacagcagacaacaacaccacaacgaacgaaacacgaccaaacacgatgaagcgagaacacacagaaaagagcaacacacaagacaagacgagcaggagagagaggacgaaagagaggaaggggagagaacacgacatgaaagaggaagcggaaggacaaagagggaggacagagaacgcggagaagcaaaaagagaacgaaagaaaacagaggaaaacgacacagagaggagacagagcggagagaaacaagcacgaagaaccaatcagaagaaggaaacaacaacgaggccgacagaacgacaagcaagagaacagagggagacgaaccaagacgaaacaagggaacaaagacagagagaaggaacaaaaagaacgacaacaagaagacacaaaaagaacagaagaagcacaagaaagagaagggagagagaggagagaagaatcaaaaagaaagaaagaacagagaagaacaaacgaagaaaagggaaaggacaaagcagaggacaagcagaccgagagaagaacagcagaaagcagagaacggagcggagacagacacgtgagcgaggataggcggagcagcagaagagctcagcgagacgtcaagaaaacgcagacataaagaaagaacgaagacatagagaaagaaggagcacacagaagacggaaggcgagagaacgagacagaggagagagacgacggcgggagcgaaagccagaagaacgagagagacacgaacagacaaggagaaagaactaaaggccgcagaggagaacagaaggaggaaaagaagaggagagaagagcaggcgagaagtcagagagagcacgacagagcatgcagcacg

SEQ ID NO: 52120 - DNA, 4186 bp, Homo sapiens
tggtaaagctcttactttttaaactacatttgactccagtgaaataacttatttatttattcctccaaattgaaccataactgttgaatgcactcgtaggaaatcagaattgtgacccctgtcctcagggtcacaaagccattagcctcctactatatgctgtatgagtgaaatcatctatatgtgcagctacaaagcggacaagtctgtgtgtgtgtgagtgtgcctataggaaatgattgcgtttggcactagtcctttactgtacagctgaacacctagaaagatttattataacttcattaaaaatatcatccattatattcaatatccacttatactattggttttaacacagattacctagtagtattttctacatggtatttttagatgacctttagtaaaatataaaggcataatgtcgttttataaattattttccaattttgaacacaactcgatttttaaagatactttacctgtttttttttttaaatgatgtaatatattagacttgaaaagtaaaagtattggagatctgtgactgaaaaaaaaaaactttatagtgattttattgtatcaagagactttctgtttcagaaattccatgagtgaaaccgtcagactggtcagtggaatgcagcaccctggctctgctggaggcgtctatgagacaacacagcacttcattgacatcaaagagcacctgcacatagtaaagagggacatagataacttagtgcagcgaaatatgccatcaaatgaaaagccgaaatgcccagaactaccaccatttccatcatgtttgtctacggtccacttcattatatttgttgtggtgcaaactgtattattcattggttatatcatgtataggtctcagcaagaagcagctgccaaaaaattcttttgactaccattttcctgtgtacttcatctatttgtgtacaaaatgatgtcgttttgagggaatttaagtatttaaattgcttcatagtctaaattattaattttcttaataaaataactgtttaaacattgatttgcagttaagaataaaccttaaagcaaagacaaccacattttaatttgttcacagtatgtaaatctgtctaaatttcagtgaatttctggtcagtatgatgcagcctctgagcagaatattgaccagtaagagggtaaataaagtgggggcaacccctggatatgaatgttaccccctaagtctccaatattgcaggtttccctgtataacgtaaacacacttgccctcatgcctcccagaatatgaggtctaattaagaagtcccatcaggtttattttgtaaccaaagtcttttttagaggtcagacttcctaatcaaaggcctgggcctgcagtcctttcatcttaatgcaacttcctttgaaatcaaagaatattttgtctgagagctttaaggatctggtaatagacttcaaaatgttaagtgaaatttttttttcctctatttatcaatgatatatttcacttttaaaggaaattttagaggaaaattaatagctgctttttgcctaaaaaaccttgtgggtggaaacattcctctgagaatggcttttataggtattttgcctggtaatgtattcattcatgattgcccatattcttgaatgtcttcattccaatggggtcaggtcaatattatgaaaataatttttatatttatatttgtaacttaaggaatttatttctccctttactacagcatgtaaattcagctcaaattgcatgatctgaggatttaaattcacaaaacctgccactacattctggtttacattagttacttcatgctggctggggttagtgaccatttgcatactcttttaaatcaaggaggctgtagtagaagcagttttaagattcttgaaggcaaaatttgaaaaacagtgaatacttctaattgtttccttttagtgccagaactaaggacattgtgaagcacttgttagtaaacttaaccttgaaatgtcagactggaaggagtttttatagtctttgtgcatacttctaggtattacagaaacagtctgtaaatgacattttaagatgcaaatttaattctgttcacagctgatttatactgatttttgctgccttcaaaatactcttttacttcttttagctaaaatggttgtctttcatttgccatagaattccaaacaatactatcttataaaatagtactgttgaattattccaagcctccctaggtttgctctcaaatgtcatttacagattgggctaacgacctaaaatctatatataaagactttctgaagaactctgtattatagcaataccaaacgagtgctgtgtgtgcaaacagtctggcgttgctttttatgttgatatttatcctagaacactgaaagagaatatgccagtgataactcactttacttcagtcatttcaacacagaaaatgcttctctagcatttttcttttgtagtgttaacattttgaaattcatgtttcagaggcttcatcatcacagaatttactcttgctccatgaaaaaaaattaaataccttcagaggaatatttaagttgtaaactatgaaacttgagaaatcctcttgagataaaaggctgccaaatccagtattataaagtccatggtcatatgtgcctgtgcattaaaggaataccagatctatgcagtatacatttttcaggctgaaattcaaggggaatcattctgattattcttactacaaatggagatggctattatgaaacagcatgagcatgagccttttatcttttatacttagtgatatactttgcttgaaaatcactcagcaaagtagttcacatgatgtgtatcatatttgaagtgtggtttttctcaaaatcattgactttaaggagctcatttctgaacaaaaaggtttgctctgtggaaaaatcaatcactgccaggattctttcatttctgtactattttgtataattgaatttgttcacttctctcacaccagcaagtgttttacaggtgccttggattaaaacaaaattgattttaaaatttttatgtaagtcattgtgtctatgatgccacttttaaaaggaaaatgcaattgcgtaatggcttatatccttatttaatgtacctatttgtgttctaataattgtttgaatgttttattcagcttaaaactttaccatgaagtcataaacagtaaacaatgttttgttatgtattaaggggatatcagtgtttctcaaagtatgatccatggaccatctgggtcatggcgcctggtttcagacaacctgaatcaaatcttaggggtggggctttgggatgtcattgttcaataggcacctcaggagattctgagcacaccaatgtttgagaaccactaaaatgaggagtgggaaaaaaaaaataggtgttttgttaatttagagctgagctgagaagataatatatttttattgtcaatgacattaacagatatgcactgattcttttatacctacaatttacttaatgttccttttattaaaacgcgtggttcatgagcaactacagactgaatccagattattacctgttgctttcagtattttcgtgatggcttttaatcttatgaaatcatcttgagatcattcatggtcaagccatgaaaactcccatcttcaagcctgcctgctaaagcttctttgccttcctgattgtgattatggtaacaatttatatcagacagttgtactttttgataacttagggaaaacagaaatgacttgaacaagggattgcctgcctcactgcattgcagagatacaatttttgtaaagaacacaaatagcagttgtgaatattaaggtgtgattatctttccctgtccatgtgcttattgaaagaagatagtgaacaaatgattatattgaggatttttttaatttataagatctaatgtgaaatccacacttggaactttttagatctgtctgttgcttgtttaatatatttcttttatgacattacttaaagtttaaaagggttttctatccactgtcaatttcaattggataacattttgtcaagttttttttttcctgattatttgatgctagctggaattcaagaaatggcattgaccttattcaaataaagaaatattttagtaaa

SEQ ID NO: 52121 - DNA, 2508 bp, Homo sapiens
catgatctgaggatttaaattcacaaaacctgcaatttgacgctgaatttacatgctgtagtaaagggagcatgtaaattcagctcaaattgcatgatctgaggatttaaattcacaaaacctgccactacattctggtttacattagttacttcatgctggctggggttagtgaccatttgcatactcttttaaatcaaggaggctgtagtagaagcagttttaagattcttgaaggcaaaatttgaaaaacagtgaatacttctaattgtttccttttagtgccagaactaaggacattgtgaagcacttgttagtaaacttaaccttgaaatgtcagactggaaggagtttttatagtctttgtgcatacttctaggtattacagaaacagtctgtaaatgacattttaagatgcaaatttaattctgttcacagctgatttatactgatttttgctgccttcaaaatactcttttacttcttttagctaaaatggttgtctttcatttgccatagaattccaaacaatactatcttataaaatagtactgttgaattattccaagcctccctaggtttgctctcaaatgtcatttacagattgggctaacgacctaaaatctatatataaagactttctgaagaactctgtattatagcaataccaaacgagtgctgtgtgtgcaaacagtctggcgttgctttttatgttgatatttatcctagaacactgaaagagaatatgccagtgataactcactttacttcagtcatttcaacacagaaaatgcttctctagcatttttcttttgtagtgttaacattttgaaattcatgtttcagaggcttcatcatcacagaatttactcttgctccatgaaaaaaaattaaataccttcagaggaatatttaagttgtaaactatgaaacttgagaaatcctcttgagataaaaggctgccaaatccagtattataaagtccatggtcatatgtgcctgtgcattaaaggaataccagatctatgcagtatacatttttcaggctgaaattcaaggggaatcattctgattattcttactacaaatggagatggctattatgaaacagcatgagcatgagccttttatcttttatacttagtgatatactttgcttgaaaatcactcagcaaagtagttcacatgatgtgtatcatatttgaagtgtggtttttctcaaaatcattgactttaaggagctcatttctgaacaaaaaggtttgctctgtggaaaaatcaatcactgccaggattctttcatttctgtactattttgtataattgaatttgttcacttctctcacaccagcaagtgttttacaggtgccttggattaaaacaaaattgattttaaaatttttatgtaagtcattgtgtctatgatgccacttttaaaaggaaaatgcaattgcgtaatggcttatatccttatttaatgtacctatttgtgttctaataattgtttgaatgttttattcagcttaaaactttaccatgaagtcataaacagtaaacaatgttttgttatgtattaaggggatatcagtgtttctcaaagtatgatccatggaccatctgggtcatggcgcctggtttcagacaacctgaatcaaatcttaggggtggggctttgggatgtcattgttcaataggcacctcaggagattctgagcacaccaatgtttgagaaccactaaaatgaggagtgggaaaaaaaaaataggtgttttgttaatttagagctgagctgagaagataatatatttttattgtcaatgacattaacagatatgcactgattcttttatacctacaatttacttaatgttccttttattaaaacgcgtggttcatgagcaactacagactgaatccagattattacctgttgctttcagtattttcgtgatggcttttaatcttatgaaatcatcttgagatcattcatggtcaagccatgaaaactcccatcttcaagcctgcctgctaaagcttctttgccttcctgattgtgattatggtaacaatttatatcagacagttgtactttttgataacttagggaaaacagaaatgacttgaacaagggattgcctgcctcactgcattgcagagatacaatttttgtaaagaacacaaatagcagttgtgaatattaaggtgtgattatctttccctgtccatgtgcttattgaaagaagatagtgaacaaatgattatattgaggatttttttaatttataagatctaatgtgaaatccacacttggaactttttagatctgtctgttgcttgtttaatatatttcttttatgacattacttaaagtttaaaagggttttctatccactgtcaatttcaattggataacattttgtcaagttttttttttcctgattatttgatgctagctggaattcaagaaatggcattgaccttattcaaataaagaaatattttagtaaa

SEQ ID NO: 52122 - DNA, 1591 bp, Homo sapiens
tgagcactgagcctccttgaatttcagcctgaaaaatgtatgctgccaaatccagtattataaagtccatggtcatatgtgcctgtgcattaaaggaataccagatctatgcagtatacatttttcaggctgaaattcaaggggaatcattctgattattcttactacaaatggagatggctattatgaaacagcatgagcatgagccttttatcttttatacttagtgatatactttgcttgaaaatcactcagcaaagtagttcacatgatgtgtatcatatttgaagtgtggtttttctcaaaatcattgactttaaggagctcatttctgaacaaaaaggtttgctctgtggaaaaatcaatcactgccaggattctttcatttctgtactattttgtataattgaatttgttcacttctctcacaccagcaagtgttttacaggtgccttggattaaaacaaaattgattttaaaatttttatgtaagtcattgtgtctatgatgccacttttaaaaggaaaatgcaattgcgtaatggcttatatccttatttaatgtacctatttgtgttctaataattgtttgaatgttttattcagcttaaaactttaccatgaagtcataaacagtaaacaatgttttgttatgtattaaggggatatcagtgtttctcaaagtatgatccatggaccatctgggtcatggcgcctggtttcagacaacctgaatcaaatcttaggggtggggctttgggatgtcattgttcaataggcacctcaggagattctgagcacaccaatgtttgagaaccactaaaatgaggagtgggaaaaaaaaaataggtgttttgttaatttagagctgagctgagaagataatatatttttattgtcaatgacattaacagatatgcactgattcttttatacctacaatttacttaatgttccttttattaaaacgcgtggttcatgagcaactacagactgaatccagattattacctgttgctttcagtattttcgtgatggcttttaatcttatgaaatcatcttgagatcattcatggtcaagccatgaaaactcccatcttcaagcctgcctgctaaagcttctttgccttcctgattgtgattatggtaacaatttatatcagacagttgtactttttgataacttagggaaaacagaaatgacttgaacaagggattgcctgcctcactgcattgcagagatacaatttttgtaaagaacacaaatagcagttgtgaatattaaggtgtgattatctttccctgtccatgtgcttattgaaagaagatagtgaacaaatgattatattgaggatttttttaatttataagatctaatgtgaaatccacacttggaactttttagatctgtctgttgcttgtttaatatatttcttttatgacattacttaaagtttaaaagggttttctatccactgtcaatttcaattggataacattttgtcaagttttttttttcctgattatttgatgctagctggaattcaagaaatggcattgaccttattcaaataaagaaatattttagtaaa

SEQ ID NO: 52123 - DNA, 899 bp, Homo sapiens
agtcccatcaggatggctataataaaaaacaaaaaaacagaaaacaagtattggtgaggatgtggagaaactggagaccttgtgcattgctgatgggagcaagactggaccaatgtttgagaaccactaaaatgaggagtgggaaaaaaaaaataggtgttttgttaatttagagctgagctgagaagataatatatttttattgtcaatgacattaacagatatgcactgattcttttatacctacaatttacttaatgttccttttattaaaacgcgtggttcatgagcaactacagactgaatccagattattacctgttgctttcagtattttcgtgatggcttttaatcttatgaaatcatcttgagatcattcatggtcaagccatgaaaactcccatcttcaagcctgcctgctaaagcttctttgccttcctgattgtgattatggtaacaatttatatcagacagttgtactttttgataacttagggaaaacagaaatgacttgaacaagggattgcctgcctcactgcattgcagagatacaatttttgtaaagaacacaaatagcagttgtgaatattaaggtgtgattatctttccctgtccatgtgcttattgaaagaagatagtgaacaaatgattatattgaggatttttttaatttataagatctaatgtgaaatccacacttggaactttttagatctgtctgttgcttgtttaatatatttcttttatgacattacttaaagtttaaaagggttttctatccactgtcaatttcaattggataacattttgtcaagttttttttttcctgattatttgatgctagctggaattcaagaaatggcattgaccttattcaaataaagaaatattttagtaaa

SEQ ID NO: 52124 - DNA, 425 bp, Homo sapiens
gtcagactggtcagtggaatgcagcaccctggctctgctggaggcgtctatgagacaacacagcacttcattgacatcaaagagcacctgcacatagtaaagagggacatagataacttagtgcagcgaaatatggtaactttgtttccttttccttttataattataatctttaggaaaggaagaactcatactctactgcaagtattttaaccctttagttaatgctaatgcttatttttaatgtttaaggtagaattgtcccatttattgcagatctccatgtgtcctggttttctagttattgaaggtggaagaacagttcccatagcagtcatggttttttaatatgtaatatttatattatcatttcgtgaaaatattttctgatttccatgttaatgtcttctctgacccatggattg

SEQ ID NO: 52125 - DNA, 592 bp, Homo sapiens
ccagaactaccaccatttccatcatgtttgtctacggtccacttcattatatttgttgtggtgcaaactgtattattcattggttatatcatgtataggtaagtctcttgataaaatgtgacccaatatttttctgcatctgtttaattagaaatattcaactaagttatctatgttcataatacaattttcaccacctataaaattaagtttattgtgatttctgttcatttcagttcacataaagtgcacgtgtagaatatatgtttatcttaatgcgttgtatacttcaaaaggcattgatattttaattttaaatagtcctgtttctttccaaagttaagcgtatagaacttctttaagtgtttgtttctttttttcattaggtctcagcaagaagcagctgccaaaaaattcttttgactaccattttcctgtgtacttcatctatttgtgtacaaaatgatgtcgttttgagggaatttaagtatttaaattgcttcatagtctaaattattaattttcttaataaaataactgtttaaacattgatttgcagttaagaataaaccttaaagcaaagacaaccaca

SEQ ID NO: 52126 - DNA, 5049 bp, Homo sapiens
ctcctccgcgttccagaatccaagatggcgggatccaggcaaaggggtctccgggccagagttcggccgctgttctgcgccttgctgctgtcactcggtcgcttcgtccggggcgacggcgtgggaggagaccccgcggtcgcgttgccacatcgccgtttcgagtacaaatacagcttcaaggggccgcacctggtgcagagcgacgggaccgtgcccttctgggcccacgcggggaatgctattccaagttcagatcaaattcgagtagcaccatctttaaaaagccaaagaggctcagtgtggacaaagacaaaagcggcctttgagaactgggaagttgaggtgacatttcgagtgactggaagaggtcggattggagctgatggcctagcaatttggtatgcagaaaatcaaggcttggagggccctgtgtttggatcagctgatctgtggaatggtgttggaatattttttgattcttttgacaatgatggaaagaaaaataatcctgctatagtaattataggcaacaatggacaaatccattatgaccatcaaaatgacggggctagtcaagctttggcaagttgccagagggacttccgcaacaaaccctatcctgtccgagcaaagattacctattaccagaacacactgacagtaatgatcaataatggctttacaccagataaaaatgattatgaattttgtgccaaagtgggaaaatatgattatccctgcacaagggcattttggaatatctgctgcaactggaggtcttgcagatgaccatgatgtcctttcttttctgactttccagttgactgaacctggaaaagagccgcccacaccagataaagaaatttcggaaaaggaaaaagaaaagtatcaggaggaatttgagcactttcaacaagaattggataaaaaaaaagaggaattccagaagggccaccccgacctccaagggcagcctgcggaggaaatatttgagagtgtaggagatcgagagctaagacaagtctttgaaggacagaatcgtattcatcttgaaatcaagcagctgaaccggcagttagatatgattcttgatgaacagagaagatatgtctcttccttaacagaggaaatctctaaaagaggagcaggaatgcctgggcagcatgggcagattactcaacaagaactggatactgttgtgaaaactcagcatgagattctgagacaagtaaatgaaatgaaaaattccatgagtgaaaccgtcagactggtcagtggaatgcagcaccctggctctgctggaggcgtctatgagacaacacagcacttcattgacatcaaagagcacctgcacatagtaaagagggacatagataacttagtgcagcgaaatatgccatcaaatgaaaagccgaaatgcccagaactaccaccatttccatcatgtttgtctacggtccacttcattatatttgttgtggtgcaaactgtattattcattggttatatcatgtataggtctcagcaagaagcagctgccaaaaaattcttttgactaccattttcctgtgtacttcatctatttgtgtacaaaatgatgtcgttttgagggaatttaagtatttaaattgcttcatagtctaaattattaattttcttaataaaataactgtttaaacattgatttgcagttaagaataaaccttaaagcaaagacaaccacattttaatttgttcacagtatgtaaatctgtctaaatttcagtgaatttctggtcagtatgatgcagcctctgagcagaatattgaccagtaagagggtaaataaagtgggggcaacccctggatatgaatgttaccccctaagtctccaatattgcaggtttccctgtataacgtaaacacacttgccctcatgcctcccagaatatgaggtctaattaagaagtcccatcaggtttattttgtaaccaaagtcttttttagaggtcagacttcctaatcaaaggcctgggcctgcagtcctttcatcttaatgcaacttcctttgaaatcaaagaatattttgtctgagagctttaaggatctggtaatagacttcaaaatgttaagtgaaatttttttttcctctatttatcaatgatatatttcacttttaaaggaaattttagaggaaaattaatagctgctttttgcctaaaaaaccttgtgggtggaaacattcctctgagaatggcttttataggtattttgcctggtaatgtattcattcatgattgcccatattcttgaatgtcttcattccaatggggtcaggtcaatattatgaaaataatttttatatttatatttgtaacttaaggaatttatttctccctttactacagcatgtaaattcagctcaaattgcatgatctgaggatttaaattcacaaaacctgccactacattctggtttacattagttacttcatgctggctggggttagtgaccatttgcatactcttttaaatcaaggaggctgtagtagaagcagttttaagattcttgaaggcaaaatttgaaaaacagtgaatacttctaattgtttccttttagtgccagaactaaggacattgtgaagcacttgttagtaaacttaaccttgaaatgtcagactggaaggagtttttatagtctttgtgcatacttctaggtattacagaaacagtctgtaaatgacattttaagatgcaaatttaattctgttcacagctgatttatactgatttttgctgccttcaaaatactcttttacttcttttagctaaaatggttgtctttcatttgccatagaattccaaacaatactatcttataaaatagtactgttgaattattccaagcctccctaggtttgctctcaaatgtcatttacagattgggctaacgacctaaaatctatatataaagactttctgaagaactctgtattatagcaataccaaacgagtgctgtgtgtgcaaacagtctggcgttgctttttatgttgatatttatcctagaacactgaaagagaatatgccagtgataactcactttacttcagtcatttcaacacagaaaatgcttctctagcatttttcttttgtagtgttaacattttgaaattcatgtttcagaggcttcatcatcacagaatttactcttgctccatgaaaaaaaattaaataccttcagaggaatatttaagttgtaaactatgaaacttgagaaatcctcttgagataaaaggctgccaaatccagtattataaagtccatggtcatatgtgcctgtgcattaaaggaataccagatctatgcagtatacatttttcaggctgaaattcaaggggaatcattctgattattcttactacaaatggagatggctattatgaaacagcatgagcatgagccttttatcttttatacttagtgatatactttgcttgaaaatcactcagcaaagtagttcacatgatgtgtatcatatttgaagtgtggtttttctcaaaatcattgactttaaggagctcatttctgaacaaaaaggtttgctctgtggaaaaatcaatcactgccaggattctttcatttctgtactattttgtataattgaatttgttcacttctctcacaccagcaagtgttttacaggtgccttggattaaaacaaaattgattttaaaatttttatgtaagtcattgtgtctatgatgccacttttaaaaggaaaatgcaattgcgtaatggcttatatccttatttaatgtacctatttgtgttctaataattgtttgaatgttttattcagcttaaaactttaccatgaagtcataaacagtaaacaatgttttgttatgtattaaggggatatcagtgtttctcaaagtatgatccatggaccatctgggtcatggcgcctggtttcagacaacctgaatcaaatcttaggggtggggctttgggatgtcattgttcaataggcacctcaggagattctgagcacaccaatgtttgagaaccactaaaatgaggagtgggaaaaaaaaaataggtgttttgttaatttagagctgagctgagaagataatatatttttattgtcaatgacattaacagatatgcactgattcttttatacctacaatttacttaatgttccttttattaaaacgcgtggttcatgagcaactacagactgaatccagattattacctgttgctttcagtattttcgtgatggcttttaatcttatgaaatcatcttgagatcattcatggtcaagccatgaaaactcccatcttcaagcctgcctgctaaagcttctttgccttcctgattgtgattatggtaacaatttatatcagacagttgtactttttgataacttagggaaaacagaaatgacttgaacaagggattgcctgcctcactgcattgcagagatacaatttttgtaaagaacacaaatagcagttgtgaatattaaggtgtgattatctttccctgtccatgtgcttattgaaagaagatagtgaacaaatgattatattgaggatttttttaatttataagatctaatgtgaaatccacacttggaactttttagatctgtctgttgcttgtttaatatatttcttttatgacattacttaaagtttaaaagggttttctatccactgtcaatttcaattggataacattttgtcaagttttttttttcctgattatttgatgctagctggaattcaagaaatggcattgaccttattcaaataaagaaatattttagtaaatttgctttttccttcattgatcttggataataagttgccatttgtttttcagacacaacctgtattgtgatagcatttcatttatcacatgctttaggctctgcccgaggtggcctgctgcatgcagaggcagtacatggaagcatgccacgagaacatagaaatggtcatggataactgtttacccttgctggtaatgaaaaatacaaactaattaaaac

SEQ ID NO: 52127 - DNA, 4647 bp, Homo sapiens
ctcctccgcgttccagaatccaagatggcgggatccaggcaaaggggtctccgggccagagttcggccgctgttctgcgccttgctgctgtcactcggtcgcttcgtccggggcgacggcgtgggaggagaccccgcggtcgcgttgccacatcgccgtttcgagtacaaatacagcttcaaggggccgcacctggtgcagagcgacgggaccgtgcccttctgggcccacgcggggaatgctattccaagttcagatcaaattcgagtagcaccatctttaaaaagccaaagaggctcagtgtggacaaagacaaaagcggcctttgagaactgggaagttgaggtgacatttcgagtgactggaagaggtcggattggagctgatggcctagcaatttggtatgcagaaaatcaaggcttggagggccctgtgtttggatcagctgatctgtggaatggtgttggaatattttttgattcttttgacaatgatggaaagaaaaataatcctgctatagtaattataggcaacaatggacaaatccattatgaccatcaaaatgacggggctagtcaagctttggcaagttgccagagggacttccgcaacaaaccctatcctgtccgagcaaagattacctattaccagaacacactgacagtaatgatcaataatggctttacaccagataaaaatgattatgaattttgtgccaaagtgggaaaatatgattatccctgcacaagggcattttggaatatctgctgcaactggaggtcttgcagatgaccatgatgtcctttcttttctgactttccagttgactgaacctggaaaagagccgcccacaccagataaagaaatttcggaaaaggaaaaagaaaagtatcaggaggaatttgagcactttcaacaagaattggataaaaaaaaagaggaattccagaagggccaccccgacctccaagggcagcctgcggaggaaatatttgagagtgtaggagatcgagagctaagacaagtctttgaaggacagaatcgtattcatcttgaaatcaagcagctgaaccggcagttagatatgattcttgatgaacagagaagatatgtctcttccttaacagaggaaatctctaaaagaggagcaggaatgcctgggcagcatgggcagattactcaacaagaactggatactgttgtgaaaactcagcatgagattctgagacaagtaaatgaaatgaaaaattccatgagtgaaaccgtcagactggtcagtggaatgcagcaccctggctctgctggaggcgtctatgagacaacacagcacttcattgacatcaaagagcacctgcacatagtaaagagggacatagataacttagtgcagcgaaatatgccatcaaatgaaaagccgaaatgcccagaactaccaccatttccatcatgtttgtctacggtccacttcattatatttgttgtggtgcaaactgtattattcattggttatatcatgtataggtctcagcaagaagcagctgccaaaaaattcttttgactaccattttcctgtgtacttcatctatttgtgtacaaaatgatgtcgttttgagggaatttaagtatttaaattgcttcatagtctaaattattaattttcttaataaaataactgtttaaacattgatttgcagttaagaataaaccttaaagcaaagacaaccacattttaatttgttcacagtatgtaaatctgtctaaatttcagtgaatttctggtcagtatgatgcagcctctgagcagaatattgaccagtaagagggtaaataaagtgggggcaacccctggatatgaatgttaccccctaagtctccaatattgcaggtttccctgtataacgtaaacacacttgccctcatgcctcccagaatatgaggtctaattaagaagtcccatcaggtttattttgtaaccaaagtcttttttagaggtcagacttcctaatcaaaggcctgggcctgcagtcctttcatcttaatgcaacttcctttgaaatcaaagaatattttgtctgagagctttaaggatctggtaatagacttcaaaatgttaagtgaaatttttttttcctctatttatcaatgatatatttcacttttaaaggaaattttagaggaaaattaatagctgctttttgcctaaaaaaccttgtgggtggaaacattcctctgagaatggcttttataggtattttgcctggtaatgtattcattcatgattgcccatattcttgaatgtcttcattccaatggggtcaggtcaatattatgaaaataatttttatatttatatttgtaacttaaggaatttatttctccctttactacagcatgtaaattcagctcaaattgcatgatctgaggatttaaattcacaaaacctgccactacattctggtttacattagttacttcatgctggctggggttagtgaccatttgcatactcttttaaatcaaggaggctgtagtagaagcagttttaagattcttgaaggcaaaatttgaaaaacagtgaatacttatactgatttttgctgccttcaaaatactcttttacttcttttagctaaaatggttgtctttcatttgccatagaattccaaacaatactatcttataaaatagtactgttgaattattccaagcctccctaggtttgctctcaaatgtcatttacagattgggctaacgacctaaaatctatatataaagactttctgaagaactctgtattatagcaataccaaacgagtgctgtgtgtgcaaacagtctggcgttgctttttatgttgatatttatcctagaacactgaaagagaatatgccagtgataactcactttacttcagtcatttcaacacagaaaatgcttctctagcatttttcttttgtagtgttaacattttgaaattcatgtttcagaggcttcatcatcacagaatttactcttgctccatgaaaaaaaattaaataccttcagaggaatatttaagttgtaaactatgaaacttgagaaatcctcttgagataaaaggctgccaaatccagtattataaagtccatggtcatatgtgcctgtgcattaaaggaataccagatctatgcagtatacatttttcaggctgaaattcaaggggaatcattctgattattcttactacaaatggagatggctattatgaaacagcatgagcatgagccttttatcttttatacttagtgatatactttgcttgaaaatcactcagcaaagtagttcacatgatgtgtatcatatttgaagtgtggtttttctcaaaatcattgactttaaggagctcatttctgaacaaaaaggtttgctctgtggaaaaatcaatcactgccaggattctttcatttctgtactattttgtataattgaatttgttcacttctctcacaccagcaagtgttttacaggtgccttggattaaaacaaaattgattttaaaatttttatgtaagtcattgtgtctatgatgccacttttaaaaggaaaatgcaattgcgtaatggcttatatccttatttaatgtacctatttgtgttctaataattgtttgaatgttttattcagcttaaaactttaccatgaagtcataaacagtaaacaatgttttgttatgtattaaggggatatcagtgtttctcaaagtatgatccatggaccatctgggtcatggcgcctggtttcagacaacctgaatcaaatcttaggggtggggctttgggatgtcattgttcaataggcacctcaggagattctgagcacaccaatgtttgagaaccactaaaatgaggagtgggaaaaaaaaaataggtgttttgttaatttagagctgagctgagaagataatatatttttattgtcaatgacattaacagatatgcactgattcttttatacctacaatttacttaatgttccttttattaaaacgcgtggttcatgagcaactacagactgaatccagattattacctgttgctttcagtattttcgtgatggcttttaatcttatgaaatcatcttgagatcattcatggtcaagccatgaaaactcccatcttcaagcctgcctgctaaagcttctttgccttcctgattgtgattatggtaacaatttatatcagacagttgtactttttgataacttagggaaaacagaaatgacttgaacaagggattgcctgcctcactgcattgcagagatacaatttttgtaaagaacacaaatagcagttgtgaatattaaggtgtgattatctttccctgtccatgtgcttattgaaagaagatagtgaacaaatgattatattgaggatttttttaatttataagatctaatgtgaaatccacacttggaactttttagatctgtctgttgcttgtttaatatatttcttttatgacattacttaaagtttaaaagggttttctatccactgtcaatttcaattggataacattttgtcaagttttttttttcctgattatttgatgctagctggaattcaagaaatggcattgaccttattcaaataaagaaatattttagtaaa

SEQ ID NO: 52128 - DNA, 4782 bp, Homo sapiens
ctcctccgcgttccagaatccaagatggcgggatccaggcaaaggggtctccgggccagagttcggccgctgttctgcgccttgctgctgtcactcggtcgcttcgtccggggcgacggcgtgggaggagaccccgcggtcgcgttgccacatcgccgtttcgagtacaaatacagcttcaaggggccgcacctggtgcagagcgacgggaccgtgcccttctgggcccacgcggggaatgctattccaagttcagatcaaattcgagtagcaccatctttaaaaagccaaagaggctcagtgtggacaaagacaaaagcggcctttgagaactgggaagttgaggtgacatttcgagtgactggaagaggtcggattggagctgatggcctagcaatttggtatgcagaaaatcaaggcttggagggccctgtgtttggatcagctgatctgtggaatggtgttggaatattttttgattcttttgacaatgatggaaagaaaaataatcctgctatagtaattataggcaacaatggacaaatccattatgaccatcaaaatgacggggctagtcaagctttggcaagttgccagagggacttccgcaacaaaccctatcctgtccgagcaaagattacctattaccagaacacactgacagtaatgatcaataatggctttacaccagataaaaatgattatgaattttgtgccaaagtgggaaaatatgattatccctgcacaagggcattttggaatatctgctgcaactggaggtcttgcagatgaccatgatgtcctttcttttctgactttccagttgactgaacctggaaaagagccgcccacaccagataaagaaatttcggaaaaggaaaaagaaaagtatcaggaggaatttgagcactttcaacaagaattggataaaaaaaaagaggaattccagaagggccaccccgacctccaagggcagcctgcggaggaaatatttgagagtgtaggagatcgagagctaagacaagtctttgaaggacagaatcgtattcatcttgaaatcaagcagctgaaccggcagttagatatgattcttgatgaacagagaagatatgtctcttccttaacagaggaaatctctaaaagaggagcaggaatgcctgggcagcatgggcagattactcaacaagaactggatactgttgtgaaaactcagcatgagattctgagacaagtaaatgaaatgaaaaattccatgagtgaaaccgtcagactggtcagtggaatgcagcaccctggctctgctggaggcgtctatgagacaacacagcacttcattgacatcaaagagcacctgcacatagtaaagagggacatagataacttagtgcagcgaaatatgccatcaaatgaaaagccgaaatgcccagaactaccaccatttccatcatgtttgtctacggtccacttcattatatttgttgtggtgcaaactgtattattcattggttatatcatgtataggtctcagcaagaagcagctgccaaaaaattcttttgactaccattttcctgtgtacttcatctatttgtgtacaaaatgatgtcgttttgagggaatttaagtatttaaattgcttcatagtctaaattattaattttcttaataaaataactgtttaaacattgatttgcagttaagaataaaccttaaagcaaagacaaccacattttaatttgttcacagtatgtaaatctgtctaaatttcagtgaatttctggtcagtatgatgcagcctctgagcagaatattgaccagtaagagggtaaataaagtgggggcaacccctggatatgaatgttaccccctaagtctccaatattgcaggtttccctgtataacgtaaacacacttgccctcatgcctcccagaatatgaggtctaattaagaagtcccatcaggtttattttgtaaccaaagtcttttttagaggtcagacttcctaatcaaaggcctgggcctgcagtcctttcatcttaatgcaacttcctttgaaatcaaagaatattttgtctgagagctttaaggatctggtaatagacttcaaaatgttaagtgaaatttttttttcctctatttatcaatgatatatttcacttttaaaggaaattttagaggaaaattaatagctgctttttgcctaaaaaaccttgtgggtggaaacattcctctgagaatggcttttataggtattttgcctggtaatgtattcattcatgattgcccatattcttgaatgtcttcattccaatggggtcaggtcaatattatgaaaataatttttatatttatatttgtaacttaaggaatttatttctccctttactacagcatgtaaattcagctcaaattgcatgatctgaggatttaaattcacaaaacctgccactacattctggtttacattagttacttcatgctggctggggttagtgaccatttgcatactcttttaaatcaaggaggctgtagtagaagcagttttaagattcttgaaggcaaaatttgaaaaacagtgaatacttctaattgtttccttttagtgccagaactaaggacattgtgaagcacttgttagtaaacttaaccttgaaatgtcagactggaaggagtttttatagtctttgtgcatacttctaggtattacagaaacagtctgtaaatgacattttaagatgcaaatttaattctgttcacagctgatttatactgatttttgctgccttcaaaatactcttttacttcttttagctaaaatggttgtctttcatttgccatagaattccaaacaatactatcttataaaatagtactgttgaattattccaagcctccctaggtttgctctcaaatgtcatttacagattgggctaacgacctaaaatctatatataaagactttctgaagaactctgtattatagcaataccaaacgagtgctgtgtgtgcaaacagtctggcgttgctttttatgttgatatttatcctagaacactgaaagagaatatgccagtgataactcactttacttcagtcatttcaacacagaaaatgcttctctagcatttttcttttgtagtgttaacattttgaaattcatgtttcagaggcttcatcatcacagaatttactcttgctccatgaaaaaaaattaaataccttcagaggaatatttaagttgtaaactatgaaacttgagaaatcctcttgagataaaaggctgccaaatccagtattataaagtccatggtcatatgtgcctgtgcattaaaggaataccagatctatgcagtatacatttttcaggctgaaattcaaggggaatcattctgattattcttactacaaatggagatggctattatgaaacagcatgagcatgagccttttatcttttatacttagtgatatactttgcttgaaaatcactcagcaaagtagttcacatgatgtgtatcatatttgaagtgtggtttttctcaaaatcattgactttaaggagctcatttctgaacaaaaaggtttgctctgtggaaaaatcaatcactgccaggattctttcatttctgtactattttgtataattgaatttgttcacttctctcacaccagcaagtgttttacaggtgccttggattaaaacaaaattgattttaaaatttttatgtaagtcattgtgtctatgatgccacttttaaaaggaaaatgcaattgcgtaatggcttatatccttatttaatgtacctatttgtgttctaataattgtttgaatgttttattcagcttaaaactttaccatgaagtcataaacagtaaacaatgttttgttatgtattaaggggatatcagtgtttctcaaagtatgatccatggaccatctgggtcatggcgcctggtttcagacaacctgaatcaaatcttaggggtggggctttgggatgtcattgttcaataggcacctcaggagattctgagcacaccaatgtttgagaaccactaaaatgaggagtgggaaaaaaaaaataggtgttttgttaatttagagctgagctgagaagataatatatttttattgtcaatgacattaacagatatgcactgattcttttatacctacaatttacttaatgttccttttattaaaacgcgtggttcatgagcaactacagactgaatccagattattacctgttgctttcagtattttcgtgatggcttttaatcttatgaaatcatcttgagatcattcatggtcaagccatgaaaactcccatcttcaagcctgcctgctaaagcttctttgccttcctgattgtgattatggtaacaatttatatcagacagttgtactttttgataacttagggaagagatacaatttttgtaaagaacacaaatagcagttgtgaatattaaggtgtgattatctttccctgtccatgtgcttattgaaagaagatagtgaacaaatgattatattgaggatttttttaatttataagatctaatgtgaaatccacacttggaactttttagatctgtctgttgcttgtttaatatatttcttttatgacattacttaaagtttaaaagggttttctatccactgtcaatttcaattggataacattttgtcaagttttttttttcctgattatttgatgctagctggaattcaagaaatggcattgaccttattcaaataaagaaatattttagtaaa

SEQ ID NO: 52129 - DNA, 4566 bp, Homo sapiens
tcttgcttacctgcatgtagcaaagcccagacatcaagcatggtgggtgcagactgtccgtgtgacccaacaccgtgaggctgtgagccctggcagcactccaaaacaatagccttgcaaaacgtactccccagaaagggttccacaattgatgagattggtcactactctgcatattagcacattaaagatttctttatgaaggatcctttataaagaaaggataaataaacctttattagacctcacatttcccagactgacttaactatggaattttttttcacctaatgtctatgagtgatcatggagctagtgttttcaggtacacgttttgaagagactggctggacacgtgactgctacttattggttttcacctctctgtacatctcagtctggtaatgatcaataatggctttacaccagataaaaatgattatgaattttgtgccaaagtgggaaaatatgattatccctgcacaagggcattttggaatatctgctgcaactggaggtcttgcagatgaccatgatgtcctttcttttctgactttccagttgactgaacctggaaaagagccgcccacaccagataaagaaatttcggaaaaggaaaaagaaaagtatcaggaggaatttgagcactttcaacaagaattggataaaaaaaaagaggaattccagaagggccaccccgacctccaagggcagcctgcggaggaaatatttgagagtgtaggagatcgagagctaagacaagtctttgaaggacagaatcgtattcatcttgaaatcaagcagctgaaccggcagttagatatgattcttgatgaacagagaagatatgtctcttccttaacagaggaaatctctaaaagaggagcaggaatgcctgggcagcatgggcagattactcaacaagaactggatactgttgtgaaaactcagcatgagattctgagacaagtaaatgaaatgaaaaattccatgagtgaaaccgtcagactggtcagtggaatgcagcaccctggctctgctggaggcgtctatgagacaacacagcacttcattgacatcaaagagcacctgcacatagtaaagagggacatagataacttagtgcagcgaaatatgccatcaaatgaaaagccgaaatgcccagaactaccaccatttccatcatgtttgtctacggtccacttcattatatttgttgtggtgcaaactgtattattcattggttatatcatgtataggtctcagcaagaagcagctgccaaaaaattcttttgactaccattttcctgtgtacttcatctatttgtgtacaaaatgatgtcgttttgagggaatttaagtatttaaattgcttcatagtctaaattattaattttcttaataaaataactgtttaaacattgatttgcagttaagaataaaccttaaagcaaagacaaccacattttaatttgttcacagtatgtaaatctgtctaaatttcagtgaatttctggtcagtatgatgcagcctctgagcagaatattgaccagtaagagggtaaataaagtgggggcaacccctggatatgaatgttaccccctaagtctccaatattgcaggtttccctgtataacgtaaacacacttgccctcatgcctcccagaatatgaggtctaattaagaagtcccatcaggtttattttgtaaccaaagtcttttttagaggtcagacttcctaatcaaaggcctgggcctgcagtcctttcatcttaatgcaacttcctttgaaatcaaagaatattttgtctgagagctttaaggatctggtaatagacttcaaaatgttaagtgaaatttttttttcctctatttatcaatgatatatttcacttttaaaggaaattttagaggaaaattaatagctgctttttgcctaaaaaaccttgtgggtggaaacattcctctgagaatggcttttataggtattttgcctggtaatgtattcattcatgattgcccatattcttgaatgtcttcattccaatggggtcaggtcaatattatgaaaataatttttatatttatatttgtaacttaaggaatttatttctccctttactacagcatgtaaattcagctcaaattgcatgatctgaggatttaaattcacaaaacctgccactacattctggtttacattagttacttcatgctggctggggttagtgaccatttgcatactcttttaaatcaaggaggctgtagtagaagcagttttaagattcttgaaggcaaaatttgaaaaacagtgaatacttctaattgtttccttttagtgccagaactaaggacattgtgaagcacttgttagtaaacttaaccttgaaatgtcagactggaaggagtttttatagtctttgtgcatacttctaggtattacagaaacagtctgtaaatgacattttaagatgcaaatttaattctgttcacagctgatttatactgatttttgctgccttcaaaatactcttttacttcttttagctaaaatggttgtctttcatttgccatagaattccaaacaatactatcttataaaatagtactgttgaattattccaagcctccctaggtttgctctcaaatgtcatttacagattgggctaacgacctaaaatctatatataaagactttctgaagaactctgtattatagcaataccaaacgagtgctgtgtgtgcaaacagtctggcgttgctttttatgttgatatttatcctagaacactgaaagagaatatgccagtgataactcactttacttcagtcatttcaacacagaaaatgcttctctagcatttttcttttgtagtgttaacattttgaaattcatgtttcagaggcttcatcatcacagaatttactcttgctccatgaaaaaaaattaaataccttcagaggaatatttaagttgtaaactatgaaacttgagaaatcctcttgagataaaaggctgccaaatccagtattataaagtccatggtcatatgtgcctgtgcattaaaggaataccagatctatgcagtatacatttttcaggctgaaattcaaggggaatcattctgattattcttactacaaatggagatggctattatgaaacagcatgagcatgagccttttatcttttatacttagtgatatactttgcttgaaaatcactcagcaaagtagttcacatgatgtgtatcatatttgaagtgtggtttttctcaaaatcattgactttaaggagctcatttctgaacaaaaaggtttgctctgtggaaaaatcaatcactgccaggattctttcatttctgtactattttgtataattgaatttgttcacttctctcacaccagcaagtgttttacaggtgccttggattaaaacaaaattgattttaaaatttttatgtaagtcattgtgtctatgatgccacttttaaaaggaaaatgcaattgcgtaatggcttatatccttatttaatgtacctatttgtgttctaataattgtttgaatgttttattcagcttaaaactttaccatgaagtcataaacagtaaacaatgttttgttatgtattaaggggatatcagtgtttctcaaagtatgatccatggaccatctgggtcatggcgcctggtttcagacaacctgaatcaaatcttaggggtggggctttgggatgtcattgttcaataggcacctcaggagattctgagcacaccaatgtttgagaaccactaaaatgaggagtgggaaaaaaaaaataggtgttttgttaatttagagctgagctgagaagataatatatttttattgtcaatgacattaacagatatgcactgattcttttatacctacaatttacttaatgttccttttattaaaacgcgtggttcatgagcaactacagactgaatccagattattacctgttgctttcagtattttcgtgatggcttttaatcttatgaaatcatcttgagatcattcatggtcaagccatgaaaactcccatcttcaagcctgcctgctaaagcttctttgccttcctgattgtgattatggtaacaatttatatcagacagttgtactttttgataacttagggaaaacagaaatgacttgaacaagggattgcctgcctcactgcattgcagagatacaatttttgtaaagaacacaaatagcagttgtgaatattaaggtgtgattatctttccctgtccatgtgcttattgaaagaagatagtgaacaaatgattatattgaggatttttttaatttataagatctaatgtgaaatccacacttggaactttttagatctgtctgttgcttgtttaatatatttcttttatgacattacttaaagtttaaaagggttttctatccactgtcaatttcaattggataacattttgtcaagttttttttttcctgattatttgatgctagctggaattcaagaaatggcattgaccttattcaaataaagaaatattttagtaaa

SEQ ID NO: 52130 - DNA, 4577 bp, Homo sapiens
ctcctccgcgttccagaatccaagatggcgggatccaggcaaaggggtctccgggccagagttcggccgctgttctgcgccttgctgctgtcactcggtcgcttcgtccggggcgacggcgtgggaggagaccccgcggtcgcgttgccacatcgccgtttcgagtacaaatacagcttcaaggggccgcacctggtgcagagcgacgggaccgtgcccttctgggcccacgcggggaatgctattccaagttcagatcaaattcgagtagcaccatctttaaaaagccaaagaggctcagtgtggacaaagacaaaagcggcctttgagaactgggaagttgaggtgacatttcgagtgactggaagaggtcggattggagctgatggcctagcaatttggtatgcagaaaatcaaggcttggagggccctgtgtttggatcagctgatctgtggaatggtgttggaatattttttgattcttttgacaatgatggaaagaaaaataatcctgctatagtaattataggcaacaatggacaaatccattatgaccatcaaaatgacggggctagtcaagctttggcaagttgccagagggacttccgcaacaaaccctatcctgtccgagcaaagattacctattaccagaacacactgacagtaatgatcaataatggctttacaccagataaaaatgattatgaattttgtgccaaagtgggaaaatatgattatccctgcacaagggcattttggaatatctgctgcaactggaggtcttgcagatgaccatgatgtcctttcttttctgactttccagttgactgaacctggaaaagagccgcccacaccagataaagaaatttcggaaaaggaaaaagaaaagtatcaggaggaatttgagcactttcaacaagaattggataaaaaaaaagaggaattccagaagggccaccccgacctccaagggcagcctgcggaggaaatatttgagagtgtaggagatcgagagctaagacaagtctttgaaggacagaatcgtattcatcttgaaatcaagcagctgaaccggcagttagatatgattcttgatgaacagagaagatatgtctcttccttaacagaggaaatctctaaaagaggagcaggaatgcctgggcagcatgggcagattactcaacaagaactggatactgttgtgaaaactcagcatgagattctgagacaagtaaatgaaatgaaaaattccatgagtgaaaccgtcagactggtcagtggaatgcagcaccctggctctgctggaggcgtctatgagacaacacagcacttcattgacatcaaagagcacctgcacatagtaaagagggacatagataacttagtgcagcgaaatatgccatcaaatgaaaagccgaaatgcccagaactaccaccatttccatcatgtttgtctacggtccacttcattatatttgttgtggtgcaaactgtattattcattggttatatcatgtataggtctcagcaagaagcagctgccaaaaaattcttttgactaccattttcctgtgtacttcatctatttgtgtacaaaatgatgtcgttttgagggaatttaagtatttaaattgcttcatagtctaaattattaattttcttaataaaataactgtttaaacattgatttgcagttaagaataaaccttaaagcaaagacaaccacattttaatttgttcacagtatgtaaatctgtctaaatttcagtgaatttctggtcagtatgatgcagcctctgagcagaatattgaccagtaagagggtaaataaagtgggggcaacccctggatatgaatgttaccccctaagtctccaatattgcaggtttccctgtataacgtaaacacacttgccctcatgcctcccagaatatgaggtctaattaagaagtcccatcaggtttattttgtaaccaaagtcttttttagaggtcagacttcctaatcaaaggcctgggcctgcagtcctttcatcttaatgcaacttcctttgaaatcaaagaatattttgtctgagagctttaaggatctggtaatagacttcaaaatgttaagtgaaatttttttttcctctatttatcaatgatatatttcacttttaaaggaaattttagaggaaaattaatagctgctttttgcctaaaaaaccttgtgggtggaaacattcctctgagaatggcttttataggtattttgcctggtaatgtattcattcatgattgcccatattcttgaatgtcttcattccaatggggtcaggtcaatattatgaaaataatttttatatttatatttgtaacttaaggaatttatttctccctttactacagcatgtaaattcagctcaaattgcatgatctgaggatttaaattcacaaaacctgccactacattctggtttacattagttacttcatgctggctggggttagtgaccatttgcatactcttttaaatcaaggaggctgtagtagaagcagttttaagattcttgaaggcaaaatttgaaaaacagtgaatacttctaattgtttccttttagtgccagaactaaggacattgtgaagcacttgttagtaaacttaaccttgaaatgtcagactggaaggagtttttatagtctttgtgcatacttctaggtattacagattgggctaacgacctaaaatctatatataaagactttctgaagaactctgtattatagcaataccaaacgagtgctgtgtgtgcaaacagtctggcgttgctttttatgttgatatttatcctagaacactgaaagagaatatgccagtgataactcactttacttcagtcatttcaacacagaaaatgcttctctagcatttttcttttgtagtgttaacattttgaaattcatgtttcagaggcttcatcatcacagaatttactcttgctccatgaaaaaaaattaaataccttcagaggaatatttaagttgtaaactatgaaacttgagaaatcctcttgagataaaaggctgccaaatccagtattataaagtccatggtcatatgtgcctgtgcattaaaggaataccagatctatgcagtatacattttcttactacaaatggagatggctattatgaaacagcatgagcatgagccttttatcttttatacttagtgatatactttgcttgaaaatcactcagcaaagtagttcacatgatgtgtatcatatttgaagtgtggtttttctcaaaatcattgactttaaggagctcatttctgaacaaaaaggtttgctctgtggaaaaatcaatcactgccaggattctttcatttctgtactattttgtataattgaatttgttcacttctctcacaccagcaagtgttttacaggtgccttggattaaaacaaaattgattttaaaatttttatgtaagtcattgtgtctatgatgccacttttaaaaggaaaatgcaattgcgtaatggcttatatccttatttaatgtacctatttgtgttctaataattgtttgaatgttttattcagcttaaaactttaccatgaagtcataaacagtaaacaatgttttgttatgtattaaggggatatcagtgtttctcaaagtatgatccatggaccatctgggtcatggcgcctggtttcagacaacctgaatcaaatcttaggggtggggctttgggatgtcattgttcaataggcacctcaggagattctgagcacaccaatgtttgagaaccactaaaatgaggagtgggaaaaaaaaaataggtgttttgttaatttagagctgagctgagaagataatatatttttattgtcaatgacattaacagatatgcactgattcttttatacctacaatttacttaatgttccttttattaaaacgcgtggttcatgagcaactacagactgaatccagattattacctgttgctttcagtattttcgtgatggcttttaatcttatgaaatcatcttgagatcattcatggtcaagccatgaaaactcccatcttcaagcctgcctgctaaagcttctttgccttcctgattgtgattatggtaacaatttatatcagacagttgtactttttgataacttagggaaaacagaaatgacttgaacaagggattgcctgcctcactgcattgcagagatacaatttttgtaaagaacacaaatagcagttgtgaatattaaggtgtgattatctttccctgtccatgtgcttattgaaagaagatagtgaacaaatgattatattgaggatttttttaatttataagatctaatgtgaaatccacacttggaactttttagatctgtctgttgcttgtttaatatatttcttttatgacattacttaaagtttaaaagggttttctatccactgtcaatttcaattggataacattttgtcaagttttttttttcctgattatttgatgctagctggaattcaagaaatggcattgaccttattcaaataaagaaatattttagtaaa

SEQ ID NO: 52131 - DNA, 887 bp, Homo sapiens
ctcctccgcgttccagaatccaagatggcgggatccaggcaaaggggtctccgggccagagttcggccgctgttctgcgccttgctgctgtcactcggtcgcttcgtccggggcgacggcgtgggaggagaccccgcggtcgcgttgccacatcgccgtttcgagtacaaatacagcttcaaggggccgcacctggtgcagagcgacgggaccgtgcccttctgggcccacgcggggaatgctattccaagttcagatcaaattcgagtagcaccatctttaaaaagccaaagaggctcagtgtggacaaagacaaaagcggcctttgagaactgggaagttgaggtgacatttcgagtgactggaagaggtcggattggagctgatggcctagcaatttggtatgcagaaaatcaaggcttggagggccctgtgtttggatcagctgatctgtggaatggtgttggaatattttttgattcttttgacaatgatggaaagaaaaataatcctgctatagtaattataggcaacaatggacaaatccattatgaccatcaaaatgacggggctagtcaagctttggcaagttgccagagggacttccgcaacaaaccctatcctgtccgagcaaagattacctattaccagaacacactgacagtaatgatcaataatggctttacaccagataaaaatgattatgaattttgtgccaaagtgggaaaatatgattatccctgcacaagggcattttggaatatctgctgcaactggaggtcttgcagatgaccatgatgtcctttcttttctgactttctcgttggcctccgaaagcagcagtctgggttgtttgtccgtccaaaaagtccttgttcttacttata

SEQ ID NO: 52132 - DNA, 245 bp, Homo sapiens
agggggatggcttgagcctgggaggttgaggctgcagtaaaccgagattacgccactgtactctagcctaggtaacaaagtgagaccatgtctccaagaaaaaaataaaagaaaacaaaaaaacttgaatccgtaatttaaagatcttcccatgaagaaaataccaggtctagatggttttgcagaagttcaagtaagggtaactctttaaaaaaaattattattattattttttttagaaatgg

SEQ ID NO: 52133 - DNA, 1707 bp, Homo sapiens
cggggaggctcgttcccatcggcatctgtgactggctgcgatcgagggcccgggcggccggccagccgtctcgccgagtgcggactggccggatctgctgtcagtcagcgggaacagacttctccctctccatctggtcaactgcgggagaaaaattttcgagaatttccagcaggcaaggcagtggccgctttgactgcttgcttcggagatccgagacgacggagaaggcactcttatttaccgaccaagaaagctcctcccccgtcctccgttagctaattaaaacatttttcagggacgtagccatccagagggatttgcttcctaaggagaagaacttggaaactctgttgaccttggcttttctagaaatagataaagccttttcgagtcatgcccgcctgtctgctgatgcaactcttctgacctctgggactactgcaacagtagccctattgcgagatggtattgaactggttgtagccagtgttggggacagccgggctattttgtgtagaaaaggaaaacccatgaagctgaccattgaccatactccagaaagaaaagatgaaaaagaaaggatcaagaaatgtggtggttttgtagcttggaatagtttggggcagcctcacgtaaatggcaggcttgcaatgacaagaagtattggagatttggaccttaagaccagtggtgtcatagcagaacctgaaactaagaggattaagttacatcatgctgatgacagcttcctggtcctcaccacagatggaattaacttcatggtgaatagtcaagagatttgtgactttgtcaatcagtgccatgatcccaacgaagcagcccatgcggtgactgaacaggcaatacagtacggtactgaggataacagtactgcagtagtagtgccttttggtgcctggggaaaatataagaactctgaaatcaacttctcattcagcagaagctttgcctccagtggacgatgggcctgattaccagctgggacttagagtttctgtgcaacagtttttcactgagcatgtcaagaaactgataagatcaaaaaggtctcctaactcactagatcagcgcacaagtcagtgtaaaccacttagatagtagttttttcataaatgctcatcatatttatgttccgctgtacatgttcagtataaatatatgtgtagtgaagctactgtgagtctttaaatggaaagagcaaatgagaagtggtttggatacacttgatgagagatgagagtgtcacattaataatttttaagactcttaggcagctatgggtttcttttgatcatttttgttctttattcatttgaacacgtttttgaagttcttcaaaactagtcagtttgaattttgacagctattcaatatgtgatctccaagtttaaaaaaatttttttccagacttccctaatcctaaaatgcgagtttttatttttaataactgtaccaaggaataagtatgaaaacagttctctgttaccatattttgtattctggaccacttactggtgaaagcaaccatgcaaaagaaattaatttggccaggcacagtggctcatgcctgtaatcccagcactttgagaggccaaggtgggtagatcatctgaggtcaggaattcaagaccagcctggccaacatggtgaaaccctgtctctagtaaaaatccaaaaaaaaaa

SEQ ID NO: 52134 - DNA, 2065 bp, Homo sapiens
ttctttattggcggtcgcggaatggagagtaaacggagaagggtttcccgggaggtcgaaggggagacgtcggtttccgttcccccgccccccgagtcggcgcttggccggcggcctctcggagttctcagagcgtcgctttcttccctttggaggtcgtgagcagctcgtcgggacattccattattgttccattgacctttccctcatcactgagtcctttggagctgagttatgtcaacagctgccttaattactttggtcagaagtggtgggaaccaggtgagaaggagagtgctgctaagctcccgcctgctgcaggacgacaggcgggtgacacccacgtgccacagctccacttcagagcctaggtgttctcggtttgacccagatggtagtgggagtccagctacctgggacaattttgggatctgggataaccgcattgatgagccaattctgctgccacccagcattaagtatggcaagccaattcccaaaatcagcttggaaaatgtggggtgcgcctcacagattggcaaacggaaagagaatgaagatcggtttgacttcgctcagctgacagatgaggtcctgtactttgcagtgtatgatggacacggtggacctgcagcagctgatttctgtcatacccacatggagaaatgtattatggatttgcttcctaaggagaagaacttggaaactctgttgaccttggcttttctagaaatagataaagccttttcgagtcatgcccgcctgtctgctgatgcaactcttctgacctctgggactactgcaacagtagccctattgcgagatggtattgaactggttgtagccagtgttggggacagccgggctattttgtgtagaaaaggaaaacccatgaagctgaccattgaccatactccagaaagaaaagatgaaaaagaaaggatcaagaaatgtggtggttttgtagcttggaatagtttggggcagcctcacgtaaatggcaggcttgcaatgacaagaagtattggagatttggaccttaagaccagtggtgtcatagcagaacctgaaactaagaggattaagttacatcatgctgatgacagcttcctggtcctcaccacagatggaattaacttcatggtgaatagtcaagagatttgtgactttgtcaatcagtgccatgatcccaacgaagcagcccatgcggtgactgaacaggcaatacagtacggtactgaggataacagtactgcagtagtagtgccttttggtgcctggggaaaatataagaactctgaaatcaacttctcattcagcagaagctttgcctccagtggacgatgggcctgattaccagctgggacttagagtttctgtgcaacagtttttcactgagcatgtcaagaaactgataagatcaaaaaggtctcctaactcactagatcagcgcacaagtcagtgtaaaccacttagatagtagttttttcataaatgctcatcatatttatgttccgctgtacatgttcagtataaatatatgtgtagtgaagctactgtgagtctttaaatggaaagagcaaatgagaagtggtttggatacacttgatgagagatgagagtgtcacattaataatttttaagactcttaggcagctatgggtttcttttgatcatttttgttctttattcatttgaacacgtttttgaagttcttcaaaactagtcagtttgaattttgacagctattcaatatgtgatctccaagtttaaaaaaatttttttccagacttccctaatcctaaaatgcgagtttttatttttaataactgtaccaaggaataagtatgaaaacagttctctgttaccatattttgtattctggaccacttactggtgaaagcaaccatgcaaaagaaattaatttggccaggcacagtggctcatgcctgtaatcccagcactttgagaggccaaggtgggtagatcatctgaggtcaggaattcaagaccagcctggccaacatggtgaaaccctgtctctagtaaaaatccaaaaaaaaaa

SEQ ID NO: 52135 - DNA, 1694 bp, Homo sapiens
tgggctcaagtagacctaagtcatcccaccatcatagccaacctaattaaattttaatactttcagtctggacaccagatatccatgaaggtgttgttataagttcaagtcagctctacttgatatgaatagaggccatttgtagatagtgatgcagtgtttgccaaataaggttagcaacctttccgtttgcatggagacttgttactgaattaaatacttgtttctctgcatgctgttacttacatagttcatttgcattttatttgcttagctctagttaaattagaatgatatattccagcattagtttatcatgcttgtgttttattttgtaataaaaattccatatccaatcatttgactgtcactaacttgtactctttttttcataatacttgtagcaactcttctgacctctgggactactgcaacagtagccctattgcgagatggtattgaactggttgtagccagtgttggggacagccgggctattttgtgtagaaaaggaaaacccatgaagctgaccattgaccatactccagaaagaaaagatgaaaaagaaaggatcaagaaatgtggtggttttgtagcttggaatagtttggggcagcctcacgtaaatggcaggcttgcaatgacaagaagtattggagatttggaccttaagaccagtggtgtcatagcagaacctgaaactaagaggattaagttacatcatgctgatgacagcttcctggtcctcaccacagatggaattaacttcatggtgaatagtcaagagatttgtgactttgtcaatcagtgccatgatcccaacgaagcagcccatgcggtgactgaacaggcaatacagtacggtactgaggataacagtactgcagtagtagtgccttttggtgcctggggaaaatataagaactctgaaatcaacttctcattcagcagaagctttgcctccagtggacgatgggcctgattaccagctgggacttagagtttctgtgcaacagtttttcactgagcatgtcaagaaactgataagatcaaaaaggtctcctaactcactagatcagcgcacaagtcagtgtaaaccacttagatagtagttttttcataaatgctcatcatatttatgttccgctgtacatgttcagtataaatatatgtgtagtgaagctactgtgagtctttaaatggaaagagcaaatgagaagtggtttggatacacttgatgagagatgagagtgtcacattaataatttttaagactcttaggcagctatgggtttcttttgatcatttttgttctttattcatttgaacacgtttttgaagttcttcaaaactagtcagtttgaattttgacagctattcaatatgtgatctccaagtttaaaaaaatttttttccagacttccctaatcctaaaatgcgagtttttatttttaataactgtaccaaggaataagtatgaaaacagttctctgttaccatattttgtattctggaccacttactggtgaaagcaaccatgcaaaagaaattaatttggccaggcacagtggctcatgcctgtaatcccagcactttgagaggccaaggtgggtagatcatctgaggtcaggaattcaagaccagcctggccaacatggtgaaaccctgtctctagtaaaaatccaaaaaaaaaa

SEQ ID NO: 52136 - DNA, 1767 bp, Homo sapiens
cggggaggctcgttcccatcggcatctgtgactggctgcgatcgagggcccgggcggccggccagccgtctcgccgagtgcggactggccggatctgctgtcagtcagcgggaacagacttctccctctccatctggtcaactgcgggagaaaaattttcgagaatttccagcaggcaaggcagtggccgctttgactgcttgcttcggagatccgagacgacggagaaggcactcttatttaccgaccaagaaagctcctcccccgtcctccgttagctaattaaaacatttttcagggacgtagccatccagagggatttgcttcctaaggagaagaacttggaaactctgttgaccttggcttttctagaaatagataaagccttttcgagtcatgcccgcctgtctgctgatggactgtggcttattcatttttgaatctccagtgtgcagcaccctgcatagaacctggcagcaactcttctgacctctgggactactgcaacagtagccctattgcgagatggtattgaactggttgtagccagtgttggggacagccgggctattttgtgtagaaaaggaaaacccatgaagctgaccattgaccatactccagaaagaaaagatgaaaaagaaaggatcaagaaatgtggtggttttgtagcttggaatagtttggggcagcctcacgtaaatggcaggcttgcaatgacaagaagtattggagatttggaccttaagaccagtggtgtcatagcagaacctgaaactaagaggattaagttacatcatgctgatgacagcttcctggtcctcaccacagatggaattaacttcatggtgaatagtcaagagatttgtgactttgtcaatcagtgccatgatcccaacgaagcagcccatgcggtgactgaacaggcaatacagtacggtactgaggataacagtactgcagtagtagtgccttttggtgcctggggaaaatataagaactctgaaatcaacttctcattcagcagaagctttgcctccagtggacgatgggcctgattaccagctgggacttagagtttctgtgcaacagtttttcactgagcatgtcaagaaactgataagatcaaaaaggtctcctaactcactagatcagcgcacaagtcagtgtaaaccacttagatagtagttttttcataaatgctcatcatatttatgttccgctgtacatgttcagtataaatatatgtgtagtgaagctactgtgagtctttaaatggaaagagcaaatgagaagtggtttggatacacttgatgagagatgagagtgtcacattaataatttttaagactcttaggcagctatgggtttcttttgatcatttttgttctttattcatttgaacacgtttttgaagttcttcaaaactagtcagtttgaattttgacagctattcaatatgtgatctccaagtttaaaaaaatttttttccagacttccctaatcctaaaatgcgagtttttatttttaataactgtaccaaggaataagtatgaaaacagttctctgttaccatattttgtattctggaccacttactggtgaaagcaaccatgcaaaagaaattaatttggccaggcacagtggctcatgcctgtaatcccagcactttgagaggccaaggtgggtagatcatctgaggtcaggaattcaagaccagcctggccaacatggtgaaaccctgtctctagtaaaaatccaaaaaaaaaa

SEQ ID NO: 52137 - DNA, 1622 bp, Homo sapiens
cggggaggctcgttcccatcggcatctgtgactggctgcgatcgagggcccgggcggccggccagccgtctcgccgagtgcggactggccggatctgctgtcagtcagcgggaacagacttctccctctccatctggtcaactgcgggagaaaaattttcgagaatttccagcaggcaaggcagtggccgctttgactgcttgcttcggagatccgagacgacggagaaggcactcttatttaccgaccaagaaagctcctcccccgtcctccgttagctaattaaaacatttttcagggacgtagccatccagagacattccattattgttccattgacctttccctcatcactgagtcctttggagctgagttatgtcaacagctgccttaattactttggtcagaagtggtgggaaccaggtgagaaggagagtgctgctaagctcccgcctgctgcaggacgacaggcgggtgacacccacgtgccacagctccacttcagagcctaggtgttctcggtttgacccagatggtagtgggagtccagctacctgggacaattttgggatctgggataaccgcattgatgagccaattctgctgccacccagcattaagtatggcaagccaattcccaaaatcagcttggaaaatgtggggtgcgcctcacagattggcaaacggaaagagaatgaagatcggtttgacttcgctcagctgacagatgaggtcctgtactttgcagtgtatgatggacacggtggacctgcagcagctgatttctgtcatacccacatggagaaatgtattatggatttgcttcctaaggagaagaacttggaaactctgttgaccttggcttttctagaaatagataaagccttttcgagtcatgcccgcctgtctgctgatgcaactcttctgacctctgggactactgcaacagtagccctattgcgagatggtattgaactggttgtagccagtgttggggacagccgggctattttgtgtagaaaaggaaaacccatgaagctgaccattgaccatactccagaaagaaaagatgaaaaagaaaggatcaagaaatgtggtggttttgtagcttggaatagtttggggcagcctcacgtaaatggcaggcttgcaatgacaagaagtattggagatttggaccttaagaccagtggtgtcatagcagaacctgaaactaagaggattaagttacatcatgctgatgacagcttcctggtcctcaccacagatggaattaacttcatggtgaatagtcaagagatttgtgactttgtcaatcagtgccatgatcccaacgaagcagcccatgcggtgactgaacaggtgacccagagcttctgcctgaaaagtcccaaggagaaggaaggaaaggacagtccaggcattgtgttttagcttttgagtgttgcagtgaattttacacttgattccataatatttccaattataaaatttttatttccccaagttaaaattttaatatgccaaggaaatgtgctttgtttattctttggctttgtatataccttgaaatgatagtaacagcaatagtaaattataatagtaaactaatattcacttgc

SEQ ID NO: 52138 - DNA, 757 bp, Homo sapiens
ccacatctctttgtcccattagttgagatgacttgcagtagaaattgtccacaactcttctgacctctgggactactgcaacagtagccctattgcgagatggtattgaactggttgtagccagtgttggggacagccgggctattttgtgtagaaaaggaaaacccatgaagctgaccattgaccatactccagaaagaaaagatgaaaaagaaaggatcaagaaatgtggtggttttgtagcttggaatagtttggggcagcctcacgtaaatggcaggcttgcaatgacaagaagtattggagatttggaccttaagaccagtggtgtcatagcagaacctgaaactaagaggattaagttacatcatgctgatgacagcttcctggtcctcaccacagatggaattaacttcatggtgaatagtcaagagatttgtgactttgtcaatcagtgccatgatcccaacgaagcagcccatgcggtgactgaacaggtgacccagagcttctgcctgaaaagtcccaaggagaaggaaggaaaggacagtccaggcattgtgttttagcttttgagtgttgcagtgaattttacacttgattccataatatttccaattataaaatttttatttccccaagttaaaattttaatatgccaaggaaatgtgctttgtttattctttggctttgtatataccttgaaatgatagtaacagcaatagtaaattataatagtaaactaatattcacttgc

SEQ ID NO: 52139 - DNA, 2206 bp, Homo sapiens
cggggaggctcgttcccatcggcatctgtgactggctgcgatcgagggcccgggcggccggccagccgtctcgccgagtgcggactggccggatctgctgtcagtcagcgggaacagacttctccctctccatctggtcaactgcgggagaaaaattttcgagaatttccagcaggcaaggcagtggccgctttgactgcttgcttcggagatccgagacgacggagaaggcactcttatttaccgaccaagaaagctcctcccccgtcctccgttagctaattaaaacatttttcagggacgtagccatccagagacattccattattgttccattgacctttccctcatcactgagtcctttggagctgagttatgtcaacagctgccttaattactttggtcagaagtggtgggaaccaggtgagaaggagagtgctgctaagctcccgcctgctgcaggacgacaggcgggtgacacccacgtgccacagctccacttcagagcctaggtgttctcggtttgacccagatggtagtgggagtccagctacctgggacaattttgggatctgggataaccgcattgatgagccaattctgctgccacccagcattaagtatggcaagccaattcccaaaatcagcttggaaaatgtggggtgcgcctcacagattggcaaacggaaagagaatgaagatcggtttgacttcgctcagctgacagatgaggtcctgtactttgcagtgtatgatggacacggtggacctgcagcagctgatttctgtcatacccacatggagaaatgtattatggatttgcttcctaaggagaagaacttggaaactctgttgaccttggcttttctagaaatagataaagccttttcgagtcatgcccgcctgtctgctgatgcaactcttctgacctctgggactactgcaacagtagccctattgcgagatggtattgaactggttgtagccagtgttggggacagccgggctattttgtgtagaaaaggaaaacccatgaagctgaccattgaccatactccagaaagaaaagatgaaaaagaaaggatcaagaaatgtggtggttttgtagcttggaatagtttggggcagcctcacgtaaatggcaggcttgcaatgacaagaagtattggagatttggaccttaagaccagtggtgtcatagcagaacctgaaactaagaggattaagttacatcatgctgatgacagcttcctggtcctcaccacagatggaattaacttcatggtgaatagtcaagagatttgtgactttgtcaatcagtgccatgatcccaacgaagcagcccatgcggtgactgaacaggcaatacagtacggtactgaggataacagtactgcagtagtagtgccttttggtgcctggggaaaatataagaactctgaaatcaacttctcattcagcagaagctttgcctccagtggacgatgggcctgattaccagctgggacttagagtttctgtgcaacagtttttcactgagcatgtcaagaaactgataagatcaaaaaggtctcctaactcactagatcagcgcacaagtcagtgtaaaccacttagatagtagttttttcataaatgctcatcatatttatgttccgctgtacatgttcagtataaatatatgtgtagtgaagctactgtgagtctttaaatggaaagagcaaatgagaagtggtttggatacacttgatgagagatgagagtgtcacattaataatttttaagactcttaggcagctatgggtttcttttgatcatttttgttctttattcatttgaacacgtttttgaagttcttcaaaactagtcagtttgaattttgacagctattcaatatgtgatctccaagtttaaaaaaatttttttccagacttccctaatcctaaaatgcgagtttttatttttaataactgtaccaaggaataagtatgaaaacagttctctgttaccatattttgtattctggaccacttactggtgaaagcaaccatgcaaaagaaattaatttggccaggcacagtggctcatgcctgtaatcccagcactttgagaggccaaggtgggtagatcatctgaggtcaggaattcaagaccagcctggccaacatggtgaaaccctgtctctagtaaaaatccaaaaaaaaaa

SEQ ID NO: 52140 - DNA, 2266 bp, Homo sapiens
cggggaggctcgttcccatcggcatctgtgactggctgcgatcgagggcccgggcggccggccagccgtctcgccgagtgcggactggccggatctgctgtcagtcagcgggaacagacttctccctctccatctggtcaactgcgggagaaaaattttcgagaatttccagcaggcaaggcagtggccgctttgactgcttgcttcggagatccgagacgacggagaaggcactcttatttaccgaccaagaaagctcctcccccgtcctccgttagctaattaaaacatttttcagggacgtagccatccagagacattccattattgttccattgacctttccctcatcactgagtcctttggagctgagttatgtcaacagctgccttaattactttggtcagaagtggtgggaaccaggtgagaaggagagtgctgctaagctcccgcctgctgcaggacgacaggcgggtgacacccacgtgccacagctccacttcagagcctaggtgttctcggtttgacccagatggtagtgggagtccagctacctgggacaattttgggatctgggataaccgcattgatgagccaattctgctgccacccagcattaagtatggcaagccaattcccaaaatcagcttggaaaatgtggggtgcgcctcacagattggcaaacggaaagagaatgaagatcggtttgacttcgctcagctgacagatgaggtcctgtactttgcagtgtatgatggacacggtggacctgcagcagctgatttctgtcatacccacatggagaaatgtattatggatttgcttcctaaggagaagaacttggaaactctgttgaccttggcttttctagaaatagataaagccttttcgagtcatgcccgcctgtctgctgatggactgtggcttattcatttttgaatctccagtgtgcagcaccctgcatagaacctggcagcaactcttctgacctctgggactactgcaacagtagccctattgcgagatggtattgaactggttgtagccagtgttggggacagccgggctattttgtgtagaaaaggaaaacccatgaagctgaccattgaccatactccagaaagaaaagatgaaaaagaaaggatcaagaaatgtggtggttttgtagcttggaatagtttggggcagcctcacgtaaatggcaggcttgcaatgacaagaagtattggagatttggaccttaagaccagtggtgtcatagcagaacctgaaactaagaggattaagttacatcatgctgatgacagcttcctggtcctcaccacagatggaattaacttcatggtgaatagtcaagagatttgtgactttgtcaatcagtgccatgatcccaacgaagcagcccatgcggtgactgaacaggcaatacagtacggtactgaggataacagtactgcagtagtagtgccttttggtgcctggggaaaatataagaactctgaaatcaacttctcattcagcagaagctttgcctccagtggacgatgggcctgattaccagctgggacttagagtttctgtgcaacagtttttcactgagcatgtcaagaaactgataagatcaaaaaggtctcctaactcactagatcagcgcacaagtcagtgtaaaccacttagatagtagttttttcataaatgctcatcatatttatgttccgctgtacatgttcagtataaatatatgtgtagtgaagctactgtgagtctttaaatggaaagagcaaatgagaagtggtttggatacacttgatgagagatgagagtgtcacattaataatttttaagactcttaggcagctatgggtttcttttgatcatttttgttctttattcatttgaacacgtttttgaagttcttcaaaactagtcagtttgaattttgacagctattcaatatgtgatctccaagtttaaaaaaatttttttccagacttccctaatcctaaaatgcgagtttttatttttaataactgtaccaaggaataagtatgaaaacagttctctgttaccatattttgtattctggaccacttactggtgaaagcaaccatgcaaaagaaattaatttggccaggcacagtggctcatgcctgtaatcccagcactttgagaggccaaggtgggtagatcatctgaggtcaggaattcaagaccagcctggccaacatggtgaaaccctgtctctagtaaaaatccaaaaaaaaaa

SEQ ID NO: 52141 - DNA, 1814 bp, Homo sapiens
cggggaggctcgttcccatcggcatctgtgactggctgcgatcgagggcccgggcggccggccagccgtctcgccgagtgcggactggccggatctgctgtcagtcagcgggaacagacttctccctctccatctggtcaactgcgggagaaaaattttcgagaatttccagcaggcaaggcagtggccgctttgactgcttgcttcggagatccgagacgacggagaaggcactcttatttaccgaccaagaaagctcctcccccgtcctccgttagctaattaaaacatttttcagggacgtagccatccagagacattccattattgttccattgacctttccctcatcactgagtcctttggagctgagttatgtcaacagctgccttaattactttggtcagaagtggtgggaaccagggatttgcttcctaaggagaagaacttggaaactctgttgaccttggcttttctagaaatagataaagccttttcgagtcatgcccgcctgtctgctgatgcaactcttctgacctctgggactactgcaacagtagccctattgcgagatggtattgaactggttgtagccagtgttggggacagccgggctattttgtgtagaaaaggaaaacccatgaagctgaccattgaccatactccagaaagaaaagatgaaaaagaaaggatcaagaaatgtggtggttttgtagcttggaatagtttggggcagcctcacgtaaatggcaggcttgcaatgacaagaagtattggagatttggaccttaagaccagtggtgtcatagcagaacctgaaactaagaggattaagttacatcatgctgatgacagcttcctggtcctcaccacagatggaattaacttcatggtgaatagtcaagagatttgtgactttgtcaatcagtgccatgatcccaacgaagcagcccatgcggtgactgaacaggcaatacagtacggtactgaggataacagtactgcagtagtagtgccttttggtgcctggggaaaatataagaactctgaaatcaacttctcattcagcagaagctttgcctccagtggacgatgggcctgattaccagctgggacttagagtttctgtgcaacagtttttcactgagcatgtcaagaaactgataagatcaaaaaggtctcctaactcactagatcagcgcacaagtcagtgtaaaccacttagatagtagttttttcataaatgctcatcatatttatgttccgctgtacatgttcagtataaatatatgtgtagtgaagctactgtgagtctttaaatggaaagagcaaatgagaagtggtttggatacacttgatgagagatgagagtgtcacattaataatttttaagactcttaggcagctatgggtttcttttgatcatttttgttctttattcatttgaacacgtttttgaagttcttcaaaactagtcagtttgaattttgacagctattcaatatgtgatctccaagtttaaaaaaatttttttccagacttccctaatcctaaaatgcgagtttttatttttaataactgtaccaaggaataagtatgaaaacagttctctgttaccatattttgtattctggaccacttactggtgaaagcaaccatgcaaaagaaattaatttggccaggcacagtggctcatgcctgtaatcccagcactttgagaggccaaggtgggtagatcatctgaggtcaggaattcaagaccagcctggccaacatggtgaaaccctgtctctagtaaaaatccaaaaaaaaaa

SEQ ID NO: 52142 - DNA, 1736 bp, Homo sapiens
cggggaggctcgttcccatcggcatctgtgactggctgcgatcgagggcccgggcggccggccagccgtctcgccgagtgcggactggccggatctgctgtcagtcagcgggaacagacttctccctctccatctggtcaactgcgggagaaaaattttcgagaatttccagcaggcaaggcagtggccgctttgactgcttgcttcggagatccgagacgacggagaaggcactcttatttaccgaccaagaaagctcctcccccgtcctccgttagctaattaaaacatttttcagggacgtagccatccagagggatttgcttcctaaggagaagaacttggaaactctgttgaccttggcttttctagaaatagataaagccttttcgagtcatgcccgcctgtctgctgatgtgtgcagcaccctgcatagaacctggcagcaactcttctgacctctgggactactgcaacagtagccctattgcgagatggtattgaactggttgtagccagtgttggggacagccgggctattttgtgtagaaaaggaaaacccatgaagctgaccattgaccatactccagaaagaaaagatgaaaaagaaaggatcaagaaatgtggtggttttgtagcttggaatagtttggggcagcctcacgtaaatggcaggcttgcaatgacaagaagtattggagatttggaccttaagaccagtggtgtcatagcagaacctgaaactaagaggattaagttacatcatgctgatgacagcttcctggtcctcaccacagatggaattaacttcatggtgaatagtcaagagatttgtgactttgtcaatcagtgccatgatcccaacgaagcagcccatgcggtgactgaacaggcaatacagtacggtactgaggataacagtactgcagtagtagtgccttttggtgcctggggaaaatataagaactctgaaatcaacttctcattcagcagaagctttgcctccagtggacgatgggcctgattaccagctgggacttagagtttctgtgcaacagtttttcactgagcatgtcaagaaactgataagatcaaaaaggtctcctaactcactagatcagcgcacaagtcagtgtaaaccacttagatagtagttttttcataaatgctcatcatatttatgttccgctgtacatgttcagtataaatatatgtgtagtgaagctactgtgagtctttaaatggaaagagcaaatgagaagtggtttggatacacttgatgagagatgagagtgtcacattaataatttttaagactcttaggcagctatgggtttcttttgatcatttttgttctttattcatttgaacacgtttttgaagttcttcaaaactagtcagtttgaattttgacagctattcaatatgtgatctccaagtttaaaaaaatttttttccagacttccctaatcctaaaatgcgagtttttatttttaataactgtaccaaggaataagtatgaaaacagttctctgttaccatattttgtattctggaccacttactggtgaaagcaaccatgcaaaagaaattaatttggccaggcacagtggctcatgcctgtaatcccagcactttgagaggccaaggtgggtagatcatctgaggtcaggaattcaagaccagcctggccaacatggtgaaaccctgtctctagtaaaaatccaaaaaaaaaa

SEQ ID NO: 52143 - DNA, 1341 bp, Homo sapiens
ccacatctctttgtcccattagttgagatgacttgcagtagaaattgtccacaactcttctgacctctgggactactgcaacagtagccctattgcgagatggtattgaactggttgtagccagtgttggggacagccgggctattttgtgtagaaaaggaaaacccatgaagctgaccattgaccatactccagaaagaaaagatgaaaaagaaaggatcaagaaatgtggtggttttgtagcttggaatagtttggggcagcctcacgtaaatggcaggcttgcaatgacaagaagtattggagatttggaccttaagaccagtggtgtcatagcagaacctgaaactaagaggattaagttacatcatgctgatgacagcttcctggtcctcaccacagatggaattaacttcatggtgaatagtcaagagatttgtgactttgtcaatcagtgccatgatcccaacgaagcagcccatgcggtgactgaacaggcaatacagtacggtactgaggataacagtactgcagtagtagtgccttttggtgcctggggaaaatataagaactctgaaatcaacttctcattcagcagaagctttgcctccagtggacgatgggcctgattaccagctgggacttagagtttctgtgcaacagtttttcactgagcatgtcaagaaactgataagatcaaaaaggtctcctaactcactagatcagcgcacaagtcagtgtaaaccacttagatagtagttttttcataaatgctcatcatatttatgttccgctgtacatgttcagtataaatatatgtgtagtgaagctactgtgagtctttaaatggaaagagcaaatgagaagtggtttggatacacttgatgagagatgagagtgtcacattaataatttttaagactcttaggcagctatgggtttcttttgatcatttttgttctttattcatttgaacacgtttttgaagttcttcaaaactagtcagtttgaattttgacagctattcaatatgtgatctccaagtttaaaaaaatttttttccagacttccctaatcctaaaatgcgagtttttatttttaataactgtaccaaggaataagtatgaaaacagttctctgttaccatattttgtattctggaccacttactggtgaaagcaaccatgcaaaagaaattaatttggccaggcacagtggctcatgcctgtaatcccagcactttgagaggccaaggtgggtagatcatctgaggtcaggaattcaagaccagcctggccaacatggtgaaaccctgtctctagtaaaaatccaaaaaaaaaa

SEQ ID NO: 52144 - DNA, 2238 bp, Homo sapiens
agcccgggagttcgaggctgcagtgagccaacatcgcgccgctgcactctccagcctgggcaacaaagtgaggctctgcctcaaaaaaaacaaaacaaacaaaaaaaaaaaaacacgaaaggcatagagaagttaagtacctagtctgagatgacacagctagtaaggccaagtctgtttagaagtcaggcggtctggccacactacttttcgctcacgatcccgggtcatgaaatccaataacactgtcacactcacaatcgagaagtccagaaagaacaaatacatgcacattgtctctgacaaaactgcaaggtcagaatcaaacagccacgagaatataaaacgcgaccatggtcacacaaaaggtcgcatattcgcacgacctcagatgtcactggacagggtctctcgccctggaaaccccactccaaattccatggccgaagtttcacacatacagtcacactacgtcactcctccctcttctagccgctgtcaggaccttaaggctccagctgacccggccttcactggccctggagctctcaccaccttcaccccgctgtattctagcctcaggtagagacccaaaaagacggaactaaacacactgagccgggcttccttcacggaccttgcgaacctgcagctccagccgactgtaagaaggaagtgcctttttgcaggtggggtcggggaagtagggccgcgaaggcctctgggaaatgtagttcggcgcaggaagcagcggaacgattcgattcttctcagcaccaagttgcgctcccaatctctcagagctgggctcgcgggaggccgctcgtgcaaaacctaggctgagctcccctgcgcggagctgtgagccctggaacaccgtggtctgcttctcaggacgcgcaaacagtgaagccagtcccgcccgggtgagccgcgggggcctctgggaagcgtcgcccctggtgtaacggaccgagacttgtggcgctctcagccaccgacagcgccggcctcagtgccgcctctgtcccagcccgcgccggctctgccactttggcagcgttaagtgtggaatcggggcctgtgtccgcgggcttggtgagttcttcatatattaaggattcattcattcatagactcatttattgaaggctgtctgtgtaacaggcacaatcctaggtgcttgggatatagcagtgaacaagagacaaaccccctactatcatggtacttacatttttgtgggctggataataaacaagctctacttctgcaggccccatcccttcccagaaagaagaggaaatgactgagtcccagggaacagtaacattcaaagatgtggctatcgacttcactcaggaggagtggaagagattggatcctgctcagagaaaactgtaccggaatgtgatgctagaaaactataacaacttaatcacagtaggctatccgttcaccaaacctgatgtgattttcaaattggagcaagaagaagaaccatgggtgatggaggaagaagtattaaggagacactggcaaggagaaatatggggagttgatgagcatcagaaaaaccaggacagacttttgagacaagttgaagttaaattccagaaaacactgactgaagaaaaaggcaatgaatgtcaaaagaaatttgcaaatgtatttcctctgaactctgattttttcccttccagacacaatctctatgagtatgacttatttggaaagtgtttagaacataattttgactgtcataataatgtgaaatgccttatgagaaaggagcattgtgaatataatgaacctgtgaaatcatatggtaatagctcatcccattttgtcattaccccctttaagtgtaatcattgtggaaaaggcttcaatcagactttggacctcatcagacatctgagaattcatactggagagaagccctatgaatgtagtaactgtagaaaagccttcagtcacaaggaaaaacttattaaacattataaaattcacagtagggagcagtcttacaaatgtaatgaatgtggtaaagctttcattaaaatgtcaaatctcattagacatcaaagaattcatactggagagaagccctatgcatgtaaggaatgtgagaagtccttcagccagaaatcaaatcttattgatcatgaaaaaattcatactggagagaaaccttatgaatgtaatgagtgtggaaaagcattcagccagaagcaa

SEQ ID NO: 52145 - DNA, 2063 bp, Homo sapiens
agcccgggagttcgaggctgcagtgagccaacatcgcgccgctgcactctccagcctgggcaacaaagtgaggctctgcctcaaaaaaaacaaaacaaacaaaaaaaaaaaaacacgaaaggcatagagaagttaagtacctagtctgagatgacacagctagtaaggccaagtctgtttagaagtcaggcggtctggccacactacttttcgctcacgatcccgggtcatgaaatccaataacactgtcacactcacaatcgagaagtccagaaagaacaaatacatgcacattgtctctgacaaaactgcaaggtcagaatcaaacagccacgagaatataaaacgcgaccatggtcacacaaaaggtcgcatattcgcacgacctcagatgtcactggacagggtctctcgccctggaaaccccactccaaattccatggccgaagtttcacacatacagtcacactacgtcactcctccctcttctagccgctgtcaggaccttaaggctccagctgacccggccttcactggccctggagctctcaccaccttcaccccgctgtattctagcctcaggtagagacccaaaaagacggaactaaacacactgagccgggcttccttcacggaccttgcgaacctgcagctccagccgactgtaagaaggaagtgcctttttgcaggtggggtcggggaagtagggccgcgaaggcctctgggaaatgtagttcggcgcaggaagcagcggaacgattcgattcttctcagcaccaagttgcgctcccaatctctcagagctgggctcgcgggaggccgctcgtgcaaaacctaggctgagctcccctgcgcggagctgtgagccctggaacaccgtggtctgcttctcaggacgcgcaaacagtgaagccagtcccgcccggagttcttcatatattaaggattcattcattcatagactcatttattgaaggctgtctgtgtaacaggcacaatcctaggtgcttgggatatagcagtgaacaagagacaaaccccctactatcatggtacttacatttttgtgggctggataataaacaagctctacttctgcaggccccatcccttcccagaaagaagaggaaatgactgagtcccagggaacagtaacattcaaagatgtggctatcgacttcactcaggaggagtggaagagattggatcctgctcagagaaaactgtaccggaatgtgatgctagaaaactataacaacttaatcacagtaggctatccgttcaccaaacctgatgtgattttcaaattggagcaagaagaagaaccatgggtgatggaggaagaagtattaaggagacactggcaaggagaaatatggggagttgatgagcatcagaaaaaccaggacagacttttgagacaagttgaagttaaattccagaaaacactgactgaagaaaaaggcaatgaatgtcaaaagaaatttgcaaatgtatttcctctgaactctgattttttcccttccagacacaatctctatgagtatgacttatttggaaagtgtttagaacataattttgactgtcataataatgtgaaatgccttatgagaaaggagcattgtgaatataatgaacctgtgaaatcatatggtaatagctcatcccattttgtcattaccccctttaagtgtaatcattgtggaaaaggcttcaatcagactttggacctcatcagacatctgagaattcatactggagagaagccctatgaatgtagtaactgtagaaaagccttcagtcacaaggaaaaacttattaaacattataaaattcacagtagggagcagtcttacaaatgtaatgaatgtggtaaagctttcattaaaatgtcaaatctcattagacatcaaagaattcatactggagagaagccctatgcatgtaaggaatgtgagaagtccttcagccagaaatcaaatcttattgatcatgaaaaaattcatactggagagaaaccttatgaatgtaatgagtgtggaaaagcattcagccagaagcaa

SEQ ID NO: 52146 - DNA, 1951 bp, Homo sapiens
agtccggagtagaaaaggtcgcggcgtcgcagtgtctggcagcagcggtgcagctccgcgcagggtttgtaacacggcctcctccccaccaggtcctcccacactggcctctccccggccttccagagagcccgaaagtccggattccctgcagctccgagcctggcccggtcacagggacggggcccagcgtcacactacacgggctggtgtggaagtgcgcaggcacaagcgctctgcgcgcctcccttagcaaccagggcggggagttgagaatcgcaggttggccgcagggaaaaggacgcgcaaacagtgaagccagtcccgcccgggtgagccgcgggggcctctgggaagcgtcgcccctggtgtaacggaccgagacttgtggcgctctcagccaccgacagcgccggcctcagtgccgcctctgtcccagcccgcgccggctctgccactttggcagcgttaagtgtggaatcggggcctgtgtccgcgggcttggtgtatgaacctgcgtgcaaacgtgcatgacagtgggatcttgaatgaatgaaaaactgtggatacaagagttcttcatatattaaggattcattcattcatagactcatttattgaaggctgtctgtgtaacaggcacaatcctaggtgcttgggatatagcagtgaacaagagacaaaccccctactatcatggtacttacatttttgtgggctggataataaacaagggatgtaaacagctggaaagaactttgcttcaatcattacaacaaggaaactacaaaacttctaccgtacaacaaggaaatggacaaactacaaaataatttttctaggacccttcagagaactgaggtcacagggcaaccaagtaatcttaaatctggggaaagaaagatgccagctgagagaaacaggactcaagctttacttacctgggatggactctgccagacaccatataagccactctacttctgcaggccccatcccttcccagaaagaagaggaaatgactgagtcccagggaacagtaacattcaaagatgtggctatcgacttcactcaggaggagtggaagagattggatcctgctcagagaaaactgtaccggaatgtgatgctagaaaactataacaacttaatcacagtaggctatccgttcaccaaacctgatgtgattttcaaattggagcaagaagaagaaccatgggtgatggaggaagaagtattaaggagacactggcaaggagaaatatggggagttgatgagcatcagaaaaaccaggacagacttttgagacaagttgaagttaaattccagaaaacactgactgaagaaaaaggcaatgaatgtcaaaagaaatttgcaaatgtatttcctctgaactctgattttttcccttccagacacaatctctatgagtatgacttatttggaaagtgtttagaacataattttgactgtcataataatgtgaaatgccttatgagaaaggagcattgtgaatataatgaacctgtgaaatcatatggtaatagctcatcccattttgtcattaccccctttaagtgtaatcattgtggaaaaggcttcaatcagactttggacctcatcagacatctgagaattcatactggagagaagccctatgaatgtagtaactgtagaaaagccttcagtcacaaggaaaaacttattaaacattataaaattcacagtagggagcagtcttacaaatgtaatgaatgtggtaaagctttcattaaaatgtcaaatctcattagacatcaaagaattcatactggagagaagccctatgcatgtaaggaatgtgagaagtccttcagccagaaatcaaatcttattgatcatgaaaaaattcatactggagagaaaccttatgaatgtaatgagtgtggaaaagcattcagccagaagcaa

SEQ ID NO: 52147 - DNA, 2006 bp, Homo sapiens
agcccgggagttcgaggctgcagtgagccaacatcgcgccgctgcactctccagcctgggcaacaaagtgaggctctgcctcaaaaaaaacaaaacaaacaaaaaaaaaaaaacacgaaaggcatagagaagttaagtacctagtctgagatgacacagctagtaaggccaagtctgtttagaagtcaggcggtctggccacactacttttcgctcacgatcccgggtcatgaaatccaataacactgtcacactcacaatcgagaagtccagaaagaacaaatacatgcacattgtctctgacaaaactgcaaggtcagaatcaaacagccacgagaatataaaacgcgaccatggtcacacaaaaggtcgcatattcgcacgacctcagatgtcactggacagggtctctcgccctggaaaccccactccaaattccatggccgaagtttcacacatacagtcacactacgtcactcctccctcttctagccgctgtcaggaccttaaggctccagctgacccggccttcactggccctggagctctcaccaccttcaccccgctgtattctagcctcaggtagagacccaaaaagacggaactaaacacactgagccgggcttccttcacggaccttgcgaacctgcagctccagccgactgtaagaaggaagtgcctttttgcaggtggggtcggggaagtagggccgcgaaggcctctgggaaatgtagttcggcgcaggaagcagcggaacgattcgattcttctcagcaccaagttgcgctcccaatctctcagagctgggctcgcgggaggccgctcgtgcaaaacctaggctgagctcccctgcgcggagctgtgagccctggaacaccgtggtctgcttctcaggacgcgcaaacagtgaagccagtcccgcccgggtgagccgcgggggcctctgggaagcgtcgcccctggtgtaacggaccgagacttgtggcgctctcagccaccgacagcgccggcctcagtgccgcctctgtcccagcccgcgccggctctgccactttggcagcgttaagtgtggaatcggggcctgtgtccgcgggcttggtgagttcttcatatattaaggattcattcattcatagactcatttattgaaggctgtctgtgtaacaggcacaatcctaggtgcttgggatatagcagtgaacaagagacaaaccccctactatcatggtacttacatttttgtgggctggataataaacaagggatgtaaacagctggaaagaactttgcttcaatcattacaacaaggaaactacaaaacttctaccgtacaacaaggaaatggacaaactacaaaataatttttctaggacccttcagagaactgaggtcacagggcaaccaagtaatcttaaatctggggaaagaaagatgccagctgagagaaacaggactcaagctttacttacctgggatggactctgccagacaccatataagccactctacttctgcaggccccatcccttcccagaaagaagaggaaatgactgagtcccagggaacagtaacattcaaagatgtggctatcgacttcactcaggaggagtggaagagattggatcctgctcagagaaaactgtaccggaatgtgatgctagaaaactataacaacttaatcacagtaggctatccgttcaccaaacctgatgtgattttcaaattggagcaagaagaagaaccatgggtgatggaggaagaagtattaaggagacactggcaaggttagtggaagggaaccagacaggtgaggagaggtcagggcctattaatgattaatcagtgaatggttgatccctctaaaatattcttcaaagatattttcagaggttggcacagtggttcatacctatagtcccagcactttgggaagccaaggtggaaggattgcttgagtccaggagtttgggaccagcctgggcaacatagtgagacctcatctctta

SEQ ID NO: 52148 - DNA, 425 bp, Homo sapiens
cgaagccacattttcttgtcctttagcctggttttcctgggccagcctcaatttttgggtggttctttgttcctagtatgtatgcccaaatctatgtaacttccctttgacaggctatccgttcaccaaacctgatgtgattttcaaattggagcaagaagaagaaccatgggtgatggaggaagaagtattaaggagacactggcaaggttagtggaagggaaccagacaggtgaggagaggtcagggcctattaatgattaatcagtgaatggttgatccctctaaaatattcttcaaagatattttcagaggttggcacagtggttcatacctatagtcccagcactttgggaagccaaggtggaaggattgcttgagtccaggagtttgggaccagcctgggcaacatagtgagacctcat

SEQ ID NO: 52149 - DNA, 2479 bp, Homo sapiens
agcccgggagttcgaggctgcagtgagccaacatcgcgccgctgcactctccagcctgggcaacaaagtgaggctctgcctcaaaaaaaacaaaacaaacaaaaaaaaaaaaacacgaaaggcatagagaagttaagtacctagtctgagatgacacagctagtaaggccaagtctgtttagaagtcaggcggtctggccacactacttttcgctcacgatcccgggtcatgaaatccaataacactgtcacactcacaatcgagaagtccagaaagaacaaatacatgcacattgtctctgacaaaactgcaaggtcagaatcaaacagccacgagaatataaaacgcgaccatggtcacacaaaaggtcgcatattcgcacgacctcagatgtcactggacagggtctctcgccctggaaaccccactccaaattccatggccgaagtttcacacatacagtcacactacgtcactcctccctcttctagccgctgtcaggaccttaaggctccagctgacccggccttcactggccctggagctctcaccaccttcaccccgctgtattctagcctcaggtagagacccaaaaagacggaactaaacacactgagccgggcttccttcacggaccttgcgaacctgcagctccagccgactgtaagaaggaagtgcctttttgcaggtggggtcggggaagtagggccgcgaaggcctctgggaaatgtagttcggcgcaggaagcagcggaacgattcgattcttctcagcaccaagttgcgctcccaatctctcagagctgggctcgcgggaggccgctcgtgcaaaacctaggctgagctcccctgcgcggagctgtgagccctggaacaccgtggtctgcttctcaggacgcgcaaacagtgaagccagtcccgcccgggtgagccgcgggggcctctgggaagcgtcgcccctggtgtaacggaccgagacttgtggcgctctcagccaccgacagcgccggcctcagtgccgcctctgtcccagcccgcgccggctctgccactttggcagcgttaagtgtggaatcggggcctgtgtccgcgggcttggtgagttcttcatatattaaggattcattcattcatagactcatttattgaaggctgtctgtgtaacaggcacaatcctaggtgcttgggatatagcagtgaacaagagacaaaccccctactatcatggtacttacatttttgtgggctggataataaacaagggatgtaaacagctggaaagaactttgcttcaatcattacaacaaggaaactacaaaacttctaccgtacaacaaggaaatggacaaactacaaaataatttttctaggacccttcagagaactgaggtcacagggcaaccaagtaatcttaaatctggggaaagaaagatgccagctgagagaaacaggactcaagctttacttacctgggatggactctgccagacaccatataagccactctacttctgcaggccccatcccttcccagaaagaagaggaaatgactgagtcccagggaacagtaacattcaaagatgtggctatcgacttcactcaggaggagtggaagagattggatcctgctcagagaaaactgtaccggaatgtgatgctagaaaactataacaacttaatcacagtaggctatccgttcaccaaacctgatgtgattttcaaattggagcaagaagaagaaccatgggtgatggaggaagaagtattaaggagacactggcaaggagaaatatggggagttgatgagcatcagaaaaaccaggacagacttttgagacaagttgaagttaaattccagaaaacactgactgaagaaaaaggcaatgaatgtcaaaagaaatttgcaaatgtatttcctctgaactctgattttttcccttccagacacaatctctatgagtatgacttatttggaaagtgtttagaacataattttgactgtcataataatgtgaaatgccttatgagaaaggagcattgtgaatataatgaacctgtgaaatcatatggtaatagctcatcccattttgtcattaccccctttaagtgtaatcattgtggaaaaggcttcaatcagactttggacctcatcagacatctgagaattcatactggagagaagccctatgaatgtagtaactgtagaaaagccttcagtcacaaggaaaaacttattaaacattataaaattcacagtagggagcagtcttacaaatgtaatgaatgtggtaaagctttcattaaaatgtcaaatctcattagacatcaaagaattcatactggagagaagccctatgcatgtaaggaatgtgagaagtccttcagccagaaatcaaatcttattgatcatgaaaaaattcatactggagagaaaccttatgaatgtaatgagtgtggaaaagcattcagccagaagcaa

SEQ ID NO: 52150 - DNA, 1496 bp, Homo sapiens
gatcgtgtccgtaagcggatttcgtggaggcgctttcccttttatctttcagtatgaacctgcgtgcaaacgtgcatgacagtgggatcttgaatgaatgaaaaactgtggatacaagagttcttcatatattaaggattcattcattcatagactcatttattgaaggctgtctgtgtaacaggcacaatcctaggtgcttgggatatagcagtgaacaagagacaaaccccctactatcatggtacttacatttttgtgggctggataataaacaagggatgtaaacagctggaaagaactttgcttcaatcattacaacaaggaaactacaaaacttctaccgtacaacaaggaaatggacaaactacaaaataatttttctaggacccttcagagaactgaggtcacagggcaaccaagtaatcttaaatctggggaaagaaagatgccagctgagagaaacaggactcaagctttacttacctgggatggactctgccagacaccatataagccactctacttctgcaggccccatcccttcccagaaagaagaggaaatgactgagtcccagggaacagtaacattcaaagatgtggctatcgacttcactcaggaggagtggaagagattggatcctgctcagagaaaactgtaccggaatgtgatgctagaaaactataacaacttaatcacagtaggctatccgttcaccaaacctgatgtgattttcaaattggagcaagaagaagaaccatgggtgatggaggaagaagtattaaggagacactggcaaggagaaatatggggagttgatgagcatcagaaaaaccaggacagacttttgagacaagttgaagttaaattccagaaaacactgactgaagaaaaaggcaatgaatgtcaaaagaaatttgcaaatgtatttcctctgaactctgattttttcccttccagacacaatctctatgagtatgacttatttggaaagtgtttagaacataattttgactgtcataataatgtgaaatgccttatgagaaaggagcattgtgaatataatgaacctgtgaaatcatatggtaatagctcatcccattttgtcattaccccctttaagtgtaatcattgtggaaaaggcttcaatcagactttggacctcatcagacatctgagaattcatactggagagaagccctatgaatgtagtaactgtagaaaagccttcagtcacaaggaaaaacttattaaacattataaaattcacagtagggagcagtcttacaaatgtaatgaatgtggtaaagctttcattaaaatgtcaaatctcattagacatcaaagaattcatactggagagaagccctatgcatgtaaggaatgtgagaagtccttcagccagaaatcaaatcttattgatcatgaaaaaattcatactggagagaaaccttatgaatgtaatgagtgtggaaaagcattcagccagaagcaa

SEQ ID NO: 52151 - DNA, 2716 bp, Homo sapiens
catacctggtagagaaaaagcttagaagctttatttttatttattatccttggaaataataaaaattatttcaaatagtgcagcaaaacatcccaaagtgatttatttagagtaaaatatacttttctgataatggattacaaaaatcaataccagaggtacaagattattaatttttagaaagaggaaacacatatgttctatagcattttgagatgtgctccttaatggactaggattctgttggcaatgcctttaggcacagggtcagagaggacccaatgagaagggagcattttgtttcttgcctcctccccctatcaaaccagattagtttgcttttgtctcttgtatattggtattttatcaggatttcatttggagggcgaaaaagtactgccatcttgaaagtgattgctatagatattaagtgagatgactataatatggaaggcttaaggataaattccttcttaggttacatttcaaaaaagaagctgtgcagtgttgtagttaagcccgcccgtttagatatgttccttcacttctctgtgcctatttcgtcatctgcaaagtgaaacgatcatagaacctacctcatagagttgtgttacaagatgcaatgagtcaacaggcagaaagcactcagaacagtgcctgagacatgagttctttgtaagtgtttgatatgatggctgcttagttatctccctggtcgtgaaatcatagctttagattctgggtctagaatgggaggacccacggagaccactgggttcaagtctcttgttttagaagtgaagaaactggggcccatagagaagtgactggcctaggggcacagggtgaatttttggcacttagtgacacctcttaacccatggcttgtaaaaaggcacaaacaatgcctttgttttctgagtatctcgcaaatggcatggcttgatgcacctaccttgttctgttttacatgcttgttttggggtcatcttaacaaactctactttcattcctcgtgccagtttcttccctgaccatggtcttgctttaaacactgacttggacagagggatttgaaggccactccaagagtgggctgcatcctcagcctctcccctgctccacacactgcatctcaccaaacggatgtgtttaaaatgaggtgcgcttatggagagaaagtaactcagggccaagcgatcatgaaatttgttgtcgaattattttaaaattaaatgtgatcaatctctacagttgaatgtcagtgttaacagactgatgtggcttgctgctccagccttgggcatgctccatactggtcttcccttctggctccaccagcagcaagcaggatgtctcaggggttgaggatactaccatcagcaggtcttggttgaatacaggctagcctccctgagatttgacttccttcactatgaaatggggataaagaatagtttctatttcatagaatcattggaaggactaattaaggtaatttgtgaaaatgcttagcctagtgcatagtaagtgctcaataaatattagttatatcatcattgttttgtgctcttgtagaaagacctggacaaagactctccttgtgtccttctgtcagatgaagtctgtcactctgctagtaaaggggcccttgtcagactgaataacaatgcaagcctgaatgtttacattagtgttggtcaaagtcagggttcctgctccatctatatctaaatacactagggtgcttgttaacaaatgcacatttctggactcaaacccagaattatggagtcagaaattctaagggcacggccctggaatctgcattttaagtatgctccttgggtatgctgtttctgcacaatgaagtttgagaaccactggtctagataattcaatctgaagagcttggcttactcaggtatcaaggcctcagactccactcacttttctggggcctgttggggtattttgacaatgcatcagaaatagcattgaatctgttgcctggctggctcagctggactgttaggcctgagaaccacagggagcttcccacctggtcttgctgctttagatgattggagcatgcaggtttagggagctgaaaggacacatgccaggcccacagcagtgagcaacagaacagaccaatggaaccaggttgcctgagacagcgccctctaccaagcattttctttggttttgggactggcagtccaaaccgctaaaccagtctgtgtaggtacagtatacacacagctgcagcatgaccccacttcctaggatggtagaggggaggcaggggctcccagccacacagccactgcctccaacgctctctgtccctagctccactgcatgcggttagctggagtctggaaatggctgggggtgtctggttctccagaggagccctgcccagctgccgggtgtgaggaggttagagaaccaacctcattctcgcagtgctctggcagttcatctcttgcaaatactcttaaaagggagagcctggtcaaggtcactatgatttaaattcctcgtctttgaattattcagccaaaagagcctggagattaaccaaaccaacttaggccttcttttaaagtcaagaacagtagccaattttactaaatccaagtattgaaagttacttaattcctctgtcaaaatttaaatgatggcgaccattttggaggaaaaaaaaaaa

SEQ ID NO: 52152 - DNA, 2662 bp, Homo sapiens
catacctggtagagaaaaagcttagaagctttatttttatttattatccttggaaataataaaaattatttcaaatagtgcagcaaaacatcccaaagtgatttatttagagtaaaatatacttttctgataatggattacaaaaatcaataccagaggtacaagattattaatttttagaaagaggaaacacatatgttctatagcattttgagatgtgctccttaatggactaggattctgttggcaatgcctttaggcacagggtcagagaggacccaatgagaagggagcattttgtttcttgcctcctccccctatcaaaccagattagtttgcttttgtctcttgtatattggtattttatcaggatttcatttggagggcgaaaaagtactgccatcttgaaagtgattgctatagatattaagtgagatgactataatatggaaggcttaaggataaattccttcttaggttacatttcaaaaaagaagctgtgcagtgttgtagttaagcccgcccgtttagatatgttccttcacttctctgtgcctatttcgtcatctgcaaagtgaaacgatcatagaacctacctcatagagttgtgttacaagatgcaatgagtcaacaggcagaaagcactcagaacagtgcctgagacatgagttctttgtaagtgtttgatatgatggctgcttagttatctccctggtcgtgaaatcatagctttagattctgggtctagaatgggaggacccacggagaccactgggttcaagtctcttgttttagaagtgaagaaactggggcccatagagaagtgactggcctaggggcacagggtgaatttttggcacttagtgacacctcttaacccatggcttgtaaaaaggcacaaacaatgcctttgttttctgagtatctcgcaaatggcatggcttgatgcacctaccttgttctgttttacatgcttgttttggggtcatcttaacaaactctactttcattcctcgtgccagtttcttccctgaccatggtcttgctttaaacactgacttggacagagggatttgaaggccactccaagagtgggctgcatcctcagcctctcccctgctccacacactgcatctcaccaaacggatgtgtttaaaatgaggtgcgcttatggagagaaagtaactcagggccaagcgatcatgaaatttgttgtcgaattattttaaaattaaatgtgatcaatctctacagttgaatgtcagtgttaacagactgatgtggcttgctgctccagccttgggcatgctccatactggtcttcccttctggctccaccagcagcaagcaggatgtctcaggggttgaggatactaccatcagcaggtcttggttgaatacaggctagcctccctgagatttgacttccttcactatgaaatggggataaagaatagtttctatttcatagaatcattggaaggactaattaaggtaatttgtgattgttttgtgctcttgtagaaagacctggacaaagactctccttgtgtccttctgtcagatgaagtctgtcactctgctagtaaaggggcccttgtcagactgaataacaatgcaagcctgaatgtttacattagtgttggtcaaagtcagggttcctgctccatctatatctaaatacactagggtgcttgttaacaaatgcacatttctggactcaaacccagaattatggagtcagaaattctaagggcacggccctggaatctgcattttaagtatgctccttgggtatgctgtttctgcacaatgaagtttgagaaccactggtctagataattcaatctgaagagcttggcttactcaggtatcaaggcctcagactccactcacttttctggggcctgttggggtattttgacaatgcatcagaaatagcattgaatctgttgcctggctggctcagctggactgttaggcctgagaaccacagggagcttcccacctggtcttgctgctttagatgattggagcatgcaggtttagggagctgaaaggacacatgccaggcccacagcagtgagcaacagaacagaccaatggaaccaggttgcctgagacagcgccctctaccaagcattttctttggttttgggactggcagtccaaaccgctaaaccagtctgtgtaggtacagtatacacacagctgcagcatgaccccacttcctaggatggtagaggggaggcaggggctcccagccacacagccactgcctccaacgctctctgtccctagctccactgcatgcggttagctggagtctggaaatggctgggggtgtctggttctccagaggagccctgcccagctgccgggtgtgaggaggttagagaaccaacctcattctcgcagtgctctggcagttcatctcttgcaaatactcttaaaagggagagcctggtcaaggtcactatgatttaaattcctcgtctttgaattattcagccaaaagagcctggagattaaccaaaccaacttaggccttcttttaaagtcaagaacagtagccaattttactaaatccaagtattgaaagttacttaattcctctgtcaaaatttaaatgatggcgaccattttggaggaaaaaaaaaaa

SEQ ID NO: 52153 - DNA, 879 bp, Homo sapiens
  misc_feature (17)..(17): n is a, c, g, or t
  misc_feature (738)..(738): n is a, c, g, or t
cggcgctcggcgaggtnggttggcggcctgctctccgacagaacttttcttcttgggttgaggaaaacgcctttggagtcaggccctggaggggcgagccttgctcacaggtcttcctaagccggcgctcggcaagttctcccaggagaaagccatgttcagttcgagcgccaagatcgtgaagcccaatggcgagaagccggacgagttcgagtccggcatctcccaggctcttctggagctggagatgaactcggacctcaaggctcagctcagggagctgaatattacggcagctaaggaaattgaagttggtggtggtcggaaagctatcataatctttgttcccgttcctcaactgaaatctttccagaaaatccaagtccggctagtacgcgaattggagaaaaagttcagtgggaagcatgtcgtctttatcgctcagaggagaattctgcctaagccaactcgaaaaagccgtacaaaaaataagcaaaagcgtcccaggagccgtactctgacagctgtgcacgatgccatccttgaggacttggtcttcccaagcgaaattgtgggcaagagaatccgcgtcaaactagatggcagccggctcataaaggttcatttggacaaagcacagcagaacaatgtggaacacaaggttgaaactttttctggtgtctataagaagctcacgggcaaggatgttaattttgaattcccagagttccatgtgancaacacacaaaaactgttggggggcggccccgaaaaatttaacattcttggggcgggccgggagaaaggcacgtccaagaccggcctgcacggggtttccaaaaaccgggccaggttaaccagagggggctggctccgccc

SEQ ID NO: 52154 - DNA, 836 bp, Homo sapiens
  misc_feature (17)..(17): n is a, c, g, or t
cggcgctcggcgaggtnggttggcggcctgctctccgacagaacttttcttcttgggttgaggaaaacgcctttggagtcaggccctggaggggcgagccttgctcacagggtggggatacagccgattacccgccctgtgctttccgatggcttctgcggggcgagcggggcctggccggggggtgcgggcgggagggcgagccagcggcgcctgcagcccgggccgcgtaacgctgaccgctgtgccttcagtcttcctaagccggcgctcggcaagttctcccaggagaaagccatgttcagttcgagcgccaagatcgtgaagcccaatggcgagaagccggacgagttcgagtccggcatctcccaggctcttctggagctggagatgaactcggacctcaaggctcagctcagggagctgaatattacggcagctaaggaaattgaagttggtggtggtcggaaagctatcataatctttgttcccgttcctcaactgaaatctttccagaaaatccaagtccggctagtacgcgaattggagaaaaagttcagtgggaagcatgtcgtctttatcgctcaggtatctgttctactgttgcagcacgtttctgtttgtgaattttgctaaaattgcttgtatttagactgcattggtagttggagtcatgaaaacaatccttttatgaatccaattgggtagaaagataaagtacaggcagagcgccgtggcttaggcctgtaatcccagcacggggaggtggaggcgggtggatcactgtagagaccagcctgggcaacatggtaagaccctgtctacaaaaaatggaa

SEQ ID NO: 52155 - DNA, 545 bp, Homo sapiens
aagcttgcggccgcgcgcgtgttgggcccggggtgctcggacgcgcgctcagggtcggtcctgctgttcgttgcttcttaggctcttctggagctggagatgaactcggacctcaaggctcagctcagggagctgaatattacggcagctaaggaaattgaagttggtggtggtcggaaagctatcataatctttgttcccgttcctcaactgaaatctttccagaaaatccaagtccggctagtacgcgaattggagaaaaagttcagtgggaagcatgtcgtctttatcgctcaggtatctgttctactgttgcagcacgtttctgtttgtgaattttgctaaaattgcttgtatttagactgcattggtagttggagtcatgaaaacaatccttttatgaatccaattgggtagaaagataaagtacaggcagagcgccgtggcttaggcctgtaatcccagcacggggaggtggaggcgggtggatcactgtagagaccagcctgggcaacatggtaagaccctgtctacaaaaaatggaa

SEQ ID NO: 52156 - DNA, 817 bp, Homo sapiens
gagtgatgttccggtttccgccctcctcctcgcgctgtttccgcctcttgccttcggacgccggattttgacgtgctctcgcgagatttgggtctcttcctaagccggcgctcggcaagttctcccaggagaaagccatgttcagttcgagcgccaagatcgtgaagcccaatggcgagaagccggacgagttcgagtccggcatctcccaggctcttctggagctggagatgaactcggacctcaaggctcagctcagggagctgaatattacggcagctaaggaaattgaagttggtggtggtcggaaagctatcataatctttgttcccgttcctcaactgaaatctttccagaaaatccaagtccggctagtacgcgaattggagaaaaagttcagtgggaagcatgtcgtctttatcgctcagaggagaattctgcctaagccaactcgaaaaagccgtacaaaaaataagcaaaagcgtcccaggagccgtactctgacagctgtgcacgatgccatccttgaggacttggtcttcccaagcgaaattgtgggcaagagaatccgcgtcaaactagatggcagccggctcataaaggttcatttggacaaagcacagcagaacaatgtggaacacaaggttgaaactttttctggtgtctataagaagaagcctcacgggccacgatgttcattcctgaattccccagagtatccatttgtaaaccaaacaatgacttacattacaaaagctttactcctcacagtacaacacacaacaacacaacacacaggcactagttctaaaagcga

SEQ ID NO: 52157 - DNA, 641 bp, Homo sapiens
gagtgatgttccggtttccgccctcctcctcgcgctgtttccgcctcttgccttcggacgccggattttgacgtgctctcgcgagatttgggtctcttcctaagccggcgctcggcaagttctcccaggagaaagccatgttcagttcgagcgccaagatcgtgaagcccaatggcgagaagccggacgagttcgagtccggcatctcccaggctcttctggagctggagatgaactcggacctcaaggctcagctcagggagctgaatattacggcagctaaggaaattgaagttggtggtggtcggaaagctatcataatctttgttcccgttcctcaactgaaatctttccagaaaatccaagtccggctagtacgcgaattggagaaaaagttcagtgggaagcatgtcgtctttatcgctcagaggagaattctgcctaagccaactcgaaaaagccgtacaaaaaataagcaaaagcgtcccaggagccgtactctgacagctgtgcacgatgccatccttgaggacttggtcttcccaagcgaaattgtgggcaagagaatccgcgtcaaactagatggcagccggctcataaaggttcatttggacaaagttgggtactacgctttggcaggc

SEQ ID NO: 52158 - DNA, 588 bp, Homo sapiens
  misc_feature (502)..(502): n is a, c, g, or t
  misc_feature (507)..(507): n is a, c, g, or t
  misc_feature (515)..(516): n is a, c, g, or t
  misc_feature (518)..(518): n is a, c, g, or t
  misc_feature (544)..(544): n is a, c, g, or t
  misc_feature (564)..(564): n is a, c, g, or t
gagtgatgttccggtttccgccctcctcctcgcgctgtttccgcctcttgccttcggacgccggattttgacgtgctctcgcgagatttgggtctcttcctaagccggcgctcggcaagttctcccaggagaaagccatgttcagttcgagcgccaagatcgtgaagcccaatggcgagaagccggacgagttcgagtccggcatctcccaggctcttctggagctggagatgaactcggacctcaaggctcagctcagggagctgaatattacggcagctaaggaaattgaagttggtggtggtcggaaagctatcataatctttgttcccgttcctcaactgaaatctttccagaaaatccaagtccggctagtacgcgaattggagaaaaagttcagtgggaagcatgtcgtctttatcgctcagaggagaattctgcctaagccaactcgaaaaagccgtacaaaaaataagcaaaagcgtcccaggagcccggtacntcttnacaagctnntncacggattgccaatcccttttaaggnactttgggttttcccaaagncgaaaatttgttgggccaaagagg

SEQ ID NO: 52159 - DNA, 747 bp, Homo sapiens
gagtgatgttccggtttccgccctcctcctcgcgctgtttccgcctcttgccttcggacgccggattttgacgtgctctcgcgagatttgggtctcttcctaagccggcgctcggcaagttctcccaggagaaagccatgttcagttcgagcgccaagatcgtgaagcccaatggcgagaagccggacgagttcgagtccggcatctcccaggctcttctggagctggagatgaactcggacctcaaggctcagctcagggagctgaatattacggcagctaaggaaattgaagttggtggtggtcggaaagctatcataatctttgttcccgttcctcaactgaaatctttccagaaaatccaagtccggctagtacgcgaattggagaaaaagttcagtgggaagcatgtcgtctttatcgctcagaggagaattctgcctaagccaactcgaaaaagccgtacaaaaaataagacttggtcttcccaagcgaaattgtgggcaagagaatccgcgtcaaactagatggcagccggctcataaaggttcatttggacaaagcacagcagaacaatgtggaacacaaggttgaaactttttctggtgtctataagaagctcacgggcaaggatgttaattttgaattcccagagtttcaattgtaaacaaaatgactaattaaagtttttcccaaaaaaaaacaaaaaatttgggggccgcagaattaaactttgggcggcagtaa

SEQ ID NO: 52160 - DNA, 730 bp, Homo sapiens
gagtgatgttccggtttccgccctcctcctcgcgctgtttccgcctcttgccttcggacgccggattttgacgtgctctcgcgagatttgggtctcttcctaagccggcgctcggcaagttctcccaggagaaagccatgttcagttcgagcgccaagatcgtgaagcccaatggcgagaagccggacgagttcgagtccggcatctcccaggaaattgaagttggtggtggtcggaaagctatcataatctttgttcccgttcctcaactgaaatctttccagaaaatccaagtccggctagtacgcgaattggagaaaaagttcagtgggaagcatgtcgtctttatcgctcagaggagaattctgcctaagccaactcgaaaaagccgtacaaaaaataagcaaaagcgtcccaggagccgtactctgacagctgtgcacgatgccatccttgaggacttggtcttcccaagcgaaattgtgggcaagagaatccgcgtcaaactagatggcagccggctcataaaggttcatttggacaaagcacagcagaacaatgtggaacacaaggttgaaactttttctggtgtctataagaagctcacgggcaaggatgttaattttgaattcccagagtttcaattgtaaacaaaatgactaattaaagtttttcccaaaaaaaaacaaaaaatttgggggccgcagaattaaactttgggcggcagtaa

SEQ ID NO: 52161 - DNA, 662 bp, Homo sapiens
cttggcgctcgaactgaacatggctttctcctgggagaacttgccgagcgccggcttaggaagagacgccaagatcgtgaagcccaatggcgagaagccggacgagttcgagtccggcatctcccaggctcttctggagctggagatgaactcggacctcaaggctcagctcagggagctgaatattacggcagctaaggaaattgaagttggtggtggtcggaaagctatcataatctttgttcccgttcctcaactgaaatctttccagaaaatccaagtccggctagtacgcgaattggagaaaaagttcagtgggaagcatgtcgtctttatcgctcagaggagaattctgcctaagccaactcgaaaaagccgtacaaaaaataagacttggtcttcccaagcgaaattgtgggcaagagaatccgcgtcaaactagatggcagccggctcataaaggttcatttggacaaagcacagcagaacaatgtggaacacaaggttgaaactttttctggtgtctataagaagctcacgggcaaggatgttaattttgaattcccagagtttcaattgtaaacaaaatgactaattaaagtttttcccaaaaaaaaacaaaaaatttgggggccgcagaattaaactttgggcggcagtaa

SEQ ID NO: 52162 - DNA, 802 bp, Homo sapiens
gagtgatgttccggtttccgccctcctcctcgcgctgtttccgcctcttgccttcggacgccggattttgacgtgctctcgcgagatttgggtctcttcctaagccggcgctcggcaagttctcccaggagaaagccatgttcagttcgagcgccaagatcgtgaagcccaatggcgagaagccggacgagttcgagtccggcatctcccaggctcttctggagctggagatgaactcggacctcaaggctcagctcagggagctgaatattacggcagctaaggaaattgaagttggtggtggtcggaaagctatcataatctttgttcccgttcctcaactgaaatctttccagaaaatccaagtccggctagtacgcgaattggagaaaaagttcagtgggaagcatgtcgtctttatcgctcagaggagaattctgcctaagccaactcgaaaaagccgtacaaaaaataagcaaaagcgtcccaggagccgtactctgacagctgtgcacgatgccatccttgaggacttggtcttcccaagcgaaattgtgggcaagagaatccgcgtcaaactagatggcagccggctcataaaggttcatttggacaaagcacagcagaacaatgtggaacacaaggttgaaactttttctggtgtctataagaagctcacgggcaaggatgttaattttgaattcccagagtttcaattgtaaacaaaatgactaattaaagtttttcccaaaaaaaaacaaaaaatttgggggccgcagaattaaactttgggcggcagtaa

SEQ ID NO: 52163 - DNA, 717 bp, Homo sapiens
gcggccgctactactactactactaccctcgcggcccgtcgatcttcctaagccggcgctcggcaagttctcccaggagaaagccatgttcagttcgagcgccaagatcgtgaagcccaatggcgagaagccggacgagttcgagtccggcatctcccaggctcttctggagctggagatgaactcggacctcaaggctcagctcagggagctgaatattacggcagctaaggaaattgaagttggtggtggtcggaaagctatcataatctttgttcccgttcctcaactgaaatctttccagaaaatccaagtccggctagtacgcgaattggagaaaaagttcagtgggaagcatgtcgtctttatcgctcagaggagaattctgcctaagccaactcgaaaaagccgtacaaaaaataagcaaaagcgtcccaggagccgtactctgacagctgtgcacgatgccatccttgaggacttggtcttcccaagcgaaattgtgggcaagagaatccgcgtcaaactagatggcagccggctcataaaggttcatttggacaaagcacagcagaacaatgtggaacacaaggttgaaactttttctggtgtctataagactccggcagggatgtcaattgattccagagttcatgtaacaaccttgctactaaacagttttttcccgtacaccaccacacaccacacaacacccca

SEQ ID NO: 52164 - DNA, 819 bp, Homo sapiens
  misc_feature (17)..(17): n is a, c, g, or t
cggcgctcggcgaggtnggttggcggcctgctctccgacagaacttttcttcttgggttgaggaaaacgcctttggagtcaggccctggaggggcgagccttgctcacaggtcttcctaagccggcgctcggcaagttctcccaggagaaagccatgttcagttcgagcgccaagatcgtgaagcccaatggcgagaagccggacgagttcgagtccggcatctcccaggctcttctggagctggagatgaactcggacctcaaggctcagctcagggagctgaatattacggcagctaaggaaattgaagttggtggtggtcggaaagctatcataatctttgttcccgttcctcaactgaaatctttccagaaaatccaagtccggctagtacgcgaattggagaaaaagttcagtgggaagcatgtcgtctttatcgctcagaggagaattctgcctaagccaactcgaaaaagccgtacaaaaaataagcaaaagcgtcccaggagccgtactctgacagctgtgcacgatgccatccttgaggacttggtcttcccaagcgaaattgtgggcaagagaatccgcgtcaaactagatggcagccggctcataaaggttcatttggacaaagcacagcagaacaatgtggaacacaaggttgaaactttttctggtgtctataagaagctcacgggcaaggatgttaattttgaattcccagagtttcaattgtaaacaaaatgactaattaaagtttttcccaaaaaaaaacaaaaaatttgggggccgcagaattaaactttgggcggcagtaa

SEQ ID NO: 52165 - DNA, 769 bp, Homo sapiens
gagtgatgttccggtttccgccctcctcctcgcgctgtttccgcctcttgccttcggacgccggattttgacgtgctctcgcgagatttgggtctcttcctaagccggcgctcggcaagttctcccaggagaaagccatgttcagttcgagcgccaagatcgtgaagcccaatggcgagaagccggacgagttcgagtccggcatctcccaggctcttctggagctggagatgaactcggacctcaaggctcagctcagggagctgaatattacggcagctaaggaaattgaagttggtggtggtcggaaagctatcataatctttgttcccgttcctcaactgaaatctttccagaaaatccaagtccggctagtacgcgaattggagaaaaagttcagtgggaagcatgtcgtctttatcgctcagaggagaattctgcctaagccaactcgaaaaagccgtacaaaaaataagcaaaagcgtcccaggagccgtactctgacagctgtgcacgatgccatccttgaggacttggtcttcccaagcgaaattgtgggcaagagaatccgcgtcaaactagatggcagccggctcataaaggttcatttggacaaagcacagcagaacaatgtggaacacaaggttgaaactttttctggtgtctataagactccggcagggatgtcaattgattccagagttcatgtaacaaccttgctactaaacagttttttcccgtacaccaccacacaccacacaacacccca

SEQ ID NO: 52166 - DNA, 692 bp, Homo sapiens
gagtgatgttccggtttccgccctcctcctcgcgctgtttccgcctcttgccttcggacgccggattttgacgtgctctcgcgagatttgggtctcttcctaagccggcgctcggcaagttctcccaggagaaagccatgttcagttcgagcgccaagatcgtgaagcccaatggcgagaagccggacgagttcgagtccggcatctcccaggctcttctggagctggagatgaactcggacctcaaggctcagctcagggagctgaatattacggcagctaaggaaattgaagttggtggtggtcggaaagctatcataatctttgttcccgttcctcaactgaaatctttccagaaaatccaagtccggctagtacgcgaattggagaaaaagttcagtgggaagcatgtcgtctttatcgctcagaggagaattctgcctaagccaactcgaaaaagccgtacaaaaaataagcaaaagcgtcccaggagccgtactctgacagctgtgcacgatgccatccttgaggacttggtcttcccaagcgaaattgtgggcaagagaatccgcgtcaaactagatggcagccggctcataaaggttcatttggacaaaggacaagtgaacttctgtgtctataagaagctcacgttagttcattgtaacaaaatgactaataagaagtataag

SEQ ID NO: 52167 - DNA, 676 bp, Homo sapiens
gagtgatgttccggtttccgccctcctcctcgcgctgtttccgcctcttgccttcggacgccggattttgacgtgctctcgcgagatttgggtctcttcctaagccggcgctcggcaagttctcccaggagaaagccatgttcagttcgagcgccaagatcgtgaagcccaatggcgagaagccggacgagttcgagtccggcatctcccaggctcttctggagctggagatgaactcggacctcaaggctcagctcagggagctgaatattacggcagctaaggaaattgaagttggtggtggtcggaaagctatcataatctttgttcccgttcctcaactgaaatctttccagaaaatccaagtccggctagtacgcgaattggagaaaaagttcagtgggaagcatgtcgtctttatcgctcaggtatctgttctactgttgcagcacgtttctgtttgtgaattttgctaaaattgcttgtatttagactgcattggtagttggagtcatgaaaacaatccttttatgaatccaattgggtagaaagataaagtacaggcagagcgccgtggcttaggcctgtaatcccagcacggggaggtggaggcgggtggatcactgtagagaccagcctgggcaacatggtaagaccctgtctacaaaaaatggaa

SEQ ID NO: 52168 - DNA, 517 bp, Homo sapiens
ctctctggggggggattaggggtaaagctatcataatctttgttcccgttcctcaactgaaatctttccagaaaatccaagtccggctagtacgcgaattggagaaaaagttcagtgggaagcatgtcgtctttatcgctcagaggagaattctgcctaagccaactcgaaaaagccgtacaaaaaataagcaaaagcgtcccaggagccgtactctgacagctgtgcacgatgccatccttgaggacttggtcttcccaagcgaaattgtgggcaagagaatccgcgtcaaactagatggcagccggctcataaaggttcatttggacaaagcacagcagaacaatgtggaacacaaggttgaaactttttctggtgtctataagaagctcacgggcaaggatgttaattttgaattcccagagtttcaattgtaaacaaaatgactaattaaagtttttcccaaaaaaaaacaaaaaatttgggggccgcagaattaaactttgggcggcagtaa

SEQ ID NO: 52169 - DNA, 621 bp, Homo sapiens
ttgttcttcttcaattatggctcactgaagcttgactgccccaggcttaggtgatcctcccacttcagcctcctaagtatctgggacaataggcatatgccaccatgcctgcctaatttttaagattttcaagaagcaggaactggccagttcctgcttcttgaaatctttccagaaaatccaagtccggctagtacgcgaattggagaaaaagttcagtgggaagcatgtcgtctttatcgctcagaggagaattctgcctaagccaactcgaaaaagccgtacaaaaaataagcaaaagcgtcccaggagccgtactctgacagctgtgcacgatgccatccttgaggacttggtcttcccaagcgaaattgtgggcaagagaatccgcgtcaaactagatggcagccggctcataaaggttcatttggacaaagcacagcagaacaatgtggaacacaaggttgaaactttttctggtgtctataagaagctcacgggcaaggatgttaattttgaattcccagagtttcaattgtaaacaaaatgactaattaaagtttttcccaaaaaaaaacaaaaaatttgggggccgcagaattaaactttgggcggcagtaa

SEQ ID NO: 52170 - DNA, 766 bp, Homo sapiens
tacaaacagggtttttttttaaattaattaatttattttttgccacccaggcttatctcaaacttctggcccccatcaatcctcccacctcagccttccaaagtgttgggattacagtcatgggccactgcatctggcttggatcttttgctgacctcaaaatgttggacatcctcaaagttgatacctagacttcatccatactcacttccccaaattatataattatgtcacttcatgtgccactttaagcttaaatgcaagcttatttctccagctttcacctctcttttaaatacctcttatgtacttaactgcattcgggtatctaatagacatcttaataaacatcttaaacttaacatcaggtgtttaacaggcatcttaaactcaaacagatctcttgatcttccacctgtactaccaccaccacaaaacttaacctattttcccccacaacttctccaattcaggaaatgtcactaccattcttccagttgctgtggccaaaaatctaagagtcatacttaattcccctctctctccttttgcactttctatttaatccataagcaattcctattaattctactttcagaatttatactaaagtctgaccacttcatatcaccagcactgtctaatcttagccactatctttactctcctacactaaattcccactaacgttctccctgcttttctttcacttctatactgctttcctcacagtgtctgagtgatattgtaaattaagtaagaattg

SEQ ID NO: 52171 - DNA, 2039 bp, Homo sapiens
  misc_feature (779)..(779): n is a, c, g, or t
ctcgactctgaggtgcattctttttttgatgagaggcatctctaggtaccatccctgacctggtcctcatgctgccgaggctgttgctgttgatctgtgctccactctgtgaacctgccgagctgtttttgatagccagcccctcccatcccacagaggggagcccagtgaccctgacgtgtaagatgccctttctacagagttcagatgcccagttccagttctgctttttcagagacacccgggccttgggcccaggctggagcagctcccccaagctccagatcgctgccatgtggaaagaagacacagggtcatactggtgcgaggcacagacaatggcgtccaaagtcttgaggagcaggagatcccagataaatgtgcacagggtccctgtcgctgatgtgagcttggagactcagcccccaggaggacaggtgatggagggagacaggctggtcctcatctgctcagttgctatgggcacaggagacatcaccttcctttggtacaaaggggctgtaggtttaaaccttcagtcaaagacccagcgttcactgacagcagagtatgagattccttcagtgagggagagtgatgctgagcaatattactgtgtagctgaaaatggctatggtcccagccccagtgggctggtgagcatcactgtcagaatcccggtgtctcgcccaatcctcatgctcagggctcccagggcccaggctgcagtggaggatgtgctggagcttcactgtgaggccctgagaggctctcctccnatcctgtactggttttatcacgaggatatcaccctggggagcaggtcggccccctctggaggaggagcctccttcaacctttccctgactgaagaacattctggaaactactcctgtgaggccaacaatggcctgggggcccagcgcagtgaggcggtgacactcaacttcacagtgcctactggggccagaagcaatcatcttacctcaggagtcattgaggggctgctcagcacccttggtccagccaccgtggccttattattttgctacggcctcaaaagaaaaataggaagacgttcagccagggatccactcaggagccttcccagccctctaccccaagagttcacctacctcaactcacctaccccagggcagctacagcctatatatgaaaatgtgaatgttgtaagtggggatgaggtttattcactggcgtactataaccagccggagcaggaatcagtagcagcagaaaccctggggacacatatggaggacaaggtttccttagacatctattccaggctgaggaaagcaaacattacagatgtggactatgaagatgctatgtaaggttatggaagattctgctctttgaaaaccatccatgaccccaagcctcaggcctgatatgttcttcagagatcctggggcattagctttccagtatacctcttctggatgccattctccatggcactattccttcatctactgtgaagtgaagttggcgcagccctgaagaaactacctaggagaactaatagacacaggagtgacagggactttgttatcagaaccagattcctgccggctcctttgaaaacaggtcatattgtgctcttctgtttacaagaggaaacaagatggaataaaagaaattgggatcttgggttggagggacagtgaagcttagagcacatgaactcaaggttagtgactctgcaggacttcacagagagagctgtgcccatcattcagtccaagtgctttctctgcccagacagcacagaactccagccccgctacttacatggatcatcgagtttccacctaaaatatgattctatttattttgagtcactgttaccaaattagaactaaaacaaagttacataaaaagttattgtgactccacttaattttagtgacgtatttttgtatatataggccaacctataccacatccaaaattatgtatctattacagcccctagaagctttataaatacagtgtgtcttcttttattcaca

SEQ ID NO: 52172 - DNA, 869 bp, Homo sapiens
taattgtgggtgcaaggaagaatgaggaagaagtgtaaggacttaaatgagtttaccagggttaggaatgggagaagatttgaccataaaagggagtgagggcataagtaaatttctttttcttttttcttttttttattttttgccacccaggcttatctcaaacttctggcccccatcaatcctcccacctcagccttccaaagtgttgggattacagtcatgggccactgcatctggcttggatcttttgctgacctcaaaatgttggacatcctcaaagttgatacctagacttcatccatactcacttccccaaattatataattatgtcacttcatgtgccactttaagcttaaatgcaagcttatttctccagctttcacctctcttttaaatacctcttatgtacttaactgcattcgggtatctaatagacatcttaataaacatcttaaacttaacatcaggtgtttaacaggcatcttaaactcaaacagatctcttgatcttccacctgtactaccaccaccacaaaacttaacctattttcccccacaacttctccaattcaggaaatgtcactaccattcttccagttgctgtggccaaaaatctaagagtcatacttaattcccctctctctccttttgcactttctatttaatccataagcaattcctattaattctactttcagaatttatactaaagtctgaccacttcatatcaccagcactgtctaatcttagccactatctttactctcctacactaaattcccactaacgttctccctgcttttctttcacttctatactgctttcctcacagtgtctgagtgatattgtaaattaagtaagaattg

SEQ ID NO: 52173 - DNA, 854 bp, Homo sapiens
ctcgactctgaggtgcattctttttttgatgagaggcatctctaggtaccatccctgacctggtcctcatgctgccgaggctgttgctgttgatctgtgctccactctgtgaacctgccggtgagttgcacttccttttcttcttcaaggtctgtgggtattttgttacttaggtcagcacaggaggcctgcagattgctgtcttagcagccccttcctgcccaaaacatatcagggtgacagctgctgaggtgtacaaacatcagtggctcccttgggcctgggctgctctgtcttcacatcagtctctgcacctgacacgtgtctgctcagtggggtgaacaggtcttgctctgaccttctcaagaacacagtcttacttccgggaagtcccagcacagggagggagacactgtttgcacaaggaaggcaaagggtgctgaagattcatgctagaagcatctctgtcctcccagcctcaggagctccaattcccagttgtgcttctcagctgggtgtgtcaccatgggtgatgaaggaaatgccaaaatcacacatccacggagaacattagagagaatcctccagacatgtgtggaatgaagtagtactgctgcctccttcctatttttagctctcctctgcagccacacctgttaccccagctcattttctctttcggactctggtttatgcaaacttacttcattgcactggtcctgattcaaagtcttacctttaccaaagaaggagagtaagcaatccctttccccacgaaggactcttcactagatcaagctcaatgataaaatgtaaaaattgctatcttgtgcagaaaatactagcacagacca

SEQ ID NO: 52174 - DNA, 984 bp, Homo sapiens
ctcgactctgaggtgcattctttttttgatgagaggcatctctaggtaccatccctgacctggtcctcatgctgccgaggctgttgctgttgatctgtgagtcagggtcttactctgttgccccagctggggtgcggtggtatggtcatggctcattgcaaccttgaattcctggtctcaagtgatgcacctgcctcagctccctgagtagctggaaccagagacacatgcaaccacactcagctaattaaaacaattttttgaccaggcttatctcaaacttctggcccccatcaatcctcccacctcagccttccaaagtgttgggattacagtcatgggccactgcatctggcttggatcttttgctgacctcaaaatgttggacatcctcaaagttgatacctagacttcatccatactcacttccccaaattatataattatgtcacttcatgtgccactttaagcttaaatgcaagcttatttctccagctttcacctctcttttaaatacctcttatgtacttaactgcattcgggtatctaatagacatcttaataaacatcttaaacttaacatcaggtgtttaacaggcatcttaaactcaaacagatctcttgatcttccacctgtactaccaccaccacaaaacttaacctattttcccccacaacttctccaattcaggaaatgtcactaccattcttccagttgctgtggccaaaaatctaagagtcatacttaattcccctctctctccttttgcactttctatttaatccataagcaattcctattaattctactttcagaatttatactaaagtctgaccacttcatatcaccagcactgtctaatcttagccactatctttactctcctacactaaattcccactaacgttctccctgcttttctttcacttctatactgctttcctcacagtgtctgagtgatattgtaaattaagtaagaattg

SEQ ID NO: 52175 - DNA, 701 bp, Homo sapiens
ctcgactctgaggtgcattctttttttgatgagaggcatctctaggtaccatccctgacctggtcctcatgctgccgaggctgttgctgttgatctgtggtgagttgggcaactcagagcagggcatgggatgcaatcatgcttgggctctgcttcctgaagggctgtaaggacttcttaggactaaggttctgtcaggtaatgctcaggggtgctcagatctccacttccacggagggctcagagtcaggcaaaaagttgtagatatttcaaaaagccagagttttcaagaaaactatcatttcagtttttatctcataggaagtgttcactgtctgtcttcctttccatcaataattgtctttgttctcagtgttttcaacagctgccaaaagaaaaatctgtataataaataggcctctgaattccttgcccttcttactaccaacgttatttccttttatccctctctgactccccattcccacagtcaaaccttagaacttatcatcactcctttgttttcagcatacatcccccacccccactaagttgtgtttctagctcactttctcctgcactctatttccaacatgacttcaattaccccagggctacttttccattatcagtaactacacttcatgtgctcacttctcatggtgctcagctcagattctgcagctcaccaccacaacact

SEQ ID NO: 52176 - DNA, 445 bp, Homo sapiens
tattttactcaatttctcaggggcatttgatcactctttattttttgaaacacttttaatttggcttctggaatatcatattctgctggctttctttctaattcagtatctgctacttttcagtttctttgctaaattatttaatttttttagagtcagggtcttactctgttgccccagctggggtgcggtggtatggtcatggctcattgcaaccttgaattcctggtctcaagtgatgcacctgcctcagctccctgagtagctggaaccagagacacatgcaaccacactcagctaattaaaacaattttttgaccaggtatggtggctcatgtctgtaatcccaggactttgggaggccaaggtgggtggatcacctgaggtcaggagttcagaccaagctgaccaacatgatgaaacccagtctctactaaagaaaaaa

SEQ ID NO: 52177 - DNA, 2922 bp, Homo sapiens
  misc_feature (779)..(779): n is a, c, g, or t
ctcgactctgaggtgcattctttttttgatgagaggcatctctaggtaccatccctgacctggtcctcatgctgccgaggctgttgctgttgatctgtgctccactctgtgaacctgccgagctgtttttgatagccagcccctcccatcccacagaggggagcccagtgaccctgacgtgtaagatgccctttctacagagttcagatgcccagttccagttctgctttttcagagacacccgggccttgggcccaggctggagcagctcccccaagctccagatcgctgccatgtggaaagaagacacagggtcatactggtgcgaggcacagacaatggcgtccaaagtcttgaggagcaggagatcccagataaatgtgcacagggtccctgtcgctgatgtgagcttggagactcagcccccaggaggacaggtgatggagggagacaggctggtcctcatctgctcagttgctatgggcacaggagacatcaccttcctttggtacaaaggggctgtaggtttaaaccttcagtcaaagacccagcgttcactgacagcagagtatgagattccttcagtgagggagagtgatgctgagcaatattactgtgtagctgaaaatggctatggtcccagccccagtgggctggtgagcatcactgtcagaatcccggtgtctcgcccaatcctcatgctcagggctcccagggcccaggctgcagtggaggatgtgctggagcttcactgtgaggccctgagaggctctcctccnatcctgtactggttttatcacgaggatatcaccctggggagcaggtcggccccctctggaggaggagcctccttcaacctttccctgactgaagaacattctggaaactactcctgtgaggccaacaatggcctgggggcccagcgcagtgaggcggtgacactcaacttcacagtgcctactggggccagaagcaatcatcttacctcaggagtcattgaggggctgctcagcacccttggtccagccaccgtggccttattattttgctacggcctcaaaagaaaaataggaagacgttcagccagggatccactcaggagccttcccagccctctaccccaagagttcacctacctcaactcacctaccccagggcagctacagcctatatatgaaaatgtgaatgttgtaagtggggatgaggtttattcactggcgtactataaccagccggagcaggaatcagtagcagcagaaaccctggggacacatatggaggacaaggtttccttagacatctattccaggctgaggaaagcaaacattacagatgtggactatgaagatgctatgtaaggttatggaagattctgctctttgaaaaccatccatgaccccaagcctcaggcctgatatgttcttcagagatcctggggcattagctttccagtatacctcttctggatgccattctccatggcactattccttcatctactgtgaagtgaagttggcgcagccctgaagaaactacctaggagaactaatagacacaggagtgacagggactttgttatcagaaccagattcctgccggctcctttgaaaacaggtcatattgtgctcttctgtttacaagaggaaacaagatggaataaaagaaattgggatcttgggttggagggacagtgaagcttagagcacatgaactcaaggttagtgactctgcaggacttcacagagagagctgtgcccatcattcagtccaagtgctttctctgcccagacagcacagaactccagccccgctacttacatggatcatcgagtttccacctaaaatatgattctatttattttgagtcactgttaccaaattagaactaaaacaaagttacataaaaagttattgtgactccacttaattttagtgacgtatttttgtatatataggccaacctataccacatccaaaattatgtatctattacagcccctagaagctttataaatacagtgtgtcttcttttattcacaaaatttttgaaatcgtggtaatatggtttgaaacctgtatcttaattattttttttttaaattgagacagggtctcactctgtcactcaatctggaatgcagtggcacaatcttgcctcactgcaacgcctgcctctcaggctcaagcaaacctctcacctcagcctgctgagtagctgggactacaggcacatgccaccaaacttggccattttttgtcttacgtagagacaagatttcaccgttttgcccaggctggtctcaaactcctgggctcaagcaatgtattgaattttaaaataaccaggcactcactcttatgaattaataaacatttggaggtatataaagtaaaaagttaaagtctttcctgtaagttaacacaaatgttaactattgttaaaaactttacaggtagctctctagatatttttctatttttgtatgtatacttatgcatacatgtaagtatataaacatttagaagtgtacctatctaacaaactattatgaaatactttcaaatctgtaaatagatctattatactattttaaaagtctctatagtagtgtgttatatagataaatcataacttttttctttttttattgtagtaaatatgcacaacataaaattgatcattttaaccatttttaagtgtacaattcagtggcattaagtactatcataatatattttaatccttctcatcactggtggacattaaggagactctcaaaaaattcatattataaaaacaaagttcaaacaaatgtctttgtactagcatattatggcactcctgctggattatctgaaggataaatttgtaaatctagtattgctagattatgcatattaaatattcttgttaaatagtca

SEQ ID NO: 52178 - DNA, 2342 bp, Homo sapiens
  misc_feature (779)..(779): n is a, c, g, or t
ctcgactctgaggtgcattctttttttgatgagaggcatctctaggtaccatccctgacctggtcctcatgctgccgaggctgttgctgttgatctgtgctccactctgtgaacctgccgagctgtttttgatagccagcccctcccatcccacagaggggagcccagtgaccctgacgtgtaagatgccctttctacagagttcagatgcccagttccagttctgctttttcagagacacccgggccttgggcccaggctggagcagctcccccaagctccagatcgctgccatgtggaaagaagacacagggtcatactggtgcgaggcacagacaatggcgtccaaagtcttgaggagcaggagatcccagataaatgtgcacagggtccctgtcgctgatgtgagcttggagactcagcccccaggaggacaggtgatggagggagacaggctggtcctcatctgctcagttgctatgggcacaggagacatcaccttcctttggtacaaaggggctgtaggtttaaaccttcagtcaaagacccagcgttcactgacagcagagtatgagattccttcagtgagggagagtgatgctgagcaatattactgtgtagctgaaaatggctatggtcccagccccagtgggctggtgagcatcactgtcagaatcccggtgtctcgcccaatcctcatgctcagggctcccagggcccaggctgcagtggaggatgtgctggagcttcactgtgaggccctgagaggctctcctccnatcctgtactggttttatcacgaggatatcaccctggggagcaggtcggccccctctggaggaggagcctccttcaacctttccctgactgaagaacattctggaaactactcctgtgaggccaacaatggcctgggggcccagcgcagtgaggcggtgacactcaacttcacagtgcctactggggccagaagcaatcatcttacctcaggagtcattgaggggctgctcagcacccttggtccagccaccgtggccttattattttgctacggcctcaaaagaaaaataggaagacgttcagccagggatccactcaggagccttcccagccctctaccccaagagttcacctacctcaactcacctaccccagggcagctacagcctatatatgaaaatgtgaatgttgtaagtggggatgaggtttattcactggcgtactataaccagccggagcaggaatcagtagcagcagaaaccctggggacacatatggaggacaaggtttccttagacatctattccaggctgaggaaagcaaacattacagatgtggactatgaagatgctatgtaaggttatggaagattctgctctttgaaaaccatccatgaccccaagcctcaggcctgatatgttcttcagagatcctggggcattagctttccagtatacctcttctggatgccattctccatggcactattccttcatctactgtgaagtgaagttggcgcagccctgaagaaactacctaggagaactaatagacacaggagtgacagggactttgttatcagaaccagattcctgccggctcctttgaaaacaggtcatattgtgctcttctgtttacaagaggaaacaagatggaataaaagaaattgggatcttgggttggagggacagtgaagcttagagcacatgaactcaaggttagtgactctgcaggacttcacagagagagctgtgcccatcattcagtccaagtgctttctctgcccagacagcacagaactccagccccgctacttacatggatcatcgagtttccacctaaaatatgattctatttattttgagtcactgttaccaaattagaactaaaacaaagttacataaaaagttattgtgactccacttaattttagtgacgtatttttgtatatataggccaacctataccacatccaaaattatgtatctattacagcccctagaagctttataaatacagtgtgtcttcttttattcacaaaatttttgaaatcgtggtaatatggtttgaaacctgtatcttaattattttttttttaaattgagacagggtctcactctgtcactcaatctggaatgcagtggcacaatcttgcctcactgcaacgcctgcctctcaggctcaagcaaacctctcacctcagcctgtggtcccggctacttgggaggctggggtgggatgactgcttgagcccaggaggttgaggttgcagtgggctgggatcgcatcactgaactcaagcctgagagtcagaacatgaccctgtctcaaaaaggtaaaaa

SEQ ID NO: 52179 - DNA, 396 bp, Homo sapiens
cacgaggatatcaccctggggagcaggtcggccccctctggaggaggagcctccttcaacctttccctgactgaagaacattctggaaactactcctgtgaggccaacaatggcctgggggcccagcgcagtgaggcggtgacactcaacttcacaggtatagctcaggctatggaactgtcttggtcaatgtctccttcccagcgtcctgggagagttttgctggtgccactgtgcttccgggggtttgctacccatggtggggcctctgtgtgaggtgctgtcatgagtgatgtattggaggggcatggagaactcaaggttgggtgcagctcttctcttgtcataaagatgataagccacaagtccctagacaaataaataaatccccacttg

SEQ ID NO: 52180 - DNA, 2655 bp, Homo sapiens
  misc_feature (512)..(512): n is a, c, g, or t
ctcgactctgaggtgcattctttttttgatgagaggcatctctaggtaccatccctgacctggtcctcatgctgccgaggctgttgctgttgatctgtgctccactctgtgaacctgccggggtccctgtcgctgatgtgagcttggagactcagcccccaggaggacaggtgatggagggagacaggctggtcctcatctgctcagttgctatgggcacaggagacatcaccttcctttggtacaaaggggctgtaggtttaaaccttcagtcaaagacccagcgttcactgacagcagagtatgagattccttcagtgagggagagtgatgctgagcaatattactgtgtagctgaaaatggctatggtcccagccccagtgggctggtgagcatcactgtcagaatcccggtgtctcgcccaatcctcatgctcagggctcccagggcccaggctgcagtggaggatgtgctggagcttcactgtgaggccctgagaggctctcctccnatcctgtactggttttatcacgaggatatcaccctggggagcaggtcggccccctctggaggaggagcctccttcaacctttccctgactgaagaacattctggaaactactcctgtgaggccaacaatggcctgggggcccagcgcagtgaggcggtgacactcaacttcacagtgcctactggggccagaagcaatcatcttacctcaggagtcattgaggggctgctcagcacccttggtccagccaccgtggccttattattttgctacggcctcaaaagaaaaataggaagacgttcagccagggatccactcaggagccttcccagccctctaccccaagagttcacctacctcaactcacctaccccagggcagctacagcctatatatgaaaatgtgaatgttgtaagtggggatgaggtttattcactggcgtactataaccagccggagcaggaatcagtagcagcagaaaccctggggacacatatggaggacaaggtttccttagacatctattccaggctgaggaaagcaaacattacagatgtggactatgaagatgctatgtaaggttatggaagattctgctctttgaaaaccatccatgaccccaagcctcaggcctgatatgttcttcagagatcctggggcattagctttccagtatacctcttctggatgccattctccatggcactattccttcatctactgtgaagtgaagttggcgcagccctgaagaaactacctaggagaactaatagacacaggagtgacagggactttgttatcagaaccagattcctgccggctcctttgaaaacaggtcatattgtgctcttctgtttacaagaggaaacaagatggaataaaagaaattgggatcttgggttggagggacagtgaagcttagagcacatgaactcaaggttagtgactctgcaggacttcacagagagagctgtgcccatcattcagtccaagtgctttctctgcccagacagcacagaactccagccccgctacttacatggatcatcgagtttccacctaaaatatgattctatttattttgagtcactgttaccaaattagaactaaaacaaagttacataaaaagttattgtgactccacttaattttagtgacgtatttttgtatatataggccaacctataccacatccaaaattatgtatctattacagcccctagaagctttataaatacagtgtgtcttcttttattcacaaaatttttgaaatcgtggtaatatggtttgaaacctgtatcttaattattttttttttaaattgagacagggtctcactctgtcactcaatctggaatgcagtggcacaatcttgcctcactgcaacgcctgcctctcaggctcaagcaaacctctcacctcagcctgctgagtagctgggactacaggcacatgccaccaaacttggccattttttgtcttacgtagagacaagatttcaccgttttgcccaggctggtctcaaactcctgggctcaagcaatgtattgaattttaaaataaccaggcactcactcttatgaattaataaacatttggaggtatataaagtaaaaagttaaagtctttcctgtaagttaacacaaatgttaactattgttaaaaactttacaggtagctctctagatatttttctatttttgtatgtatacttatgcatacatgtaagtatataaacatttagaagtgtacctatctaacaaactattatgaaatactttcaaatctgtaaatagatctattatactattttaaaagtctctatagtagtgtgttatatagataaatcataacttttttctttttttattgtagtaaatatgcacaacataaaattgatcattttaaccatttttaagtgtacaattcagtggcattaagtactatcataatatattttaatccttctcatcactggtggacattaaggagactctcaaaaaattcatattataaaaacaaagttcaaacaaatgtctttgtactagcatattatggcactcctgctggattatctgaaggataaatttgtaaatctagtattgctagattatgcatattaaatattcttgttaaatagtca

SEQ ID NO: 52181 - DNA, 2653 bp, Homo sapiens
  misc_feature (510)..(510): n is a, c, g, or t
ctcgactctgaggtgcattctttttttgatgagaggcatctctaggtaccatccctgacctggtcctcatgctgccgaggctgttgctgttgatctgtgctccactctgtgaacctgccgagctgtttttgatagccagcccctcccatcccacagaggggagcccagtgaccctgacgtgtaagatgccctttctacagagttcagatgcccagttccagttctgctttttcagagacacccgggccttgggcccaggctggagcagctcccccaagctccagatcgctgccatgtggaaagaagacacagggtcatactggtgcgaggcacagacaatggcgtccaaagtcttgaggagcaggagatcccagataaatgtgcacagggtccctgtcgctgatgtgagcttggagactcagcccccaggaggacagggctcccagggcccaggctgcagtggaggatgtgctggagcttcactgtgaggccctgagaggctctcctccnatcctgtactggttttatcacgaggatatcaccctggggagcaggtcggccccctctggaggaggagcctccttcaacctttccctgactgaagaacattctggaaactactcctgtgaggccaacaatggcctgggggcccagcgcagtgaggcggtgacactcaacttcacagtgcctactggggccagaagcaatcatcttacctcaggagtcattgaggggctgctcagcacccttggtccagccaccgtggccttattattttgctacggcctcaaaagaaaaataggaagacgttcagccagggatccactcaggagccttcccagccctctaccccaagagttcacctacctcaactcacctaccccagggcagctacagcctatatatgaaaatgtgaatgttgtaagtggggatgaggtttattcactggcgtactataaccagccggagcaggaatcagtagcagcagaaaccctggggacacatatggaggacaaggtttccttagacatctattccaggctgaggaaagcaaacattacagatgtggactatgaagatgctatgtaaggttatggaagattctgctctttgaaaaccatccatgaccccaagcctcaggcctgatatgttcttcagagatcctggggcattagctttccagtatacctcttctggatgccattctccatggcactattccttcatctactgtgaagtgaagttggcgcagccctgaagaaactacctaggagaactaatagacacaggagtgacagggactttgttatcagaaccagattcctgccggctcctttgaaaacaggtcatattgtgctcttctgtttacaagaggaaacaagatggaataaaagaaattgggatcttgggttggagggacagtgaagcttagagcacatgaactcaaggttagtgactctgcaggacttcacagagagagctgtgcccatcattcagtccaagtgctttctctgcccagacagcacagaactccagccccgctacttacatggatcatcgagtttccacctaaaatatgattctatttattttgagtcactgttaccaaattagaactaaaacaaagttacataaaaagttattgtgactccacttaattttagtgacgtatttttgtatatataggccaacctataccacatccaaaattatgtatctattacagcccctagaagctttataaatacagtgtgtcttcttttattcacaaaatttttgaaatcgtggtaatatggtttgaaacctgtatcttaattattttttttttaaattgagacagggtctcactctgtcactcaatctggaatgcagtggcacaatcttgcctcactgcaacgcctgcctctcaggctcaagcaaacctctcacctcagcctgctgagtagctgggactacaggcacatgccaccaaacttggccattttttgtcttacgtagagacaagatttcaccgttttgcccaggctggtctcaaactcctgggctcaagcaatgtattgaattttaaaataaccaggcactcactcttatgaattaataaacatttggaggtatataaagtaaaaagttaaagtctttcctgtaagttaacacaaatgttaactattgttaaaaactttacaggtagctctctagatatttttctatttttgtatgtatacttatgcatacatgtaagtatataaacatttagaagtgtacctatctaacaaactattatgaaatactttcaaatctgtaaatagatctattatactattttaaaagtctctatagtagtgtgttatatagataaatcataacttttttctttttttattgtagtaaatatgcacaacataaaattgatcattttaaccatttttaagtgtacaattcagtggcattaagtactatcataatatattttaatccttctcatcactggtggacattaaggagactctcaaaaaattcatattataaaaacaaagttcaaacaaatgtctttgtactagcatattatggcactcctgctggattatctgaaggataaatttgtaaatctagtattgctagattatgcatattaaatattcttgttaaatagtca

SEQ ID NO: 52182 - DNA, 223 bp, Homo sapiens
atagtgtgttcatcacactgtttaatgttcttgcagagttttataggctaataaattttcctaggaaatgattgaagtcagggaggtttgtgattgactttagtcatttcctaggaaatcattgggaatgattttccaaaccctttgtttggttattttaataagaatcttttagagccatgcccaatggaatggacgaaaacaatgagaaggaagggaaatt

SEQ ID NO: 52183 - DNA, 326 bp, Homo sapiens
agtagagagggtttcaccatgttggtcaggctggtctcaaactcctgacctcaggtaatccacccgccttggcctccgaaagtgctgagattacaggcctgagccgccatgcttggcctatgatttagatgttcctgtctgtttgggtgacagcccctgggtgacagtgtctgaatctagataatgtggctgtccctgggggccacaatgtgcctgcgtctgtccctgtgcaaatcactggaggtgaagagggaccgtgacaatgtgtgtgtcggtaagcgtggggtgacagtgtgcctgtgtgtcattgctcagactgtcccctg

SEQ ID NO: 52184 - DNA, 1569 bp, Homo sapiens
tttctatttccacccaccatgagcatttttcatttcatgctgagccttttgggttcaggccctggtgacaaaaataaagtcagccccccagaaaaagcagatcagctaaaaatctctatatgggacttgtattgatacacaatgtgaccggacctgaatctccccagaatccgcaccagcttcccaatccctccctgctctgtcactgatttaatccaactgagaaaattttcttaactagggtccttagggatccccagaattaatagtgcctgtaaacttgaatgggaaaaaaaataagtcttcactgtcttctaaatgctaatgctaaaatttagcatttcctttcataatgaatgtaggtaacaaaacacagctgaattagtccttgtcacaaatattttcacatcacattgcagttgttgcagttactgttgcttattttttgtagcagttatgttctataaagttgccatgaacactgaattagcacatgctgaaccattgtccttaggggaagtacaaggctaggttcctgtgagcctgcagtctcaacattttcaccaaccaatcaatatataactgttttccgtgtggcttttgttcaaaagacaccgtatttaatatacagtggattcattaacattgaccgcacaggcaacagcactgtaactcctgcctgcaaagagctcatctaccactggggtgattttcttggtgcggcacgttgcagtcttctgtggcacatcacttagcagcactagctagcacttcagcactgcccttcatggccattttaaacagcaacatcaccgggaaaaagcatgaaatgccaaaaatgtggcactaagtatactgcgaagaggacacaggtttgcagtatgagagctgaaacaagaaggcaaaacttgaccggtcgcagtggctcatacctgtcatcccagcactttgggaggccgaggcaggtggatcacctggaggtcaggagttcgaaaccagcctggccaacatggggaaacaccgtctctactaaaaatacaaaaattagctgagcgtggtggtgtgtgcctggcatcccagctactctggagactgaggcaggagaatcacttgaacctgggaggcagaggttgcagcgagccgaggtcatgccattgcatgccagcctgggcaacaagagcaaaactctgtctcaaaaaaaaaaaaggcaaaacttcactttgccaaccaatctcatctggggaacatgccagttgggcaactcaaatttgtcattggtctgtgcatgggcacagatgactgcaaaggcgccacaagtatacattaatgttacaaataaattttagcaaggaggtgaattcacaaatatgtgatcagtgaacgatgccgatcaactatatcttatactttaaaacatcaataccttaaaacaactgtagttattagaaccaactctggatctggttattaacacgttcaaaaagaagcccatatatttatatatgctcatttgtgaatatctcaaaatattctttgatattctatttcaatagaattggttttcttcgt

SEQ ID NO: 52185 - DNA, 364 bp, Homo sapiens
  misc_feature (323)..(323): n is a, c, g, or t
tttctatttccacccaccatgagcatttttcatttcatgctgagccttttgggttcaggccctggtgacaaaaataaagtcagccccccagaaaaagcagatcagctaaaaatctctatatgggacttgtattgatacacaatgtgaccggacctgaatctccccagaatccgcaccagcttcccaatccctccctgctctgtcactgatttaatccaactgagaaaattagctgggtgtggtggcacacacctgcagtcctagctgcttgggaagatcacttgagcccagcaggaggtcgagggagtgagcccagactgcancgctgcactccagcctgggggatagaatgagaccttgtctc

SEQ ID NO: 52186 - DNA, 850 bp, Homo sapiens
caaaacagcgctacaggaaatttagaaaatgaaacaaaaatcacccactatttcttcagcaggcagtgactgtgttagcattttggagttcactgccagtcttttccccatccttttccttcattgtcgttgtcactggagtgtgtgtgccgtgacaccttttttcatttaatactgcgtctgtgggcattttctcatggtgctacgcggtctaagtaacgttgcttctaaaaagctacagaacattctaggctggcctgctgcagcgccatcacccatacactggagcgtgtgcatttttcccctctgttgctgttgtggttgtcgttactatgagtcccaaaagcagccagggtgttggagggcacaagcaacttggcacccaactgaatgtgggttccaggcccagacatgccacttaggcccagggtagagggaccttagacaggtcactgacctgctgagcctcgttgatataaataacaggatggtaacacctacttcagaggaaggtgtaaggacagtgtcaactaactaaccaagggactctaaagtgcctggcacagccctttcttcactccctctgtgagtaggattggcattgttgaaggagtgcccactgctggctgcctcaacctgtggggaaggtgcctgagccacgggccaatgttgactgaccactcacctggcaaagaggtggtctccgcctgaggagcccctgtgaaaccccctggccctgaggttctagaatactatggccagtgcccttgcctgccttcccttctccccattaccatatgattggctggcctaggacatggggctggccctgggaagatgggctgctggt

SEQ ID NO: 52187 - DNA, 359 bp, Homo sapiens
ctgcaacagctgcagcgaggactctgtgaggtcacgtgggaaggagcttggcacagtgtcaaggacgcctccttgaactgagcttaggactctggagatgggtggatcaagggtctcctgctcccagaacctctgctttgtgatcctctttagcctgtgttttcatcaaaatgtgacctcctattgggctcttctaggaacaaacactggaactgcatcagagtcctcagcatggagccagccgcataggtggagctctgtgaatgttgatagaatcagagtaagaaaggagaggatggcactggaccccatgatgcaagcatcctccagacacgtcagcactggcagcctgggagaag

SEQ ID NO: 52188 - DNA, 984 bp, Homo sapiens
acaaccctgctcgaagactatcagtgcttccccttttccaagttcggattcctaatcctactatctaaggttctccctgatccagtcttatctccactaacaccatagaaggtcacaatgttcagatgagtttccatttctagctgttttcctaaacttctcttgcagtttttgactccatcaaaaattctctattagttctcatactgctataaagaaatacctcatactgggtaatttataaaaaaaaaaaaagaggtttaattggctcatgcactgcaggctgtacaggaagcatgatgctagcatctgctcagctgctggggaggcctcaggaagcttacaatcatggcggaaggtgaagggggagctaggcaattcacatgtccagagcacgagaaagagagaggggaagtgctacacacttttaaacaaccagagctcatgagaactctattgcggggatagcaccaaggggacggtgctaaaccattcatgaaggatccacccccaccatccaaccacctcccaccaggccccacctccaacattgaggttatgatttgacacgagatttgagcaggaacacagagccaaaccctatcagctcttttgactcctcccttctccatctccacctgttagagttatacctttcttcaacatctagctaaaactactttcaccatgatacttctgatttctcctgtcaaaaatgccttgtatgcaaaagcattccgcaccatcccgggagcatttaccatggtctgcaccaacaaagtacatattttatctcctcttttagatcacaagccttgtaagaggagaggctgagcatcaggatttcctggagaacatgaactttgaaaactaaataaccaggacttgttttcacttcgactgacgctctccggttttaattccctcatctgtaaaaaagaacctacgataattattgagaattgatttgcttacctcagaggt

SEQ ID NO: 52189 - DNA, 112 bp, Homo sapiens
accaagcccatcagtgctgagttcctatctacagtggttgagtcttctggatactggctcttgagccacagggccattctcccggatattcatcgggtcttgacgattacct

SEQ ID NO: 52190 - DNA, 388 bp, Homo sapiens
aaactcacccttctcttcactagaggaagggtggtgggagaggaaataacttcttctgcagcctagaggtgagacccagaggaccacaggaatgggcctggagggcaagtggccatagctgagactttaaaccagagaagaaagagggcaaggaaaccagatcagtcaccaatgctaatgtcctctgggcatgtcaacactaagaagatgaaaatggaaaacatgaaaaggaagtatcacttctggcttatgttatgtacttggcacagtgttaatttccatccttgcaccttccccgtgcccttctctgcttcacaggggcctaattaacattacacagtgtcctataggcctcagatgaaagctattataaaagtgcagaaacggt

SEQ ID NO: 52191 - DNA, 234 bp, Homo sapiens
ctggagaatcaaaaatgtcaatcatggcaaaacaatgcaacaaggtgtatacgatatatatatatatttttgatatggaatctcactgtgttgcccaggctagagtgcagtggcacagtctcagctcactgcaacctccacctcctggattcatgcgattctcctgcctcagcctcctgagtagttgggattacaggtgcctgccaccacacctggctaattttttgtattttt

SEQ ID NO: 52192 - DNA, 1037 bp, Homo sapiens
caggagagcgacatcttcctgagctcctgtccatgcctgccatacctgccagcttcagacatttagggaaaaggggcagcatgtggggaatgccccccgccttccacaaatccttttgctgacccaggaagttctgggagttgccgtttttcatcaaaacgtttgggggcttccaagttgtttgtgagatctgaaaacttaactttgcccaatatcctggttggggaccgtgagaaatatctgtcccatttagatctctggggccactgatgggatgccctgggaagatccttggctgccgctttctctccccacagcctcaaggccaccctaccgtcatatatatcactcaggcgtagaagaaaagacacatattttataaaatctttttaataaaaggaagttccaagaagaatttttaagaactacctctaggtgtgcctccacgctggccctagctttcccattgctgttccattgctgagacaaactggaaggctccctttctgtttgaagttttatgacttgtagtcaggctttgctgttcgtcacagtgtcattttccattcaggtaccatcacctggtcccatcaacaggtctagtatgtagctcactgataacagaggaagatgtgtctcctcccaccctcttcctaatggtcattatgcctttctccatctattgtctctttcaccccttcccctctcccttgggctctgatgaaaaattgttgactgcagtttcggaagtttgatctgagaaccaaccatagaatgtttcagttctaggaaataaaaccagttgattaaagcaaaaaaaacaaaaaaaacaaaaaaaaaaaaaaaaaaaaaagacaagagagagagaacagaaagagacgagaaggagagaagacccatacaaagaaagtgaatccacaaaaacgaatgagagagcaaccacaagcagaagaaagaagcagcaacacaacaaagttgggagccccacaaaaaggaggggccctccattatcgaatacgcgaccagtcgacatggcg

SEQ ID NO: 52193 - DNA, 845 bp, Homo sapiens
atgtgatacaactgtgtgcaaacacacggactttatttctctgtgggcatatatgtaaatgtacagaaaccagcctggaagaaggcatgccacactgatgacagcatctgcctctaggggaacacggcggagggcctggaacaggcaggggtactcaaggtccattttcaccttactgactgaaattttatacagagaaaaatacattcagtaaatatttttttaaaagtttaaaaattcacttaaagaaaaaaggtcattgtagtggaagtggcaaataaatgccagttaatgtttttcatacttaggaataaaaagagtagaatgatttcctaaaaagggccatggatggcaaatgtagagactatgggcaattccctgaagtgtattccttagaaatcaaacagtgcctcccacacatagatacaggcatcctctgtacctcgactttatcttaccagagcagctgccttccaggattttgtaatggtcttagaaaatcaatccctacaaacatgcagttagaggggaaaaaatgacataaaattgcatgttttacggtaaatctaaagtacttctttacctcccacttggaagttttaggcagtttcattccttaatgtttctatagcacccaaagtggcaattctcgaggacggagccaaaaccaaaaccacacctgcccacatacctgcaggaaaggagtgggtaaggagccccggctgctggtgggatgctatatccctcagctgtgcaaggcagcaaacaggattaagacctgttaattctaagtctagctttagtattaaacactatcatctatccaaaaaaaataattcattgat

SEQ ID NO: 52194 - DNA, 436 bp, Homo sapiens
gacacacttgtcaaccaagatatgcaggtacttctggaaggcgaatcccatcaaacctccttccaaatttaagaatggagctgggtagagctatgtgggtgtgcagtgcttcccaccaaccaaaccactcaggacgctgcttccccagtgatcagcaccagagtttacctggcactttccacctggccatgtctgcaactcagagcagaggctaagggagtccgcctgcacaggacattcagaaacacgggagggtttcaaggttcacgcctctttggcatttcccaggctcccctcacggtgtcggcagtgcccacatcgcaaacttcaggagatgggagcgagaggggcctgttgggtgaccaagctgtcatggctgctgggttccctctttgctgcctgtcagcctcacccctgggcatcccccacctgctgg

SEQ ID NO: 52195 - DNA, 700 bp, Homo sapiens
gcgttgttaaacaaaccaaaaaactatcatttaatatatccacctttctacttagactccatcttgataagaattatattggcccattggacacattttctcccaagaatttaaactgtgaagtaagggatgaaaggatatgtgtcaatgtttgaaggaccaggcagggctgtggcatgtctttgcctgtgattcctatcaattattgtatcctggtttcagttttctagttctcttttgagtgggttcttatattctttcaggaaagtttatttttgctaataatggccagtgtcaatttccagtgctcacaagcaagaaccatgctttcagaaggttggtataagaaggctactgccattctcatgagacttgtaggactctttgacagtagagaaatcacagtagaaaaatacaacttctattgtttgccctgtatgttgcttccctttgatagcagggactcacattaaatgaagccaagaagttacattagagcctttgctgcccaatatgatattactagtcacagatgactgttgaaacctaaatttaaattagaattttaaaaaatttgttgctagtgactatcatattggaaggcacagattgtagaatatttccaccatcaaagaaagttctatcagacaacactgttggagtataaactcaagggtaggcattctgtccttgttatttt

SEQ ID NO: 52196 - DNA, 1134 bp, Homo sapiens
cttcccaacttaatgactcaaaaaaaaaaacaaacactatcttcatagttgtatgggtgaggggaaacttggctggctagttgagcagttctaagtctgcagtcctctaaaggcttgcttgacgatcaaggatctacttccaaggtgtcacactcacataattggcaagttggtgctggttgttggtgggaggcgatagtcctccccatgtgggtctctctatgaggctgcttgagtgtccccacatgatggcttactctcagagcaagctaccaaaggcagcaaggcagaaaccgtaacatcctttatgactttgtctggaaatcatacactgtcacttctgccatattatgtttgtcacacagacagctctcattccttgtgggagctgacttcgaaaaggcatgaatatcaagaggcaaatcaccagggctcatcttgaaggctggctgccatgctgctcccttcatattgatgatgtagtacacatctttgggaggctgaagaatggtccctaaaagatagcagggcctaattcccagaacctgtaaatgttatcttacatggaaatgttatcttatatggaaaaagggtctttgcagatttaactaaattaaggatattgaaatggaaatattattctgagttgtccaggtatgccctaaatgcaatcagagtctttcaaaaagagtacaatggacagaatgtttgtgtcctcccaaaattcctatgttgaaaccctaacccccaaagcgataatgttgggagctagagactttgggaagtaattaggtcatgaggttagagcactcatgaattaaattagtgcccttaaaaaaggaccccagaggccaggagtggtggctcacacctgtaatcccagcactttgggaagccgaggtgggcagatcacttgaggtcaggagtttgagactagcctggccaacatggcaaaaccctatttctactaaaaatacaaaaattagccagatgtggtggcacgtgcctttaattccagctactcaggaggctgaggcatgagaatttcttgaacccaggagatggaggttgcaggaagccaagatggcaccactgcactccagcctgggtgataaagcaagaccctgtctcaaa

SEQ ID NO: 52197 - DNA, 761 bp, Homo sapiens
ttttaatgggctttaatttactcctcataggcctgatgtctagagagttaccagggcttctggaggaaagtctagtattgaatgtttctaatttcatgttatttgctcgattgtagaattttggagagctttgattgaaaagacttggtgatggggtattttagtcaaaaactagccggtgaaggtaaaacgttgaattcatgtattccacggagatttagaaaggtattgcgtacctgagaataacatttcatcatgcatcacctcctccctacacccactgtatttgtgtaaatcaataaataatgattggatgttagatgtgttgtgtttttatgtttgtgtcatcgtgcgtttgacttttagagattgtaggatgtttgagcaagtaagaagctaactgctgtgaggtccccagattatttcacagtctgtagtttgattcttgtctgtatagattactttgagaagggaaagcaatctcccttctagagtcatttcaggtcattgtttgttttctgccaagtgtcattttctctgttctttaaacctagttcgtgattttcaatccaggcaccgcggtgcagtgtaaagataaattccattcccagtgtgacgtgtgtactgatttcataatgtttttatcctgcatgattctgttcaattaggaattgttcaccgatgagaaagtgtggtgataacttagcgttgcttatggaaaacctggttggttttgttcagtgtctctggggtgggggaag

SEQ ID NO: 52198 - DNA, 608 bp, Homo sapiens
tggtaaagagacatcagctttctcaccatggctgtttcataacacaaggagacctggcccaagctcagaggggaaagacccctgggtgttcatggaaaacctttaagcacagtgagaccaaatgttagtagatgggggataaaagggagaaattcatggagtatgcctagaacaggccttgtatgcagcatccccttcttgcctagggacttgaagggccaggcttcctgtcattgcctcactcaaatgtagcccaggaagacattagactgatagcactgatcacctccagacaaaacccctgcacctgcacagtcacatagacttggacaaaagcccatccttactaaggaagacctaacaactatttcttctcacgcccattcttgtccaccgtctttatcaaaaagccaggaaaactgcttcttcagacactttctgagccggctgtattttgaaggacaaaaaaaaaaaaattactcttttgagagcattgtgtctgcaaggtgggctcacgttatttttggtgatcagtttatgactggagttcaaatagactgcttattttataagagtttttaattttgaatattctttttgctgaactg

SEQ ID NO: 52199 - DNA, 537 bp, Homo sapiens
gggtattttaaaagataagaaatttgctgagaattccttaaatttttctaattttcacttgccagtgaggtcattgtcccttttttgcaggtagctttgaaagatgatgatatctccacagctgagaccatgttgttaaaacatccttcatttaaccatttacacatttggttctaaagttcttggttctaaagaatgtgttatcttgagattcttgtcttattactattcttaaaattgctctaaaacttgctgaggtaatcagctttaaattctgtaaatacagataacaaaaccctcttaatcctaaaggtgcttttaaagttcatgtatttatacatgtatgcaagttgcctgttaaactgggaagattttattctaagtaaccaaatcttaaggagctaaagcaaacctgttttataaaatatattaattccaggactaagcaatttctgaaaacagactgatttactgtgctgcttaatatttcctcaaactagaatacaagcgacggtggcagagggaggaagtaactca

SEQ ID NO: 52200 - DNA, 266 bp, Homo sapiens
tgggaggccaaggcaggaggattgcttgaggccaggaatttgagaccagcctgggtaacatagtgagaccctcatctctacaatatacatacatatatatatatatgtatgtatatgtgtatagatgtatatattaggccggtggcatgtgcctgtagtcccatctacttggcaggctgaggccagaggattgcttgagtccagtcatggcagtaagccatgattgtgccactgtgctccagcctaggtgacagagatcctgtctc

SEQ ID NO: 52201 - DNA, 612 bp, Homo sapiens
atacaatgggatatataatgggatattttgttgccatttaaaattacttacaagaatttgataatctggaaaaatacttctgatgttaaacaaatgaaagcaggtattaaataatttctacagaatgatctcaatagatgggtagaaaaaagactgaaaggaaattggactaattattaacagtgattgcctctggatgggtaggattttttctgttttcattttctcagttgtctacaataagcatatattactttaatggtcaagaaaacaggaaggaaaaaaactggaatgagagggaatataaactggaaatcccctatgagctgtgtacagaagtggatgccattaataaatgtaaggagggcatctgtctctaagtagtggcatgccatgcaccttgatatgtcattcaggaccagtagctgcttaggtgtatggatcggagcctccaaacctcgctcactttgaatgccagcgttcgctttattgcatctctctctctcagatctgagacctaaggatgtgttcctggagaggagagcacacatcaagtgaggggagtctggctctgctcccctttattgcccagagcgtccaggcagaccagtc

SEQ ID NO: 52202 - DNA, 267 bp, Homo sapiens
cccctggctgccctcccctcctccttcctcagtgtgactccacgctggaaggtgacacattcccaagaggcctcttggacttttgtgaccctgagactacgtggaagctgacagcagatcagggctcaagcgatagttagaagtggtggctgttccgtgcgtgggcacccccacccccaccccaccaacctcagcatggaagggaggaggggaacggaaaacagtaggagaaacacctgagggagcccatgagcccgggactgatgc

SEQ ID NO: 52203 - DNA, 762 bp, Homo sapiens
aactatacctgatatatgttaagtatttggttgagtcactctgagtacactgcttgtcttgttgctatggttactgctgccttgtgggggtacaccgtgtatcatttttgtcatggactttatttattagcacagacaactctttcttctattatttacgtggttctccctcgttcattattttttaatgtttttcattgttgatttgttttctttttttgaatactttttagttgatgcatttttttcttcacattttgactgccaagttttcagtgattttgaggttcagaaaaagtcagattataaaataatcacaaaaaaattaataaagtaaacaagaagtatttaaagaaagtagaaactaaacagagagagaagtttcctgagttttttagatataggtattttgatgacatttttctcttttatttgcctttagaaagagataattaaaaaataaaaaccaattttccccagtggtgatagattgttatacactcttgcctagtttttattctgttattatgaaaaacatacttttggccaggcgcaatggcccatgcctgtaatcctagcactttgggagcccaaggcaggcagatcacgatcaccttaggtcaggagtttgagaccagcctggccaacgtggcaaaaacccatctctactaaaaatacaaaaattagctgggcgtggtggcatgcctgtaatcccagatactcgagaggctgaggcaggagaatcgcttgagcctgggaggc

SEQ ID NO: 52204 - DNA, 398 bp, Homo sapiens
ttgccgatgggtgcttgtgactggagacagcaactgcaccctctcatttcagcccctcattgaacagcgtctgtgctgctcctctcagcctatggcagctggtttggttgccaggcaatggaaggcagagaccagaagaccttttcttgggaggaagaaaggggagagggaggggagaagcaagaaagaagctcacagcccgaaggcttgctccctcctgagagtctggcccagggctgggggaatgggaatgggggtaaagtcctcacaacccctactttccgtggtttactcctggtggacagccccactttcagagcttgaagccccagagagacggagagggaatgcacgcacctgcacctcctgtgaaggtcagagaaatctgtgactaagga

SEQ ID NO: 52205 - DNA, 1653 bp, Homo sapiens
gccggacgacgggctggtggggtgaacccttcatcctgggtcttttaatttctcaggcggaacgagtggcggcggacagaggcttttggctgcgctgtctgtgggttgtctgggcttggggaactgggcacggagaccgtggcgccggccgccggtcatacagctctgcttccagtcgtcgggcaaaaagctgaggcgcttctcctttaattgcggtgggcggggcgtgccgacgcggcccgcgttgctattggtggccgttgggggcgcggaaactgaacgggccgcaacggccaccgcagctgccttcggcgccgccagccccgccatggctgcgccctgcgcggaggacccctcgctggaaaggcattttaagggccaccgagatgcagttacctgtgtggacttcagtatcaacacaaagcagctggccagtggctccatggactcatgcctcatggtctggcacatgaagccgcagtcacgcgcctaccgcttcactggccacaaggatgccgtcacctgtgtgaacttctctccttcgggacacctgcttgcttccggctcccgagacaagactgtccgcatctgggtacccaatgtcaaaggtgagtccactgtgtttcgtgcacacacagccacagtgaggagtgtccacttctgcagtgatggccagtccttcgtgacagcctctgacgacaagacagtcaaagtgtgggcaactcatcgccagaaattcctgttctccctgagccagcatatcaactgggtccgctgtgccaagttctcccccgacgggcggctcatcgtgtctgccagtgatgacaagactgttaagctgtgggacaagagcagccgggaatgtgtccactcgtattgtgagcatggcggctttgtcacctatgtggacttccaccccagtgggacgtgcattgccgctgccggcatggacaacacagtgaaggtgtgggacgtgcggactcaccggctgctgcagcattatcagttgcacagtgcagcagtgaacgggctctctttccacccgtcgggaaactacctgatcacagcctccagtgactcaaccctgaagatcctggacctgatggagggccggctgctctacacactccacgggcatcagggaccagccaccactgttgccttttcaagaacgggggagtattttgcttctggaggctctgatgaacaagtgatggtttggaagagtaactttgatattgttgatcatggagaagtcacgaaagtgccgaggcccccagccacactggccagctccatggggaatctgccagaagtggacttccctgtccccccaggcagaggcaggagtgtggagtctgtgcagagccagccccaggagcccgtgagtgtgccccagacactgactagcacgctggagcacattgtgggccagctggatgtcctcactcagacagtctccattctggagcagcggttgacactgacagaagacaagctgaagcagtgtctggagaaccagcagctaatcatgcagagagcaacaccatgatcaggggagcaggaatcaggagctcggtggatttgcaggtggcaggccagggatttgtaccatgggacttgggtaaataaaggggactgaactctgtggga

SEQ ID NO: 52206 - DNA, 2040 bp, Homo sapiens
gccggacgacgggctggtggggtgaacccttcatcctgggtcttttaatttctcaggcggaacgagtggcggcggacagaggcttttggctgcgctgtctgtgggttgtctgggcttggggaactgggcacggagaccgtggcgccggccgccggtcatacagctctgcttccagtcgtcgggcaaaaagctgaggcgcttctcctttaattgcggtgggcggggcgtgccgacgcggcccgcgttgctattggtggccgttgggggcgcggaaactgaacgggccgcaacggccaccgcagctgccttcggcgccgccagccccgccatggctgcgccctgcgcggaggacccctcgctggaaaggcattttaagggccaccgagatgcagttacctgtgtggacttcagtatcaacacaaagcagctggccagtggctccatggactcatgcctcatggtctggcacatgaagccgcagtcacgcgcctaccgcttcactggccacaaggatgccgtcacctgtgtgaacttctctccttcgggacacctgcttgcttccggctcccgagacaagactgtccgcatctgggtacccaatgtcaaaggtgagtccactgtgtttcgtgcacacacagccacagtgaggagtgtccacttctgcagtgatggccagtccttcgtgacagcctctgacgacaagacagtcaaagtgtgggcaactcatcgccagaaattcctgttctccctgagccagcatatcaactgggtccgctgtgccaagttctcccccgacgggcggctcatcgtgtctgccagtgatgacaagactgttaagctgtgggacaagagcagccgggaatgtgtccactcgtattgtgagcatggcggctttgtcacctatgtggacttccaccccagtgggacgtgcattgccgctgccggcatggacaacacagtgaaggtgtgggacgtgcggactcaccggctgctgcagcattatcagttgcacagtgcagcagtgaacgggctctctttccacccgtcgggaaactacctgatcacagcctccagtgactcaaccctgaagatcctggacctgatggagggccggctgctctacacactccacgggcatcagggaccagccaccactgttgccttttcaagaacgggggagtattttgcttctggaggctctgatgaacaagtgatggtttggaagagtaactttgatattgttgatcatggagaagtcacgaaagtgccgaggcccccagccacactggccagctccatggggaatctgacagtctccattctggagcagcggttgacactgacagaagacaagctgaagcagtgtctggagaaccagcagctaatcatgcagagagcaacaccatgatcaggggagcaggaatcaggagctcggtggatttgcaggtggcaggccagggatttgtaccatgggacttgggtaaataaaggggactgaactctgtgggaatcacatccatactggagccctggatttttgcagttctgccctccaccttgctatctgcaccaggaggctctccacctggcagccagaggtccccagtgggccgggctcacacacaaatgatgcttcagacccgaatgagaggaccacattttgcttaatgtaaaggagccacttgaaaatgtctgctccttcggggtcctgagattgtggctccccctctggaggaggtggctccacgatgccttgattttcactcatcatttggacatgtgactggcttttcctacctctgccatggtgtagaaattgattgcacattgattggatgagccgggggttttctctaaatctgactaaaggcccaaagtgggcccatctgagtcaggtttgttgagaacaagccctctcaagtgggtggtggcttttcagtggccctgatttctgttccacacgtgttcactggagccaggtgacttcctccttgcgtgagtgagggcacaggaatctcaaaattaaacctgacttcattg

SEQ ID NO: 52207 - DNA, 2224 bp, Homo sapiens
gccggacgacgggctggtggggtgaacccttcatcctgggtcttttaatttctcaggcggaacgagtggcggcggacagaggcttttggctgcgctgtctgtgggttgtctgggcttggggaactgggcacggagaccgtggcgccggccgccggtcatacagctctgcttccagtcgtcgggcaaaaagctgaggcgcttctcctttaattgcggtgggcggggcgtgccgacgcggcccgcgttgctattggtggccgttgggggcgcggaaactgaacgggccgcaacggccaccgcagctgccttcggcgccgccagccccgccatggctgcgccctgcgcggaagagtgctggccctggggaagccccttcctcacccaggcttcacacatttgaccctggctctctctcaggagggaggacccctcgctggaaaggcattttaagggccaccgagatgcagttacctgtgtggacttcagtatcaacacaaagcagctggccagtggctccatggactcatgcctcatggtctggcacatgaagccgcagtcacgcgcctaccgcttcactggccacaaggatgccgtcacctgtgtgaacttctctccttcgggacacctgcttgcttccggctcccgagacaagactgtccgcatctgggtacccaatgtccacagtgaggagtgtccacttctgcagtgatggccagtccttcgtgacagcctctgacgacaagacagtcaaagtgtgggcaactcatcgccagaaattcctgttctccctgagccagcatatcaactgggtccgctgtgccaagttctcccccgacgggcggctcatcgtgtctgccagtgatgacaagactgttaagctgtgggacaagagcagccgggaatgtgtccactcgtattgtgagcatggcggctttgtcacctatgtggacttccaccccagtgggacgtgcattgccgctgccggcatggacaacacagtgaaggtgtgggacgtgcggactcaccggctgctgcagcattatcagttgcacagtgcagcagtgaacgggctctctttccacccgtcgggaaactacctgatcacagcctccagtgactcaaccctgaagatcctggacctgatggagggccggctgctctacacactccacgggcatcagggaccagccaccactgttgccttttcaagaacgggggagtattttgcttctggaggctctgatgaacaagtgatggtttggaagagtaactttgatattgttgatcatggagaagtcacgaaagtgccgaggcccccagccacactggccagctccatggggaatctgccagaagtggacttccctgtccccccaggcagaggcaggagtgtggagtctgtgcagagccagccccaggagcccgtgagtgtgccccagacactgactagcacgctggagcacattgtgggccagctggatgtcctcactcagacagtctccattctggagcagcggttgacactgacagaagacaagctgaagcagtgtctggagaaccagcagctaatcatgcagagagcaacaccatgatcaggggagcaggaatcaggagctcggtggatttgcaggtggcaggccagggatttgtaccatgggacttgggtaaataaaggggactgaactctgtgggaatcacatccatactggagccctggatttttgcagttctgccctccaccttgctatctgcaccaggaggctctccacctggcagccagaggtccccagtgggccgggctcacacacaaatgatgcttcagacccgaatgagaggaccacattttgcttaatgtaaaggagccacttgaaaatgtctgctccttcggggtcctgagattgtggctccccctctggaggaggtggctccacgatgccttgattttcactcatcatttggacatgtgactggcttttcctacctctgccatggtgtagaaattgattgcacattgattggatgagccgggggttttctctaaatctgactaaaggcccaaagtgggcccatctgagtcaggtttgttgagaacaagccctctcaagtgggtggtggcttttcagtggccctgatttctgttccacacgtgttcactggagccaggtgacttcctccttgcgtgagtgagggcacaggaatctcaaaattaaacctgacttcattg

SEQ ID NO: 52208 - DNA, 1238 bp, Homo sapiens
ctgacttagcaggatccttagacagctggacccccgtcaccggctgctgaagctttatagttgcacagtgcagcagtgaacgggctctctttccacccgtcgggaaactacctgatcacagcctccagtgactcaaccctgaagatcctggacctgatggagggccggctgctctacacactccacgggcatcagggaccagccaccactgttgccttttcaagaacgggggagtattttgcttctggaggctctgatgaacaagtgatggtttggaagagtaactttgatattgttgatcatggagaagtcacgaaagtgccgaggcccccagccacactggccagctccatggggaatctgccagaagtggacttccctgtccccccaggcagaggcaggagtgtggagtctgtgcagagccagccccaggagcccgtgagtgtgccccagacactgactagcacgctggagcacattgtgggccagctggatgtcctcactcagacagtctccattctggagcagcggttgacactgacagaagacaagctgaagcagtgtctggagaaccagcagctaatcatgcagagagcaacaccatgatcaggggagcaggaatcaggagctcggtggatttgcaggtggcaggccagggatttgtaccatgggacttgggtaaataaaggggactgaactctgtgggaatcacatccatactggagccctggatttttgcagttctgccctccaccttgctatctgcaccaggaggctctccacctggcagccagaggtccccagtgggccgggctcacacacaaatgatgcttcagacccgaatgagaggaccacattttgcttaatgtaaaggagccacttgaaaatgtctgctccttcggggtcctgagattgtggctccccctctggaggaggtggctccacgatgccttgattttcactcatcatttggacatgtgactggcttttcctacctctgccatggtgtagaaattgattgcacattgattggatgagccgggggttttctctaaatctgactaaaggcccaaagtgggcccatctgagtcaggtttgttgagaacaagccctctcaagtgggtggtggcttttcagtggccctgatttctgttccacacgtgttcactggagccaggtgacttcctccttgcgtgagtgagggcacaggaatctcaaaattaaacctgacttcattg

SEQ ID NO: 52209 - DNA, 1933 bp, Homo sapiens
gccggacgacgggctggtggggtgaacccttcatcctgggtcttttaatttctcaggcggaacgagtggcggcggacagaggcttttggctgcgctgtctgtgggttgtctgggcttggggaactgggcacggagaccgtggcgccggccgccggtcatacagctctgcttccagtcgtcgggcaaaaagctgaggcgcttctcctttaattgcggtgggcggggcgtgccgacgcggcccgcgttgctattggtggccgttgggggcgcggaaactgaacgggccgcaacggccaccgcagctgccttcggcgccgccagccccgccatggctgcgccctgcgcggaggacccctcgctggaaaggcattttaagggccaccgagatgcagttacctgtgtggacttcagtatcaacacaaagcagctggccagtggctccatggactcatgcctcatggtctggcacatgaagccgcagtcacgcgcctaccgcttcactggccacaaggatgccgtcacctgtgtgaacttctctccttcgggacacctgcttgcttccggctcccgagacaagactgtccgcatctgggtacccaatgtcaaaggtgagtccactgtgtttcgtgcacacacagccacagtgaggagtgtccacttctgcagtgatggccagtccttcgtgacagcctctgacgacaagacagtcaaagtgtgggcaactcatcgccagaaattcctgttctccctgagccagcatatcaactgggtccgctgtgccaagttctcccccgacgggcggctcatcgtgtctgccagtgatgacaagactgttaagctgtgggacaagagcagccgggaatgtgtccactcgtattgtgagcatggcggctttgtcacctatgtggacttccaccccagtgggacgtgcattgccgctgccggcatggacaacacagtgaaggtgtgggacgtgcggactcaccggctgctgcagcattatcagttgcacagtgcagcagtgaacgggctctggaccagccaccactgttgccttttcaagaacgggggagtattttgcttctggaggctctgatgaacaagtgatggtttggaagagtaactttgatattgttgatcatggagaagtcacgaaagtgccgaggcccccagccacactggccagctccatggggaatctgacagtctccattctggagcagcggttgacactgacagaagacaagctgaagcagtgtctggagaaccagcagctaatcatgcagagagcaacaccatgatcaggggagcaggaatcaggagctcggtggatttgcaggtggcaggccagggatttgtaccatgggacttgggtaaataaaggggactgaactctgtgggaatcacatccatactggagccctggatttttgcagttctgccctccaccttgctatctgcaccaggaggctctccacctggcagccagaggtccccagtgggccgggctcacacacaaatgatgcttcagacccgaatgagaggaccacattttgcttaatgtaaaggagccacttgaaaatgtctgctccttcggggtcctgagattgtggctccccctctggaggaggtggctccacgatgccttgattttcactcatcatttggacatgtgactggcttttcctacctctgccatggtgtagaaattgattgcacattgattggatgagccgggggttttctctaaatctgactaaaggcccaaagtgggcccatctgagtcaggtttgttgagaacaagccctctcaagtgggtggtggcttttcagtggccctgatttctgttccacacgtgttcactggagccaggtgacttcctccttgcgtgagtgagggcacaggaatctcaaaattaaacctgacttcattg

SEQ ID NO: 52210 - DNA, 872 bp, Homo sapiens
  misc_feature (58)..(58): n is a, c, g, or t
  misc_feature (129)..(129): n is a, c, g, or t
  misc_feature (137)..(137): n is a, c, g, or t
cccagccaaactggccagctccatggggaatctgggcttccctggcaccgagaccgtntctgggaactggttctatggctggccaaagtaactcaaccccatagggagcccaggagaactgcagccatntctcaggngctaacagtctccattctggagcagcggttgacactgacagaagacaagctgaagcagtgtctggagaaccagcagctaatcatgcagagagcaacaccatgatcaggggagcaggaatcaggagctcggtggatttgcaggtggcaggccagggatttgtaccatgggacttgggtaaataaaggggactgaactctgtgggaatcacatccatactggagccctggatttttgcagttctgccctccaccttgctatctgcaccaggaggctctccacctggcagccagaggtccccagtgggccgggctcacacacaaatgatgcttcagacccgaatgagaggaccacattttgcttaatgtaaaggagccacttgaaaatgtctgctccttcggggtcctgagattgtggctccccctctggaggaggtggctccacgatgccttgattttcactcatcatttggacatgtgactggcttttcctacctctgccatggtgtagaaattgattgcacattgattggatgagccgggggttttctctaaatctgactaaaggcccaaagtgggcccatctgagtcaggtttgttgagaacaagccctctcaagtgggtggtggcttttcagtggccctgatttctgttccacacgtgttcactggagccaggtgacttcctccttgcgtgagtgagggcacaggaatctcaaaattaaacctgacttcattg

SEQ ID NO: 52211 - DNA, 2184 bp, Homo sapiens
gccggacgacgggctggtggggtgaacccttcatcctgggtcttttaatttctcaggcggaacgagtggcggcggacagaggcttttggctgcgctgtctgtgggttgtctgggcttggggaactgggcacggagaccgtggcgccggccgccggtcatacagctctgcttccagtcgtcgggcaaaaagctgaggcgcttctcctttaattgcggtgggcggggcgtgccgacgcggcccgcgttgctattggtggccgttgggggcgcggaaactgaacgggccgcaacggccaccgcagctgccttcggcgccgccagccccgccatggctgcgccctgcgcggaggacccctcgctggaaaggcattttaagggccaccgagatgcagttacctgtgtggacttcagtatcaacacaaagcagctggccagtggctccatggactcatgcctcatggtctggcacatgaagccgcagtcacgcgcctaccgcttcactggccacaaggatgccgtcacctgtgtgaacttctctccttcgggacacctgcttgcttccggctcccgagacaagactgtccgcatctgggtacccaatgtcaaaggtgagtccactgtgtttcgtgcacacacagccacagtgaggagtgtccacttctgcagtgatggccagtccttcgtgacagcctctgacgacaagacagtcaaagtgtgggcaactcatcgccagaaattcctgttctccctgagccagcatatcaactgggtccgctgtgccaagttctcccccgacgggcggctcatcgtgtctgccagtgatgacaagactgttaagctgtgggacaagagcagccgggaatgtgtccactcgtattgtgagcatggcggctttgtcacctatgtggacttccaccccagtgggacgtgcattgccgctgccggcatggacaacacagtgaaggtgtgggacgtgcggactcaccggctgctgcagcattatcagttgcacagtgcagcagtgaacgggctctctttccacccgtcgggaaactacctgatcacagcctccagtgactcaaccctgaagatcctggacctgatggagggccggctgctctacacactccacgggcatcagggaccagccaccactgttgccttttcaagaacgggggagtattttgcttctggaggctctgatgaacaagtgatggtttggaagagtaactttgatattgttgatcatggagaagtcacgaaagtgccgaggcccccagccacactggccagctccatggggaatctgccagaagtggacttccctgtccccccaggcagaggcaggagtgtggagtctgtgcagagccagccccaggagcccgtgagtgtgccccagacactgactagcacgctggagcacattgtgggccagctggatgtcctcactcagacagtctccattctggagcagcggttgacactgacagaagacaagctgaagcagtgtctggagaaccagcagctaatcatgcagagagcaacaccatgatcaggggagcaggaatcaggagctcggtggatttgcaggtggcaggccagggatttgtaccatgggacttgggtaaataaaggggactgaactctgtgggaatcacatccatactggagccctggatttttgcagttctgccctccaccttgctatctgcaccaggaggctctccacctggcagccagaggtccccagtgggccgggctcacacacaaatgatgcttcagacccgaatgagaggaccacattttgcttaatgtaaaggagccacttgaaaatgtctgctccttcggggtcctgagattgtggctccccctctggaggaggtggctccacgatgccttgattttcactcatcatttggacatgtgactggcttttcctacctctgccatggtgtagaaattgattgcacattgattggatgagccgggggttttctctaaatctgactaaaggcccaaagtgggcccatctgagtcaggtttgttgagaacaagccctctcaagtgggtggtggcttttcagtggccctgatttctgttccacacgtgttcactggagccaggtgacttcctccttgcgtgagtgagggcacaggaatctcaaaattaaacctgacttcattg

SEQ ID NO: 52212 - DNA, 1861 bp, Homo sapiens
aaggctggtgtgaatcggacgaggaggacccctcgctggaaaggcattttaagggccaccgagatgcagttacctgtgtggacttcagtatcaacacaaagcagctggccagtggctccatggactcatgcctcatggtctggcacatgaagccgcagtcacgcgcctaccgcttcactggccacaaggatgccgtcacctgtgtgaacttctctccttcgggacacctgcttgcttccggctcccgagacaagactgtccgcatctgggtacccaatgtcaaaggtgagtccactgtgtttcgtgcacacacagccacagtgaggagtgtccacttctgcagtgatggccagtccttcgtgacagcctctgacgacaagacagtcaaagtgtgggcaactcatcgccagaaattcctgttctccctgagccagcatatcaactgggtccgctgtgccaagttctcccccgacgggcggctcatcgtgtctgccagtgatgacaagactgttaagctgtgggacaagagcagccgggaatgtgtccactcgtattgtgagcatggcggctttgtcacctatgtggacttccaccccagtgggacgtgcattgccgctgccggcatggacaacacagtgaaggtgtgggacgtgcggactcaccggctgctgcagcattatcagttgcacagtgcagcagtgaacgggctctctttccacccgtcgggaaactacctgatcacagcctccagtgactcaaccctgaagatcctggacctgatggagggccggctgctctacacactccacgggcatcagggaccagccaccactgttgccttttcaagaacgggggagtattttgcttctggaggctctgatgaacaagtgatggtttggaagagtaactttgatattgttgatcatggagaagtcacgaaagtgccgaggcccccagccacactggccagctccatggggaatctgccagaagtggacttccctgtccccccaggcagaggcaggagtgtggagtctgtgcagagccagccccaggagcccgtgagtgtgccccagacactgactagcacgctggagcacattgtgggccagctggatgtcctcactcagacagtctccattctggagcagcggttgacactgacagaagacaagctgaagcagtgtctggagaaccagcagctaatcatgcagagagcaacaccatgatcaggggagcaggaatcaggagctcggtggatttgcaggtggcaggccagggatttgtaccatgggacttgggtaaataaaggggactgaactctgtgggaatcacatccatactggagccctggatttttgcagttctgccctccaccttgctatctgcaccaggaggctctccacctggcagccagaggtccccagtgggccgggctcacacacaaatgatgcttcagacccgaatgagaggaccacattttgcttaatgtaaaggagccacttgaaaatgtctgctccttcggggtcctgagattgtggctccccctctggaggaggtggctccacgatgccttgattttcactcatcatttggacatgtgactggcttttcctacctctgccatggtgtagaaattgattgcacattgattggatgagccgggggttttctctaaatctgactaaaggcccaaagtgggcccatctgagtcaggtttgttgagaacaagccctctcaagtgggtggtggcttttcagtggccctgatttctgttccacacgtgttcactggagccaggtgacttcctccttgcgtgagtgagggcacaggaatctcaaaattaaacctgacttcattg

SEQ ID NO: 52213 - DNA, 2012 bp, Homo sapiens
gccggacgacgggctggtggggtgaacccttcatcctgggtcttttaatttctcaggcggaacgagtggcggcggacagaggcttttggctgcgctgtctgtgggttgtctgggcttggggaactgggcacggagaccgtggcgccggccgccggtcatacagctctgcttccagtcgtcgggcaaaaagctgaggcgcttctcctttaattgcggtgggcggggcgtgccgacgcggcccgcgttgctattggtggccgttgggggcgcggaaactgaacgggccgcaacggccaccgcagctgccttcggcgccgccagccccgccatggctgcgccctgcgcggaggacccctcgctggaaaggcattttaagggccaccgagatgcagttacctgtgtggacttcagtatcaacacaaagcagctggccagtggctccatggactcatgcctcatggtctggcacatgaagccgcagtcacgcgcctaccgcttcactggccacaaggatgccgtcacctgtgtgaacttctctccttcgggacacctgcttgcttccggctcccgagacaagactgtccgcatctgggtacccaatgtcaaaggtgagtccactgtgtttcgtgcacacacagccacagtgaggagtgtccacttctgcagtgatggccagtccttcgtgacagcctctgacgacaagacagtcaaagtgtgggcaactcatcgccagaaattcctgttctccctgagccagcatatcaactgggtccgctgtgccaagttctcccccgacgggcggctcatcgtgtctgccagtgatgacaagactgttaagctgtgggacaagagcagccgggaatgtgtccactcgtattgtgagcatggcggctttgtcacctatgtggacttccaccccagtgggacgtgcattgccgctgccggcatggacaacacagtgaaggtgtgggacgtgcggactcaccggctgctgcagcattatcagttgcacagtgcagcagtgaacgggctctctttccacccgtcgggaaactacctgatcacagcctccagtgactcaaccctgaagatcctggacctgatggagggccggctgctctacacactccacgggcatcagggaccagccaccactgttgccttttcaagaacgggggagtattttgcttctggaggctctgatgaacaagtgatggtttggaagagtaactttgatattgttgatcatggagaagtcacgaaagtgccgaggcccccagccacactggccagctccatggggaatctgccagaagtggacttccctgtccccccaggcagaggcaggagtgtggagtctgtgcagagccagccccaggagcccgtgagtgtgccccagacactgactagcacgctggagcacattgtgggccagctggatgtcctcactcagacagtctccattctggagcagcggttgacactgacagaagacaagctgaagcagtgtctggagaaccagcagctaatcatgcagagagcaacaccatgatcaggggagcaggaatcaggagctcggtggatttgcaggtggcaggccagggatttgtaccatgggacttgggtaaataaaggggactgaactctgtgggaatcacatccatactggagccctggatttttgcagttctgccctccaccttgctatctgcaccaggaggctctccacctggcagccagaggtccccagtgggccgggctcacacacaaatgatgcttcagacccgaatgagaggaccacattttgcttaatgtaaaggagccacttgaaaatgtctgctccttcggggtcctgagattgtggctccccctctggaggaggtggctccacgatgccttgattttcactcatcatttggacatgtgactggcttttcctacctctgccatggtgtagaaattgattgcacaggaatctcaaaattaaacctgaattcaatgcaaaaaaaaaa

SEQ ID NO: 52214 - DNA, 1917 bp, Homo sapiens
gccggacgacgggctggtggggtgaacccttcatcctgggtcttttaatttctcaggcggaacgagtggcggcggacagaggcttttggctgcgctgtctgtgggttgtctgggcttggggaactgggcacggagaccgtggcgccggccgccggtcatacagctctgcttccagtcgtcgggcaaaaagctgaggcgcttctcctttaattgcggtgggcggggcgtgccgacgcggcccgcgttgctattggtggccgttgggggcgcggaaactgaacgggccgcaacggccaccgcagctgccttcggcgccgccagccccgccatggctgcgccctgcgcggaggacccctcgctggaaaggcattttaagggccaccgagatgcagttacctgtgtggacttcagtatcaacacaaagcagctggccagtggctccatggactcatgcctcatggtctggcacatgaagccgcagtcacgcgcctaccgcttcactggccacaaggatgccgtcacctgtgtgaacttctctccttcgggacacctgcttgcttccggctcccgagaaaattcctgttctccctgagccagcatatcaactgggtccgctgtgccaagttctcccccgacgggcggctcatcgtgtctgccagtgatgacaagactgttaagctgtgggacaagagcagccgggaatgtgtccactcgtattgtgagcatggcggctttgtcacctatgtggacttccaccccagtgggacgtgcattgccgctgccggcatggacaacacagtgaaggtgtgggacgtgcggactcaccggctgctgcagcattatcagttgcacagtgcagcagtgaacgggctctggaccagccaccactgttgccttttcaagaacgggggagtattttgcttctggaggctctgatgaacaagtgatggtttggaagagtaactttgatattgttgatcatggagaagtcacgaaagtgccgaggcccccagccacactggccagctccatggggaatctgccagaagtggacttccctgtccccccaggcagaggcaggagtgtggagtctgtgcagagccagccccaggagcccgtgagtgtgccccagacactgactagcacgctggagcacattgtgggccagctggatgtcctcactcagacagtctccattctggagcagcggttgacactgacagaagacaagctgaagcagtgtctggagaaccagcagctaatcatgcagagagcaacaccatgatcaggggagcaggaatcaggagctcggtggatttgcaggtggcaggccagggatttgtaccatgggacttgggtaaataaaggggactgaactctgtgggaatcacatccatactggagccctggatttttgcagttctgccctccaccttgctatctgcaccaggaggctctccacctggcagccagaggtccccagtgggccgggctcacacacaaatgatgcttcagacccgaatgagaggaccacattttgcttaatgtaaaggagccacttgaaaatgtctgctccttcggggtcctgagattgtggctccccctctggaggaggtggctccacgatgccttgattttcactcatcatttggacatgtgactggcttttcctacctctgccatggtgtagaaattgattgcacattgattggatgagccgggggttttctctaaatctgactaaaggcccaaagtgggcccatctgagtcaggtttgttgagaacaagccctctcaagtgggtggtggcttttcagtggccctgatttctgttccacacgtgttcactggagccaggtgacttcctccttgcgtgagtgagggcacaggaatctcaaaattaaacctgacttcattg

SEQ ID NO: 52215 - DNA, 2295 bp, Homo sapiens
agtcgctcaggctactcccaccccgccccgccccgtcattgtccccgtcggtctcttttctcttccgtcctaaaagctctgcgagccgctcccttctcccggtgccccgcgtctgtccatcctcagtgggtcagacgagcaggatggagggctgcagaactggctcaggaaagccctcctgggatggctggagtggaaaatgaggatgaggcagagctgaatctgagggagcagggtggcttcactgggaaggaggaggtggtagagcagggagagctgaatgccacagaggaggtctggatcccaggcgaggggcacccagagagccctgagcccaaagagcagagaggcctggttgagggagccagtgtgaagggaggggctgagggcctccaggaccctgaagggcaatcacaacaggtgggggccccaggcctccaggctccccaggggctgccagaggcgatagagcccctggtggaagatgatgtggccccagggggtgaccaagcctccccagaggtcatgttggggtcagagcctgccatgggtgagtctgctgcgggagctgagccaggcctggggcagggggtgggagggctgggggacccaggccatctgaccagggaagaggtgatggaaccacccctggaagaggagagtttggaggcaaagagggttcagggcttggaagggcctagaaaggacctagaggaggcaggtggtctggggacagagttctccgagctgcctggaaagagcagagacccttgggagcctcccagggagggtagggaggagtcagaggctgaggcccccaggggagcagaggaggcgttccctgctgagaccctgggccacactggaagtgatgccccttcaccttggcctctggggtcagaggaagctgaggaggatgtaccaccagtgctggtctcccccagcccaacgtacaccccgatcctggaagatgcccctgggcctcagcctcaggctgaagggagtcaggaggctagctggggggtgcaggggagggctgaagccctggggaaagtagagagcgagcaggaggagttgggttctggggagatccccgagggcctccaggaggaaggggaggagagcagagaagagagcgaggaggatgagaggaggggagggagccaggggctgggcggtgggggccagggtcttctgttggcagcctccaggctctgagtagctcccagagaggggaattcctggagtctgattctgtgagtgtcagtgtcccctgggatgacagcttgaggggtgcagtggctggtgcccccaagactgccctggaaacggagtcccaggacagtgctgagccttctggctcagaggaagagtctgaccctgtttccttggagagggaggacaaagtccctggccctctagagatccccagtgggatggaggatgcaggcccaggggcagacatcattggtgttaatggccagggtcccaacttggaggggaagtcacagcatgtgaatgggggagtgatgaacgggctggagcagtctgaggaagtggggcaaggaatgccgctagtctctgagggagaccgagggagcccctttcaggaggaggaggggagtgctctgaagacctcttgggcaggggctcctgttcacctgggccagggtcagttcctgaagttcactcagagggaaggagatagagagtcctggtcctcaggggaggactaggaaaagaccatctgcccggcactggggacttaggggtgcggggaggggaaggacgcctccaagcccgctccctgctcaggagcagcactcttaacttacgatctcttgacatatggtttctggctgagaggcctggcccgctaaggtgaaaaggggtgtggcaaaggagcctactccaagaatggaggctgtaggaatataacctcccaccctgcaaagggaatctcttgcctgctccatctcataggctaagtcagctgaatcccgatagtactaggtccccttccctccgcatcccgtcagctggaaaaggcctgtggcccagaggcttctccaaagggagggtgacatgctggcttttgtgcccaagctcaccagccctgcgccacctcactgcagtagtgcaccatctcactgcagtagcacgccctcctgggccgtctggcctgtggctaatggaggtgacggcactcccatgtgctgactccccccatccctgccacgctgtggccctgcctggctagtccctgcctgaataaagtaatgcctccgcttcaaa

SEQ ID NO: 52216 - DNA, 989 bp, Homo sapiens
aaataggcaggtacgggctgggtgttaattcggacgagcagttcctgaagttcactcagagggaaggagatagagagtcctggtcctcaggggaggactaggaaaagaccatctgcccggcactggggacttaggggtgcggggaggggaaggacgcctccaagcccgctccctgctcaggagcagcactcttaacttacgatctcttgacatatggtttctggctgagaggcctggcccgctaaggtgaaaaggggtgtggcaaaggagcctactccaagaatggaggctgtaggaatataacctcccaccctgcaaagggaatctcttgcctgctccatctcataggctaagtcagctgaatcccgatagtactaggtccccttccctccgcatcccgtcagctggaaaaggcctgtggcccagaggcttctccaaagggagggtgacatgctggcttttgtgcccaagctcaccagccctgcgccacctcactgcagtagtgcaccatctcactgcagtagcacgccctcctgggccgtctggcctgtggctaatggaggtgacggcactcccatgtgctgactccccccatccctgccacgctgtggccctgcctggctagtccctgcctgaataaagtaatgcctccgcttcaaaaaaaaaaaaaaaaaaaaaaaaaaaaaaaaaaacgcgcggggtccttttgcggggggggaaacagacgggttaaaagcgggcagtggcgcaatgggtttcctggagcccgttttttgtacagggggagaatcgggggccccaaagaggggggagtaatctgaaacgcggctcattctatttctgtagatggtagataggatacgaagacaggggtttgtggcgcgcaataatatattgagaactgtggtagcaaaaacaactaagggtgttgaagcaacaacaatcagagtgaacggcaacaaattaaagtgacaaccaaaaacgcactg

SEQ ID NO: 52217 - DNA, 363 bp, Homo sapiens
atatgactccccgcaccctaagtccccagtgacgggcagatggtcttttcctagtcctcccctgtaggaccaggactctctgtccccttccctccgcatcccgtcagctggaaaaggcctgtggcccagaggcttctccaaagggagggtgacatgctggcttttgtgcccaagctcaccagccctgcgccacctcactgcagtagtgcaccatctcactgcagtagcacgccctcctgggccgtctggcctgtggctaatggaggtgacggcactcccatgtgctgactccccccatccctgccacgctgtggccctgcctggctagtccctgcctgaataaagtaatgcctccgcttcaaa

SEQ ID NO: 52218 - DNA, 4152 bp, Homo sapiens
ctgctacccttgagacacctgtgccagcctttcttaagaaccaagaattcctccaggcccgtacccctaccttggccacggcaagaggccagtacaggccagtccccagaggaccatgcctccttggcaccacccctcagccctgaccactccagtttagaggctaaggatggagaatccggtgggtctagagtgttcagcatatgccgaggggaaggtgaagggcaaatctgggggttggtagagaaagaaacagccatagagggcaaagtggtaagcagcttgcagcaggaaatatgggaagaagaggatctaaacaggaaggaaatccaggactcccaggttcctttggaaaaagaaaccctgaagtctctgggagaggagattcaagagtcactgaagactctggaaaaccagagccatgagacactagaaagggagaatcaagaatgtccgaggtctttagaagaagacttagaaacactaaaaagtctagaaaaggaaaataaagagctattaaaggatgtggaggtagtgagacctctagaaaaagaggctgtaggccaacttaagcctacaggaaaagaggacacacagacattgcaatccctgcaaaaggagaatcaagaactaatgaaatctcttgaaggtaatctagagacatttttatttccaggaacggaaaatcaagaattagtaagttctctgcaagagaacttagagtcattgacagctctggaaaaggagaatcaagagccactgagatctccagaagtaggggatgaggaggcactgagacctctgacaaaggagaatcaggaacccctgaggtctcttgaagatgagaacaaagaggcctttagatctctagaaaaagagaaccaggagccactgaagactctagaagaagaggaccagagtattgtgagacctctagaaacagagaatcacaaatcactgaggtctttagaagaacaggaccaagagacattgagaactcttgaaaaagagactcaacagcgacggaggtctctaggggaacaggatcagatgacattaagacccccagaaaaagtggatctagaaccactgaagtctcttgaccaggagatagctagacctcttgaaaatgagaatcaagagttcttaaagtcactcaaagaagagagcgtagaggcagtaaaatctttagaaacagagatcctagaatcactgaagtctgcgggacaagagaacctggaaacactgaaatctccagaaactcaagcaccactgtggactccagaagaaataaatcagggggcaatgaatcctctagaaaaggaaattcaagaaccactggagtctgtggaagtgaaccaagagacattcagactcctggaagaggagaatcaggaatcattgagatctctgggagcatggaacctggagaatttgagatctccagaggaggtagacaaggaaagtcaaaggaatctggaagaggaagagaacctgggaaagggagagtaccaagagtcactgaggtctctggaggaggagggacaggagctgccgcagtctgcagatgtgcagaggtgggaagatacggtggagaaggaccaagaactggctcaggaaagccctcctgggatggctggagtggaaaatgaggatgaggcagagctgaatctgagggagcagggtggcttcactgggaaggaggaggtggtagagcagggagagctgaatgccacagaggaggtctggatcccaggcgaggggcacccagagagccctgagcccaaagagcagagaggcctggttgagggagccagtgtgaagggaggggctgagggcctccaggaccctgaagggcaatcacaacaggtgggggccccaggcctccaggctccccaggggctgccagaggcgatagagcccctggtggaagatgatgtggccccagggggtgaccaagcctccccagaggtcatgttggggtcagagcctgccatgggtgagtctgctgcgggagctgagccaggcctggggcagggggtgggagggctgggggacccaggccatctgaccagggaagaggtgatggaaccacccctggaagaggagagtttggaggcaaagagggttcagggcttggaagggcctagaaaggacctagaggaggcaggtggtctggggacagagttctccgagctgcctggaaagagcagagacccttgggagcctcccagggagggtagggaggagtcagaggctgaggcccccaggggagcagaggaggcgttccctgctgagaccctgggccacactggaagtgatgccccttcaccttggcctctggggtcagaggaagctgaggaggatgtaccaccagtgctggtctcccccagcccaacgtacaccccgatcctggaagatgcccctgggcctcagcctcaggctgaagggagtcaggaggctagctggggggtgcaggggagggctgaagccctggggaaagtagagagcgagcaggaggagttgggttctggggagatccccgagggcctccaggaggaaggggaggagagcagagaagagagcgaggaggatgagctcggggagacccttccagactccactcccctgggcttctacctcaggtcccccacctcccccaggtgggaccccactggagagcagaggccacccctcaaggggagactggaaaggagggctgggatcctgctgtcctggcttccgagggccttgaggccccaccctcagaaaaggaggagggggaggagggagaagaggagtgtggccgtgactctgacctgtcagaagaatttgaggacctggggactgaggcaccttttcttcctggggtccctggggaggtggcagaacctctgggccaggtgccccagctgctactggatcctgcagcctgggatcgagatggggagtccgatgggtttgcagatgaggaagaaagtggggaggagggagaggaggatcaggaggaggggagggagccaggggctgggcggtgggggccagggtcttctgttggcagcctccaggctctgagtagctcccagagaggggaattcctggagtctgattctgtgagtgtcagtgtcccctgggatgacagcttgaggggtgcagtggctggtgcccccaagactgccctggaaacggagtcccaggacagtgctgagccttctggctcagaggaagagtctgaccctgtttccttggagagggaggacaaagtccctggccctctagagatccccagtgggatggaggatgcaggcccaggggcagacatcattggtgttaatggccagggtcccaacttggaggggaagtcacagcatgtgaatgggggagtgatgaacgggctggagcagtctgaggaagtggggcaaggaatgccgctagtctctgagggagaccgagggagcccctttcaggaggaggaggggagtgctctgaagacctcttgggcaggggctcctgttcacctgggccagggtcagttcctgaagttcactcagagggaaggagatagagagtcctggtcctcaggggaggactaggaaaagaccatctgcccggcactggggacttaggggtgcggggaggggaaggacgcctccaagcccgctccctgctcaggagcagcactcttaacttacgatctcttgacatatggtttctggctgagaggcctggcccgctaaggtgaaaaggggtgtggcaaaggagcctactccaagaatggaggctgtaggaatataacctcccaccctgcaaagggaatctcttgcctgctccatctcataggctaagtcagctgaatcccgatagtactaggtccccttccctccgcatcccgtcagctggaaaaggcctgtggcccagaggcttctccaaagggagggtgacatgctggcttttgtgcccaagctcaccagccctgcgccacctcactgcagtagtgcaccatctcactgcagtagcacgccctcctgggccgtctggcctgtggctaatggaggtgacggcactcccatgtgctgactccccccatccctgccacgctgtggccctgcctggctagtccctgcctgaataaagtaatgcctccgcttcaaa

SEQ ID NO: 52219 - DNA, 2803 bp, Homo sapiens
agttcgacggagactctctagtgaaatggtttttttaaaaaaaacatttcactaaagatctctgggagcatggaacctggagaatttgagatctccagaggaggtagacaaggaaagtcaaaggaatctggaagaggaagagaacctgggaaagggagagtaccaagagtcactgaggtctctggaggaggagggacaggagctgccgcagtctgcagatgtgcagaggtgggaagatacggtggagaaggaccaagaactggctcaggaaagccctcctgggatggctggagtggaaaatgaggatgaggcagagctgaatctgagggagcagggtggcttcactgggaaggaggaggtggtagagcagggagagctgaatgccacagaggaggtctggatcccaggcgaggggcacccagagagccctgagcccaaagagcagagaggcctggttgagggagccagtgtgaagggaggggctgagggcctccaggaccctgaagggcaatcacaacaggtgggggccccaggcctccaggctccccaggggctgccagaggcgatagagcccctggtggaagatgatgtggccccagggggtgaccaagcctccccagaggtcatgttggggtcagagcctgccatgggtgagtctgctgcgggagctgagccaggcctggggcagggggtgggagggctgggggacccaggccatctgaccagggaagaggtgatggaaccacccctggaagaggagagtttggaggcaaagagggttcagggcttggaagggcctagaaaggacctagaggaggcaggtggtctggggacagagttctccgagctgcctggaaagagcagagacccttgggagcctcccagggagggtagggaggagtcagaggctgaggcccccaggggagcagaggaggcgttccctgctgagaccctgggccacactggaagtgatgccccttcaccttggcctctggggtcagaggaagctgaggaggatgtaccaccagtgctggtctcccccagcccaacgtacaccccgatcctggaagatgcccctgggcctcagcctcaggctgaagggagtcaggaggctagctggggggtgcaggggagggctgaagccctggggaaagtagagagcgagcaggaggagttgggttctggggagatccccgagggcctccaggaggaaggggaggagagcagagaagagagcgaggaggatgagctcggggagacccttccagactccactcccctgggcttctacctcaggtcccccacctcccccaggtgggaccccactggagagcagaggccacccctcaaggggagactggaaaggagggctgggatcctgctgtcctggcttccgagggccttgaggccccaccctcagaaaaggaggagggggaggagggagaagaggagtgtggccgtgactctgacctgtcagaagaatttgaggacctggggactgaggcaccttttcttcctggggtccctggggaggtggcagaacctctgggccaggtgccccagctgctactggatcctgcagcctgggatcgagatggggagtccgatgggtttgcagatgaggaagaaagtggggaggagggagaggaggatcaggaggaggggagggagccaggggctgggcggtgggggccagggtcttctgttggcagcctccaggctctgagtagctcccagagaggggaattcctggagtctgattctgtgagtgtcagtgtcccctgggatgacagcttgaggggtgcagtggctggtgcccccaagactgccctggaaacggagtcccaggacagtgctgagccttctggctcagaggaagagtctgaccctgtttccttggagagggaggacaaagtccctggccctctagagatccccagtgggatggaggatgcaggcccaggggcagacatcattggtgttaatggccagggtcccaacttggaggggaagtcacagcatgtgaatgggggagtgatgaacgggctggagcagtctgaggaagtggggcaaggaatgccgctagtctctgagggagaccgagggagcccctttcaggaggaggaggggagtgctctgaagacctcttgggcaggggctcctgttcacctgggccagggtcagttcctgaagttcactcagagggaaggagatagagagtcctggtcctcaggggaggactaggaaaagaccatctgcccggcactggggacttaggggtgcggggaggggaaggacgcctccaagcccgctccctgctcaggagcagcactcttaacttacgatctcttgacatatggtttctggctgagaggcctggcccgctaaggtgaaaaggggtgtggcaaaggagcctactccaagaatggaggctgtaggaatataacctcccaccctgcaaagggaatctcttgcctgctccatctcataggctaagtcagctgaatcccgatagtactaggtccccttccctccgcatcccgtcagctggaaaaggcctgtggcccagaggcttctccaaagggagggtgacatgctggcttttgtgcccaagctcaccagccctgcgccacctcactgcagtagtgcaccatctcactgcagtagcacgccctcctgggccgtctggcctgtggctaatggaggtgacggcactcccatgtgctgactccccccatccctgccacgctgtggccctgcctggctagtccctgcctgaataaagtaatgcctccgcttcaaa

SEQ ID NO: 52220 - DNA, 490 bp, Homo sapiens
acgaatcgagctcggtcccccccgactagcccgacagtgacatatggtttctggctgagaggcctggcccgctaaggtgaaaaggggtgtggcaaaggagcctactccaagaatggaggctgtaggaatataacctcccaccctgcaaagggaatctcttgcctgctccatctcataggctaagtcagctgaatcccgatagtactaggtccccttccctccgcatcccgtcagctggaaaaggcctgtggcccagaggcttctccaaagggagggtgacatgctggcttttgtgcccaagctcaccagccctgcgccacctcactgcagtagtgcaccatctcactgcagtagcacgccctcctgggccgtctggcctgtggctaatggaggtgacggcactcccatgtgctgactccccccatccctgccacgctgtggccctgcctggctagtccctgcctgaataaagtaatgcctccgcttcaaa

SEQ ID NO: 52221 - DNA, 4260 bp, Homo sapiens
ccatcccccccacacctcaggcaccctctccttctgtagatgcagagatcagagcccaggatgctcctctctctctgctccagacacagggtgggaggaaacaggctcccagagcccctgcgggctgaagccagggtggccattcctgccagcgtcctgcctggaccagaggagcctgggggccagcggcaagaggccagtacaggccagtccccagaggaccatgcctccttggcaccacccctcagccctgaccactccagtttagaggctaaggatggagaatccggtgggtctagagtgttcagcatatgccgaggggaaggtgaagggcaaatctgggggttggtagagaaagaaacagccatagagggcaaagtggtaagcagcttgcagcaggaaatatgggaagaagaggatctaaacaggaaggaaatccaggactcccaggttcctttggaaaaagaaaccctgaagtctctgggagaggagattcaagagtcactgaagactctggaaaaccagagccatgagacactagaaagggagaatcaagaatgtccgaggtctttagaagaagacttagaaacactaaaaagtctagaaaaggaaaataaagagctattaaaggatgtggaggtagtgagacctctagaaaaagaggctgtaggccaacttaagcctacaggaaaagaggacacacagacattgcaatccctgcaaaaggagaatcaagaactaatgaaatctcttgaaggtaatctagagacatttttatttccaggaacggaaaatcaagaattagtaagttctctgcaagagaacttagagtcattgacagctctggaaaaggagaatcaagagccactgagatctccagaagtaggggatgaggaggcactgagacctctgacaaaggagaatcaggaacccctgaggtctcttgaagatgagaacaaagaggcctttagatctctagaaaaagagaaccaggagccactgaagactctagaagaagaggaccagagtattgtgagacctctagaaacagagaatcacaaatcactgaggtctttagaagaacaggaccaagagacattgagaactcttgaaaaagagactcaacagcgacggaggtctctaggggaacaggatcagatgacattaagacccccagaaaaagtggatctagaaccactgaagtctcttgaccaggagatagctagacctcttgaaaatgagaatcaagagttcttaaagtcactcaaagaagagagcgtagaggcagtaaaatctttagaaacagagatcctagaatcactgaagtctgcgggacaagagaacctggaaacactgaaatctccagaaactcaagcaccactgtggactccagaagaaataaatcagggggcaatgaatcctctagaaaaggaaattcaagaaccactggagtctgtggaagtgaaccaagagacattcagactcctggaagaggagaatcaggaatcattgagatctctgggagcatggaacctggagaatttgagatctccagaggaggtagacaaggaaagtcaaaggaatctggaagaggaagagaacctgggaaagggagagtaccaagagtcactgaggtctctggaggaggagggacaggagctgccgcagtctgcagatgtgcagaggtgggaagatacggtggagaaggaccaagaactggctcaggaaagccctcctgggatggctggagtggaaaatgaggatgaggcagagctgaatctgagggagcagggtggcttcactgggaaggaggaggtggtagagcagggagagctgaatgccacagaggaggtctggatcccaggcgaggggcacccagagagccctgagcccaaagagcagagaggcctggttgagggagccagtgtgaagggaggggctgagggcctccaggaccctgaagggcaatcacaacaggtgggggccccaggcctccaggctccccaggggctgccagaggcgatagagcccctggtggaagatgatgtggccccagggggtgaccaagcctccccagaggtcatgttggggtcagagcctgccatgggtgagtctgctgcgggagctgagccaggcctggggcagggggtgggagggctgggggacccaggccatctgaccagggaagaggtgatggaaccacccctggaagaggagagtttggaggcaaagagggttcagggcttggaagggcctagaaaggacctagaggaggcaggtggtctggggacagagttctccgagctgcctggaaagagcagagacccttgggagcctcccagggagggtagggaggagtcagaggctgaggcccccaggggagcagaggaggcgttccctgctgagaccctgggccacactggaagtgatgccccttcaccttggcctctggggtcagaggaagctgaggaggatgtaccaccagtgctggtctcccccagcccaacgtacaccccgatcctggaagatgcccctgggcctcagcctcaggctgaagggagtcaggaggctagctggggggtgcaggggagggctgaagccctggggaaagtagagagcgagcaggaggagttgggttctggggagatccccgagggcctccaggaggaaggggaggagagcagagaagagagcgaggaggatgagctcggggagacccttccagactccactcccctgggcttctacctcaggtcccccacctcccccaggtgggaccccactggagagcagaggccacccctcaaggggagactggaaaggagggctgggatcctgctgtcctggcttccgagggccttgaggccccaccctcagaaaaggaggagggggaggagggagaagaggagtgtggccgtgactctgacctgtcagaagaatttgaggacctggggactgaggcaccttttcttcctggggtccctggggaggtggcagaacctctgggccaggtgccccagctgctactggatcctgcagcctgggatcgagatggggagtccgatgggtttgcagatgaggaagaaagtggggaggagggagaggaggatcaggaggaggggagggagccaggggctgggcggtgggggccagggtcttctgttggcagcctccaggctctgagtagctcccagagaggggaattcctggagtctgattctgtgagtgtcagtgtcccctgggatgacagcttgaggggtgcagtggctggtgcccccaagactgccctggaaacggagtcccaggacagtgctgagccttctggctcagaggaagagtctgaccctgtttccttggagagggaggacaaagtccctggccctctagagatccccagtgggatggaggatgcaggcccaggggcagacatcattggtgttaatggccagggtcccaacttggaggggaagtcacagcatgtgaatgggggagtgatgaacgggctggagcagtctgaggaagtggggcaaggaatgccgctagtctctgagggagaccgagggagcccctttcaggaggaggaggggagtgctctgaagacctcttgggcaggggctcctgttcacctgggccagggtcagttcctgaagttcactcagagggaaggagatagagagtcctggtcctcaggggaggactaggaaaagaccatctgcccggcactggggacttaggggtgcggggaggggaaggacgcctccaagcccgctccctgctcaggagcagcactcttaacttacgatctcttgacatatggtttctggctgagaggcctggcccgctaaggtgaaaaggggtgtggcaaaggagcctactccaagaatggaggctgtaggaatataacctcccaccctgcaaagggaatctcttgcctgctccatctcataggctaagtcagctgaatcccgatagtactaggtccccttccctccgcatcccgtcagctggaaaaggcctgtggcccagaggcttctccaaagggagggtgacatgctggcttttgtgcccaagctcaccagccctgcgccacctcactgcagtagtgcaccatctcactgcagtagcacgccctcctgggccgtctggcctgtggctaatggaggtgacggcactcccatgtgctgactccccccatccctgccacgctgtggccctgcctggctagtccctgcctgaataaagtaatgcctccgcttcaaa

SEQ ID NO: 52222 - DNA, 4466 bp, Homo sapiens
ccatcccccccacacctcaggcaccctctccttctgtagatgcagagatcagagcccaggatgctcctctctctctgctccagacacagggtgggaggaaacaggctcccagagcccctgcgggctgaagccagggtggccattcctgccagcgtcctgcctggaccagaggagcctgggggccagcggcaagaggccagtacaggccagtccccagaggaccatgcctccttggcaccacccctcagccctgaccactccagtttagaggctaaggatggagaatccggtgggtctagagtgttcagcatatgccgaggggaaggtgaagggcaaatctgggggttggtagagaaagaaacagccatagagggcaaagtggtaagcagcttgcagcaggaaatatgggaagaagaggatctaaacaggaaggaaatccaggactcccaggttcctttggaaaaagaaaccctgaagtctctgggagaggagattcaagagtcactgaagactctggaaaaccagagccatgagacactagaaagggagaatcaagaatgtccgaggtctttagaagaagacttagaaacactaaaaagtctagaaaaggaaaataaagagctattaaaggatgtggaggtagtgagacctctagaaaaagaggctgtaggccaacttaagcctacaggaaaagaggacacacagacattgcaatccctgcaaaaggagaatcaagaactaatgaaatctcttgaaggtaatctagagacatttttatttccaggaacggaaaatcaagaattagtaagttctctgcaagagaacttagagtcattgacagctctggaaaaggagaatcaagagccactgagatctccagaagtaggggatgaggaggcactgagacctctgacaaaggagaatcaggaacccctgaggtctcttgaagatgagaacaaagaggcctttagatctctagaaaaagagaaccaggagccactgaagactctagaagaagaggaccagagtattgtgagacctctagaaacagagaatcacaaatcactgaggtctttagaagaacaggaccaagagacattgagaactcttgaaaaagagactcaacagcgacggaggtctctaggggaacaggatcagatgacattaagacccccagaaaaagtggatctagaaccactgaagtctcttgaccaggagatagctagacctcttgaaaatgagaatcaagagttcttaaagtcactcaaagaagagagcgtagaggcagtaaaatctttagaaacagagatcctagaatcactgaagtctgcgggacaagagaacctggaaacactgaaatctccagaaactcaagcaccactgtggactccagaagaaataaatcagggggcaatgaatcctctagaaaaggaaattcaagaaccactggagtctgtggaagtgaaccaagagacattcagactcctggaagaggagaatcaggaatcattgagatctctgggagcatggaacctggagaatttgagatctccagaggaggtagacaaggaaagtcaaaggaatctggaagaggaagagaacctgggaaagggagagtaccaagagtcactgaggtctctggaggaggagggacaggagctgccgcagtctgcagatgtgcagaggtgggaagatacggtggagaaggaccaagaactggctcaggaaagccctcctgggatggctggagtggaaaatgaggatgaggcagagctgaatctgagggagcagggtggcttcactgggaaggaggaggtggtagagcagggagagctgaatgccacagaggaggtctggatcccaggcgaggggcacccagagagccctgagcccaaagagcagagaggcctggttgagggagccagtgtgaagggaggggctgagggcctccaggaccctgaagggcaatcacaacaggtgggggccccaggcctccaggctccccaggggctgccagaggcgatagagcccctggtggaagatgatgtggccccagggggtgaccaagcctccccagaggtcatgttggggtcagagcctgccatgggtgagtctgctgcgggagctgagccaggcctggggcagggggtgggagggctgggggacccaggccatctgaccagggaagaggtgatggaaccacccctggaagaggagagtttggaggcaaagagggttcagggcttggaagggcctagaaaggacctagaggaggcaggtggtctggggacagagttctccgagctgcctggaaagagcagagacccttgggagcctcccagggagggtagggaggagtcagaggctgaggcccccaggggagcagaggaggcgttccctgctgagaccctgggccacactggaagtgatgccccttcaccttggcctctggggtcagaggaagctgaggaggatgtaccaccagtgctggtctcccccagcccaacgtacaccccgatcctggaagatgcccctgggcctcagcctcaggctgaagggagtcaggaggctagctggggggtgcaggggagggctgaagccctggggaaagtagagagcgagcaggaggagttgggttctggggagatccccgagggcctccaggaggaaggggaggagagcagagaagagagcgaggaggatgagctcggggagacccttccagactccactcccctgggcttctacctcaggtcccccacctcccccaggtgggaccccactggagagcagaggccacccctcaaggggagactggaaaggagggctgggatcctgctgtcctggcttccgagggccttgaggccccaccctcagaaaaggaggagggggaggagggagaagaggagtgtggccgtgactctgacctgtcagaagaatttgaggacctggggactgaggcaccttttcttcctggggtccctggggaggtggcagaacctctgggccaggtgccccagctgctactggatcctgcagcctgggatcgagatggggagtccgatgggtttgcagatgaggaagaaagtggggaggagggagaggaggatcaggaggaggggagggagccaggggctgggcggtgggggccagggtcttctgttggcagcctccaggctctgagtagctcccagagaggggaattcctggagtctgattctgtgagtgtcagtgtcccctgggatgacagcttgaggggtgcagtggctggtgcccccaagactgccctggaaacggagtcccaggacagtgctgagccttctggctcagaggaagagtctgaccctgtttccttggagagggaggacaaagtccctggccctctagagatccccagtgggatggaggatgcaggcccaggggcagacatcattggtgttaatggccagggtcccaacttggaggggaagtcacagcatgtgaatgggggagtgatgaacgggctggagcagtctgaggaagtggggcaaggaatgccgctagtctctgagggagaccgagggagcccctttcaggaggaggaggggagtgctctgaagacctcttgggcaggggctcctgttcacctgggccagggtcagttcctgaagttcactcagagggaaggagatagagagtcctggtcctcaggggaggactaggaaaagaccatctgcccggcactggggacttaggggtgcggggaggggaaggacgcctccaagcccgctccctgctcaggagcagcactcttaacttacgatctcttgacatatggtttctggctgagaggcctggcccgctaaggtgaaaaggggtgtggcaaaggagcctactccaagaatggaggctgtaggaatataacctcccaccctgcaaagggaatctcttgcctgctccatctcataggctaagtcagctgaatcccgatagtactaggtccccttccctccgcatcccgtcagctggaaaaggcctgtggcccagaggcttctccaaagggagggtgacatgctggcttttgtgcccaagctcaccagccctgcgccacctcactgcagtagtgcaccatctcactgcagtagcacgccctcctgggccgtctggcctgtggctaatggaggtgacggcactcccatgtgctgactccccccatccctgccacgctgtggccctgcctggctagtccctgcctgaataaagtaatgcctccgcttcaaaaaacaacctgacacagagccacacaaaaaacacaccacaacaaaaaaagagacacgagggaactacaattaggagggagtagcagaaaaccagcgggtaacagaaaaaagtgcaaactagagacacaccaaacagagagcaagcggaccacagcagtctatgaagtacacaacaaaagggaaaaaagtcagtgagctcatcacaca

SEQ ID NO: 52223 - DNA, 4267 bp, Homo sapiens
  misc_feature (4253)..(4253): n is a, c, g, or t
ccatcccccccacacctcaggcaccctctccttctgtagatgcagagatcagagcccaggatgctcctctctctctgctccagacacagggtgggaggaaacaggctcccagagcccctgcgggctgaagccagggtggccattcctgccagcgtcctgcctggaccagaggagcctgggggccagcggcaagaggccagtacaggccagtccccagaggaccatgcctccttggcaccacccctcagccctgaccactccagtttagaggctaaggatggagaatccggtgggtctagagtgttcagcatatgccgaggggaaggtgaagggcaaatctgggggttggtagagaaagaaacagccatagagggcaaagtggtaagcagcttgcagcaggaaatatgggaagaagaggatctaaacaggaaggaaatccaggactcccaggttcctttggaaaaagaaaccctgaagtctctgggagaggagattcaagagtcactgaagactctggaaaaccagagccatgagacactagaaagggagaatcaagaatgtccgaggtctttagaagaagacttagaaacactaaaaagtctagaaaaggaaaataaagagctattaaaggatgtggaggtagtgagacctctagaaaaagaggctgtaggccaacttaagcctacaggaaaagaggacacacagacattgcaatccctgcaaaaggagaatcaagaactaatgaaatctcttgaaggtaatctagagacatttttatttccaggaacggaaaatcaagaattagtaagttctctgcaagagaacttagagtcattgacagctctggaaaaggagaatcaagagccactgagatctccagaagtaggggatgaggaggcactgagacctctgacaaaggagaatcaggaacccctgaggtctcttgaagatgagaacaaagaggcctttagatctctagaaaaagagaaccaggagccactgaagactctagaagaagaggaccagagtattgtgagacctctagaaacagagaatcacaaatcactgaggtctttagaagaacaggaccaagagacattgagaactcttgaaaaagagactcaacagcgacggaggtctctaggggaacaggatcagatgacattaagacccccagaaaaagtggatctagaaccactgaagtctcttgaccaggagatagctagacctcttgaaaatgagaatcaagagttcttaaagtcactcaaagaagagagcgtagaggcagtaaaatctttagaaacagagatcctagaatcactgaagtctgcgggacaagagaacctggaaacactgaaatctccagaaactcaagcaccactgtggactccagaagaaataaatcagggggcaatgaatcctctagaaaaggaaattcaagaaccactggagtctgtggaagtgaaccaagagacattcagactcctggaagaggagaatcaggaatcattgagatctctgggagcatggaacctggagaatttgagatctccagaggaggtagacaaggaaagtcaaaggaatctggaagaggaagagaacctgggaaagggagagtaccaagagtcactgaggtctctggaggaggagggacaggagctgccgcagtctgcagatgtgcagaggtgggaagatacggtggagaaggaccaagaactggctcaggaaagccctcctgggatggctggagtggaaaatgaggatgaggcagagctgaatctgagggagcagggtggcttcactgggaaggaggaggtggtagagcagggagagctgaatgccacagaggaggtctggatcccaggcgaggggcacccagagagccctgagcccaaagagcagagaggcctggttgagggagccagtgtgaagggaggggctgagggcctccaggaccctgaagggcaatcacaacaggtgggggccccaggcctccaggctccccaggggctgccagaggcgatagagcccctggtggaagatgatgtggccccagggggtgaccaagcctccccagaggtcatgttggggtcagagcctgccatgggtgagtctgctgcgggagctgagccaggcctggggcagggggtgggagggctgggggacccaggccatctgaccagggaagaggtgatggaaccacccctggaagaggagagtttggaggcaaagagggttcagggcttggaagggcctagaaaggacctagaggaggcaggtggtctggggacagagttctccgagctgcctggaaagagcagagacccttgggagcctcccagggagggtagggaggagtcagaggctgaggcccccaggggagcagaggaggcgttccctgctgagaccctgggccacactggaagtgatgccccttcaccttggcctctggggtcagaggaagctgaggaggatgtaccaccagtgctggtctcccccagcccaacgtacaccccgatcctggaagatgcccctgggcctcagcctcaggctgaagggagtcaggaggctagctggggggtgcaggggagggctgaagccctggggaaagtagagagcgagcaggaggagttgggttctggggagatccccgagggcctccaggaggaaggggaggagagcagagaagagagcgaggaggatgagctcggggagacccttccagactccactcccctgggcttctacctcaggtcccccacctcccccaggtgggaccccactggagagcagaggccacccctcaaggggagactggaaaggagggctgggatcctgctgtcctggcttccgagggccttgaggccccaccctcagaaaaggaggagggggaggagggagaagaggagtgtggccgtgactctgacctgtcagaagaatttgaggacctggggactgaggcaccttttcttcctggggtccctggggaggtggcagaacctctgggccaggtgccccagctgctactggatcctgcagcctgggatcgagatggggagtccgatgggtttgcagatgaggaagaaagtggggaggagggagaggaggatcaggaggaggggagggagccaggggctgggcggtgggggccagggtcttctgttggcagcctccaggctctgagtagctcccagagaggggaattcctggagtctgattctgtgagtgtcagtgtcccctgggatgacagcttgaggggtgcagtggctggtgcccccaagactgccctggaaacggagtcccaggacagtgctgagccttctggctcagaggaagagtctgaccctgtttccttggagagggaggacaaagtccctggccctctagagatccccagtgggatggaggatgcaggcccaggggcagacatcattggtgttaatggccagggtcccaacttggaggggaagtcacagcatgtgaatgggggagtgatgaacgggctggagcagtctgaggaagtggggcaaggaatgccgctagtctctgagggagaccgagggagcccctttcaggaggaggaggggagtgctctgaagacctcttgggcaggggctcctgttcacctgggccagggtcagttcctgaagttcactcagagggaaggagatagagagtcctggtcctcaggggaggactaggaaaagaccatctgcccggcactggggacttaggggtgcggggaggggaaggacgcctccaagcccgctccctgctcaggagcagcactcttaacttacgatctcttgacatatggtttctggctgagaggcctggcccgctaaggtgaaaaggggtgtggcaaaggagcctactccaagaatggaggctgtaggaatataacctcccaccctgcaaagggaatctcttgcctgctccatctcataggctaagtcagctgaatcccgatagtactaggtccccttccctccgcatcccgtcagctggaaaaggcctgtggcccagaggcttctccaaagggagggtgacatgctggcttttgtgcccaagctcaccagccctgcgccacctcactgcagtagtgcaccatctcactgcagtagcacgccctcctgggccgtctggcctgtggctaatggaggtgacggcactcccatgtgctgactccccccatccctgccacgctgtggccctgcctggctagtcggggctgtcgggctagtcggggctgncgggctagtcgggg

SEQ ID NO: 52224 - DNA, 862 bp, Homo sapiens
ttaagtgctttatcttctgagatagtatttatcttcattttaccttttctttttttttttgagacagagtcttgttctgtcacccaggctggagtgcagtggcgtgatcttggttcactgcaacctttgcctcctgggttcaaacgattcttatgcctcagcctcccaagtagctgggattacaggagagtgtcaccacgtctgtctaatttttgtgttcttaatagaggtgaggtttctcaccgtgttggccaggctggtttcaaactcctgacttcgagtgatccgcctgcctcagcctcccaaagtgcctggccatttatcttcattttaaagatgagaagactgagactcagaaaagtcaagtaacttatagagcataggaacataagtcatagagcagataaatggagccagagcccaaatttctgtactcaaagcttgtatacctcattcttagttataccaaatatattttgtaatcgtagttattattctttgtttctctgaaaatttttacattttttgagtcacagtgtttttccccctttttttctgattgttgaaacagttgggatattattcataacagaaagaactaaggtttcattgagatggtctttggattagtttgttgaccttgatattggtgacttgggaatgggtgataccttagctgagcaggtgatttatcagcaatctgataagacaatctctgctttaaatgctttctgggggcctgggtgtggtggctcactcctgtaatcccagcactttgggaagctaaggtgggagggatcgcttgagtctgggcgtttgagaccagcctgggtaacatagtgagaccctatctctacaaaaa

SEQ ID NO: 52225 - DNA, 388 bp, Homo sapiens
ccttcaatagtgaaattttgtcttgagtaggaaaaatatttatgaacagaaagtcttcttagggattgtctgtttataaaatttattcagtattcatggaattggtaagatgagtgcccactgtatgccagatactgcagttaaacttacagatgaataacttacattgcttattcatacttacagatgaataacttacattttgaggatccctgcaatgacgggaaaggaccgaaacaaacagaaattaatagttacagtacaggccgggtacagtggctcatgcgtgtaatcccagcactttgggagctaaggtgggagggatcgcttgagtctgggcgtttgagaccagcctgggtaacatagtgagaccctatctctacaaaaa

SEQ ID NO: 52226 - DNA, 311 bp, Homo sapiens
tgtaagaatgataagaaaaccaagattctgcataggaattttaaaataccttaaagtatataaagatatattccttagaatggaaatacactatatatattaagaaaacattttggccctcactttttcctcttcattaaaggtcactttttttttgtcttggatctgttgagattatcttgatactagtaacctgctaaaatatatctgtagttttattctaaaatttgaatttttttcatacatcacatcaaattaaaaagcttctgcacagcaaaggaaacaatcaacaaagtaaagagacagcccac

SEQ ID NO: 52227 - DNA, 292 bp, Homo sapiens
tgacaagctttctaaacatgaccctttatttcaacatgaagataaagaggcaaagctatactgattgaacagaaaacaagaatgggacttaaaaaaaaaaacaagagttggatagacagtgttcttccttctagttgataggaaggccacacagtgtaaaactatactcacaactttggtgttcacatgcacaatcttcaccacttagaaagaagcagctttattagtgcttataaaaattcattagtccctataaaaccagaaccaattcagcagataagtaaataaaaca

SEQ ID NO: 52228 - DNA, 398 bp, Homo sapiens
ccagatgactgctaatggcttttcctagtgtgctattgtattttcataaaaacctaccaaaataaaaccgttgggggtagttttgcctagaggcagaggcttaacagagatgacctctgaccccgcgactggattctctgttctgaatctagcaattcctttgggaaggattcctctggggatggtcttcatgtaccaggcaccttaccaatcatttctggttgtgtcacaggatacaggactcttttatcagaggaagggggatttaggtctgatgagggtagagtgtttctggctggggcagcgggccagaggacgccacagttggtctctataatgggaaggaggtggaagccgagggaaacggagactgacctgtcatctctccttggcctcga

SEQ ID NO: 52229 - DNA, 426 bp, Homo sapiens
tctgaatgggttggtgaaaggttacaggagcagacagcctccacacccaggctgctcttggctatacaggctacctccatccctgaatgttgtaataggaaagtctaaacacacagaagaggagcacaaaaccaataattatcacacattcaaaataaaactaatccataaagaaaagtaccaaactcaacaaagacagcaatgcctgaaaacactgggctgtatcagcaaatagaacaaagaaaaataagcataattaaaacagtagaaggtgaaggataatttttaaaaattagatatcatattctgattattgaaataaaaaacttagtagaaaagcttaactgaagaagaatcaaaactgaagaagaacccagacagttatgaaaatgaaaaagcaaaccaaagactgggaaaaaatatttg

SEQ ID NO: 52230 - DNA, 278 bp, Homo sapiens
ggtaagcctttaggggatgtgtttttgttttgttttgtttttaatctcccactgatttccactgacaattctagcatccctaaacacttgtctttctctcactttccgcctaaccagcagcatcattagttattttacatctttttattgaagctgtcatggactcccagatgccttcctttttggcaagtagaaagaacactgcactctaaaggatttaattcactttctcctcccgagtctcctgatgaagctttaggcaaattgcctaacttatc

SEQ ID NO: 52231 - DNA, 398 bp, Homo sapiens
cactgacaggtgtcccagcagagtctatgaatcctgcttttcttgagaaacctggaactctccaaaaaggggagagaagtaggcatgcatttcaaatcccttgtaaaatttgggaaaggcttgagtaactccttaagagagagcataacgattaattttagaatctggacctgctgttctggtgaacattctgtaatcagagattccacaaccacattggccagagcctgggcttggggttacacggagctgagttcaaatccctgccctggaatttatgagccatgtgacattgggtaagtaatgtaattgcttgtaattacttgaaaataataataatgggttgttgtgtagattcaatgaccaagctatttgcaaagcatctgggtggtgcatga

SEQ ID NO: 52232 - DNA, 461 bp, Homo sapiens
gtgacaatccccctttttgatgatctgaatctctgacttattgattatggaacctgtcaagtagttttcaactctcccagtgaggataattaaacatgctcagcctgagccacctgtaagtgaggccctcagcaagccctggccccaactcggagtcctccagtgatctccggagctagttccctgccctcacaccctgtctggtacccgagaagaaagcagggccaggccagaagctggtgtccaacagacaccacctgtcaaagctgcctttcacagggttccacctcccagactcactctgggacccagaatcctatatgtggccttggggtaggtgacaatccccctttttgatgatctgaatctctgacttattgattatggaacctgtcaagtagttttcaactctcccagtgaggataattaaacatgctcagcctgagccacctctaagtgtc

SEQ ID NO: 52233 - DNA, 1296 bp, Homo sapiens
tatttttcttctttgttttcttaagactctctcccctgcagcgccatcagctcagggagccacttgatcttggtcactgctccatgccggagcctgggaaggagcctggcccaggtcgccggttcaatgaatgcgtgcggaatgaatgaacgactctagtgaaagagactccaatgacgcaggccgggatttgcggagcacgagccccgcgccgcgaagcattctggggattgtagtttctccgtgacgcggtgactcgcagagcactgacgcactctgcgcccggaggacagagcggcccggtcgccggcatggtttctccgtcctgctgcagccggcgggaggcagccagtccaggcgcccgctagcttcggcggcgacccagacggggaaagcggaaggaatgtcgcgtggtgggtccgggtcggcggtgcagggagccccggggcggaatgcgggggatgccaggacctccggaaggaggtgccggagcccaggaagcgttttcttccccatttaccgagtatagctcctttccccagacccgctcccgctgctctgacaagcaggcagctggtgtggaagaatggcggtgagccattcagtgaaggagcggaccatctctgagaacagcctgatcatcctactgcagggcctccagggccgggtaaccactgtggacctgcgggatgagagcgtggcccacggacgcatagacaatgtcgatgctttcatgaacatccgcctggccaaagtcacctacacggaccgttgggggcatcaggtcaagctggatgacctctttgtgacaggccgcaatgtccgctacgtccacatcccagatgacgtgaacatcacctcgaccattgagcagcagctgcagattatccatcgggtgcgaaactttggtggcaagggccaaggccggtgggaatttcccccaaaaaactgtaagtgaggccctcagcaagccctggccccaactcggagtcctccagtgatctccggagctagttccctgccctcacaccctgtctggtacccgagaagaaagcagggccaggccagaagctggtgtccaacagacaccacctgtcaaagctgcctttcacagggttccacctcccagactcactctgggacccagaatcctatatgtggccttggggtaggtgacaatccccctttttgatgatctgaatctctgacttattgattatggaacctgtcaagtagttttcaactctcccagtgaggataattaaacatgctcagcctgagccacctctaagtgtc

SEQ ID NO: 52234 - DNA, 1036 bp, Homo sapiens
tatttttcttctttgttttcttaagactctctcccctgcagcgccatcagctcagggagccacttgatcttggtcactgctccatgccggagcctgggaaggagcctggcccaggtcgccggttcaatgaatgcgtgcggaatgaatgaacgactctagtgaaagagactccaatgacgcaggccgggatttgcggagcacgagccccgcgccgcgaagcattctggggattgtagtttctccgtgacgcggtgactcgcagagcactgacgcactctgcgcccggaggacagagcggcccggtcgccggcatggtttctccgtcctgctgcagccggcgggaggcagccagtccaggcgcccgctagcttcggcggcgacccagacggggaaagcggaaggaatgtcgcgtgcaagcaggcagctggtgtggaagaatggcggtgagccattcagtgaaggagcggaccatctctgagaacagcctgatcatcctactgcagggcctccagggccgggtaaccactgtggacctgcgggatgagagcgtggcccacggacgcatagacaatgtcgatgctttcatgaacatccgcctggccaaagtcacctacacggaccgttgggggcatcaggtcaagctggatgacctctttgtgacaggccgcaatgtccgctacgtccacatcccagatgacgtgaacatcacctcgaccattgagcagcagctgcagattatccatcgggtgcgaaactttggtggcaagggccaaggccggtgggaatttcccccaaaaaactgtaagtgaggccctcagcaagccctggccccaactcggagtcctccagtgatctccggagctagttccctgccctcacaccctgtctggtacccgagaagaaagcagggccaggccagaagctggtgtccaacagacaccacctgtcaaagctgcctttcacagggttccacctcccagactcactctgggtcacccttcccagctccagagagggcatcactgagggaggccca

SEQ ID NO: 52235 - DNA, 845 bp, Homo sapiens
tatttttcttctttgttttcttaagactctctcccctgcagcgccatcagctcagggagccacttgatcttggtcactgctccatgccggagcctgggaaggagcctggcccaggtcgccggttcaatgaatgcgtgcggaatgaatgaacgactctagtgaaagagactccaatgacgcaggccgggatttgcggagcacgagccccgcgccgcgaagcattctggggattgtagtttctccgtgacgcggtgactcgcagagcactgacgcactctgcgcccggaggacagagcggcccggtcgccggcatggtttctccgtcctgctgcagccggcgggaggcagccagtccaggcgcccgctagcttcggcggcgacccagacggggaaagcggaaggaatgtcgcgtgcaagcaggcagctggtgtggaagaatggcggtgagccattcagtgaaggagcggaccatctctgagaacagcctgatcatcctactgcagggcctccagggccgggtaaccactgtggacctgcgggatgagagcgtggcccacggacgcatagacaatgtcgatgctttcatgaacatccgcctggccaaagtcacctacacggaccgttgggggcatcaggtcaagctggatgacctctttgtgacaggccgcaatgtccgctacgtccacatcccagatgacgtgaacatcacctcgaccattgagcagcagctgcagattatccatcgggtgcgaaactttggtggcaagggccaaggccggtgggaatttcccccaaaaaactagacaaggtctcactatgttgcccatgctgtcttgaattcctgg

SEQ ID NO: 52236 - DNA, 1147 bp, Homo sapiens
tatttttcttctttgttttcttaagactctctcccctgcagcgccatcagctcagggagccacttgatcttggtcactgctccatgccggagcctgggaaggagcctggcccaggtcgccggttcaatgaatgcgtgcggaatgaatgaacgactctagtgaaagagactccaatgacgcaggccgggatttgcggagcacgagccccgcgccgcgaagcattctggggattgtagtttctccgtgacgcggtgactcgcagagcactgacgcactctgcgcccggaggacagagcggcccggtcgccggcatggtttctccgtcctgctgcagccggcgggaggcagccagtccaggcgcccgctagcttcggcggcgacccagacggggaaagcggaaggaatgtcgcgtgcaagcaggcagctggtgtggaagaatggcggtgagccattcagtgaaggagcggaccatctctgagaacagcctgatcatcctactgcagggcctccagggccgggtaaccactgtggacctgcgggatgagagcgtggcccacggacgcatagacaatgtcgatgctttcatgaacatccgcctggccaaagtcacctacacggaccgttgggggcatcaggtcaagctggatgacctctttgtgacaggccgcaatgtccgctacgtccacatcccagatgacgtgaacatcacctcgaccattgagcagcagctgcagattatccatcgggtgcgaaactttggtggcaagggccaaggccggtgggaatttcccccaaaaaactgtaagtgaggccctcagcaagccctggccccaactcggagtcctccagtgatctccggagctagttccctgccctcacaccctgtctggtacccgagaagaaagcagggccaggccagaagctggtgtccaacagacaccacctgtcaaagctgcctttcacagggttccacctcccagactcactctgggacccagaatcctatatgtggccttggggtaggtgacaatccccctttttgatgatctgaatctctgacttattgattatggaacctgtcaagtagttttcaactctcccagtgaggataattaaacatgctcagcctgagccacctctaagtgtc

SEQ ID NO: 52237 - DNA, 943 bp, Homo sapiens
agtatacggatcacgtgtcctcagcaagccctggcatagttcaccatctttcgggtcctaacacgtgcgctcatgcatctgtgtccacagatacaaaaattgcagaggtggtctgtgctgggaattttgtttgagaacctggtggaggtgagttggcaactgtaccccctaccctgctatagctgccatctgtgtgctcctgtccacagcaagcaggcagctggtgtggaagaatggcggtgagccattcagtgaaggagcggaccatctctgagaacagcctgatcatcctactgcagggcctccagggccgggtaaccactgtggacctgcgggatgagagcgtggcccacggacgcatagacaatgtcgatgctttcatgaacatccgcctggccaaagtcacctacacggaccgttgggggcatcaggtcaagctggatgacctctttgtgacaggccgcaatgtccgctacgtccacatcccagatgacgtgaacatcacctcgaccattgagcagcagctgcagattatccatcgggtgcgaaactttggtggcaagggccaaggccggtgggaatttcccccaaaaaactgtaagtgaggccctcagcaagccctggccccaactcggagtcctccagtgatctccggagctagttccctgccctcacaccctgtctggtacccgagaagaaagcagggccaggccagaagctggtgtccaacagacaccacctgtcaaagctgcctttcacagggttccacctcccagactcactctgggacccagaatcctatatgtggccttggggtaggtgacaatccccctttttgatgatctgaatctctgacttattgattatggaacctgtcaagtagttttcaactctcccagtgaggataattaaacatgctcagcctgagccacctctaagtgtc

SEQ ID NO: 52238 - DNA, 1333 bp, Homo sapiens
tatttttcttctttgttttcttaagactctctcccctgcagcgccatcagctcagggagccacttgatcttggtcactgctccatgccggagcctgggaaggagcctggcccaggtcgccggttcaatgaatgcgtgcggaatgaatgaacgactctagtgaaagagactccaatgacgcaggccgggatttgcggagcacgagccccgcgccgcgaagcattctggggattgtagtttctccgtgacgcggtgactcgcagagcactgacgcactctgcgcccggaggacagagcggcccggtcgccggcatggtttctccgtcctgctgcagccggcgggaggcagccagtccaggcgcccgctagcttcggcggcgacccagacggggaaagcggaaggaatgtcgcgtgcaagcaggcagctggtgtggaagaatggcggtgagccattcagtgaaggagcggaccatctctgagaacagcctgatcatcctactgcagggcctccagggccgggtaaccactgtggacctgcgggatgagagcgtggcccacggacgcatagacaatgtcgatgctttcatgaacatccgcctggccaaagtcacctacacggaccgttgggggcatcaggtcaagctggatgacctctttgtgacaggccgcaatgtccgctacgtccacatcccagatgacgtgaacatcacctcgaccattgagcagcagctgcagattatccatcgggtgcgaaactttggtggcaagggccaaggccggtgggaatttcccccaaaaaactgtaagtgaggccctcagcaagccctggccccaactcggagtcctccagtgatctccggagctagttccctgccctcacaccctgtctggtacccgagaagaaagcagggccaggccagaagctggtgtccaacagacaccacctgtcaaagctgcctttcacagggttccacctcccagactcactctgggacccagaatcctatatgtggccttggggtaggtgacaatccccctttttgatgatctgaatctctgacttattgattatggaacctgtcaagtagttttcaactctcccagtgaggataattaaacatgctcagcctgagccacctctaagtgtcaaaaaaaaaaaaagaacaaaaaaaaaacttgtgggggcgccggccggaggaagttttaaaccttcggttggcgcgggcccagggtaggaccggcacggggccaaagacccggcgaaagggggggtcaccaaaaacccgggacgggggagcaccaggggggccggtcacagcaggcgaaccccgggg

SEQ ID NO: 52239 - DNA, 476 bp, Homo sapiens
tgcagccggcgggaggcagccagtccaggcgcccgctagcttcggcggcgacccagacggggaaagcggaaggaatgtcgcgtggtgggtccgggtcggcggtgcagggagccccggggcggaatgcgggggatgccaggacctccggaaggaggtgccggagcccaggaagcgttttcttccccatttaccgagtatagctcctttccccagacccgctcccgctgctctgagtaagcggtgctcatcccgttttaccggtagcttagctagcttggagaagctaagtggtttgctaagtgatcgccctcctaggaggtggcaaagcctgttctagaacccgggcctgactcgaggtccggtgactgctctttgcagtcgcagcagcagccccatacctttgcttgatcgcagattcatcaggctgcagccgggtggctggtcgttaggccatgcccagggacctagctcccagg

SEQ ID NO: 52240 - DNA, 1675 bp, Homo sapiens
ggagaaggggtatctgaatttcaacttgggggctgggcaaggtaaccagtgaggtggggagataaatagaacttggtagctaagacccttcaggttggcttgatgatgcattgtgatcatggcttctacttcagatgtgttgctggaatagatatccttatacttgtaattcccctatacacaaatgccagcaagaatagtcccattgaggacatgctaaatgtagagaggtagtagtatgacatggaaaacactccccaacttgtctccctgtctcctgcttatgtggtacatggccactgactacagtattaacctttacttgagccctgtgcttctggaaaacagtgacagttaagaaatccctccttcttgttacatttcaggaaatggcttattgcaaagaaccactagaactgtgagtaacaccttcatttacctatgataaagccagactcagaccctccaaatcccattctttgcctcaaaataattagttgaactatttgtacccatagactaatctggacaaaatgccctttaacttgacccaattttatgcttctcccttccccgtaagccactggactttgatccaccttcagcctgagccagcactggactgtggaatagtccctccttttcccctcctgaaaattgactagccaccaggaaggacattccctgctcagctgtcccattaacgtcacctgctcctctcctccacgttagtttttttctagcctgtttattcctccctgtaagagaaaaagagaaaagcctatttctatctgatctttgagatgcttgcagatcttacctttgaagcattctccttattgcaatagtctccctgaccctattgcaatagttcctctctccctgtttgtattcacccattcaggctgctatatatagcaaaataccataagctgatagcttatagacaatataaatttacttcccacagttctgaagcccgggaagtcaaagatcaaagtgctggcaggtctggtgtctggtgggggcaccttctcactgtcctcacatggtagaagaagcaagggaaactcttgggcctctttagaggtactaatcccactcatgaggcctttaccttcttgacctagtcatttttcaaaggctcgacccatcatcattcgtatgttaggatttcaacgtacaaatttgtggggttgggagggatacaagcattcagagcatagcactattttaataatcatttcaaatagagtcattctatacctagtctggatttttgtttgttttacttgacctcattcacttgggtaggaaaaaaatctcatggactctcattgatagccccaggggtaaggttggggcaaaaagagcagaggcactcatttactgtgaggtaagaaatctgtttcagatcaccttgtgtgcaattcaggataaaattaataaagatgaatagtaaaaatccaatactaagagataaaactcaggagtcaaaagaagaaatcagaaagattagagcataattcagaatgtaatgaaaacaaactatgcatagaaacttgtggtattcggccaagacagcatgtaggagaaaatgcaagtattacctttcttgcttgtattaggataaaaagttgaaaattaacaagctaagtatctaactgaaagagaa

SEQ ID NO: 52241 - DNA, 1239 bp, Homo sapiens
  misc_feature (108)..(108): n is a, c, g, or t
  misc_feature (262)..(263): n is a, c, g, or t
  misc_feature (382)..(382): n is a, c, g, or t
  misc_feature (539)..(539): n is a, c, g, or t
  misc_feature (553)..(553): n is a, c, g, or t
  misc_feature (626)..(626): n is a, c, g, or t
  misc_feature (846)..(846): n is a, c, g, or t
  misc_feature (1216)..(1216): n is a, c, g, or t
  misc_feature (1232)..(1232): n is a, c, g, or t
  misc_feature (1238)..(1238): n is a, c, g, or t
accgcaaatccttccccgttccgcttattcatttgccgcttgtgtctggtcttaagtttgcaggtctttccccaaattatgtgttttcatattttgtttggcatattnagataggtaaggttttaattatctttatattagtccattttcttgtggattttaaaatattgctctaatgcttggaaggttctcctccatcttcagatgacataaacatacacctatttggccttttgaaaatatttaactctttaatctagcnncaatttactttgcaatataatataaagatctacattttcccccagtagttaatcaactgtcctagtactatttatcaaatagtttattctttatctattggtttatagctatctatatnatatacatgattttatttgtaggctctcttttccatttcactaatgtgtttgtctatacctgagtcaacactgtgtcattttaattattgtaactttgaagaacttttcaatatctgggtatggcttgtctccttcaatataattttgtcaaaaccntcttgactgttttnacctattgttttctcacctatttttttaaaactaaattaactttggtgggatatggtttggatgtgtctccanccaaatctcatcttgaattgtagctcccctaattcccatgtgttgtgggaaggatccgttagagacaatttaatcatgggggcagttcccccataatgttgttcttgtggtagtgggtaagtctcatgagatctgatggctttagcaggggtttcccctttcacttggctcttattccctcttgcctgccaccacgtaagacgtgtctttcaccttccancatgattgtgaggcctccccagctacgtggaactatgagttcattaaaacttttttcctttataaattatccagtctcaggtatgtctttaattagcagcatgagaacagactaatacacagtgtaatcaattatttgtccagaacgtatcacatgcattcatttcatgtttgtaccaggagtttgtggtctcagcagagtcggtagttttcttcatgttggtcttcatgtaatacttgtatgttcctgtaggtcagaggttaagttggcttgcttggttttctgctctggtttcacaatgttgaaatcaaggtgtcatcagggttgcagtgttttctatctcttaacaatccttaattcttaggtcctntatagtttcatttgtnctcctng

SEQ ID NO: 52242 - DNA, 376 bp, Homo sapiens
cacaaatggggaaataggattgcagatgaataggactaaactgctatgttctaccatccttctgacaataatgaaagggaaagatgaagttctaaaagtgaattcattcactcattctgttcacaaatgcctatagtgcttactttgtgccaggcatgattctaaatattggaaatgaaacagggaaaaagacagccaagaacactgccctcaggggagctacattaaaatgattggaattataatgcactgcaggggagtctcaacaccctggagttgaagagtcttcctgtgtcccctgcctttggtaagagtcctcaagacacactccccatccccaccccaccactgccagggagccaccctgacaggcatg

SEQ ID NO: 52243 - DNA, 811 bp, Homo sapiens
agtcaaattgaaggttcaaagtccatcactgctgtttcttaggctcaatggttcaccacctcctcctcttcccaagatggcatctccaggaagaaacaatttagacgacttcctaaggaaggcaggggctgctggtctcctggggtcctgcttgtatccactgttgaaatccttggtttcacttgtgatctgtggtctgttttcttgacatagttgaggccaggcaataataacacctccactaccacctccaaaactctcagctcagctttcctggagtcatggatcctctgtctgagacatgcactctgcctggccctggcgcaggcagcctaccttgcaggctctgcatggcgttaccttgcctctcacccagggtgcccatggcaatgctcctgacttgcatctctcacctactttccatgtcccccactggggacgtacaggaacttctgaaactgtcccctcaggttcaaaccatggggaaccagcagggtggggaccctcagaccctctgtctcaccaccttgtgtcacatggtcatctctaccacccctcaacccccacagctgctaacttctggcctgaaacaagtgttctcctcccataaggtcccaaatgggacacaagttttattgctctgggattcttccaaacttaactgactctgaccctgacctgttcaggattttgagaggagccaaaacacgtgcctggcccctgtaggcatttgacattgcaactcctgtgccaacacatgcattcactaacaaagctattaaaaaaataaaacagacttttgagatcaaag

SEQ ID NO: 52244 - DNA, 442 bp, Homo sapiens
agatctgaggtactacattgtgcctgcagctaacaatagtgtattgttcacttaaaaaaaaactgttaagagggtagatgtcatgttaagtatccttaccacaataaaataagaagttttaaaagaactgggtacattttgcacttagttaaaattgcactgaatttgaataatataatgatatgtatggcaactaattaattttttccctctgaaacagagaagccgttttccttcatccccgggagaaataaacacacacccttaaacaggggaagtagagcaagaaaaatatgtttctaaagacaatgtttttgcagcttagcataaactaagtaaagcatcaacacttcgagaattttctctggtgtttaaaatctgatggacatgaaaattgagatttgaaccttttataaaggaactttattggtaatgttcaaaa

SEQ ID NO: 52245 - DNA, 518 bp, Homo sapiens
aggaattgttattatcctgtgatattgtgaaatacatagttgatcttctccccgtttcctgacatacaacttctaaaatccttagaatctccaaagtgatgtctttttatatgctgatgagttgactgatgcctggcagcccctgggtagcttcaggatggggctggtcactggaaagaccacagcaggattagaaggatggcaatttcagctccaccccatcaacatctggggaggagggcaactgaaggtgaagtggatcaccaatggctgatggattaatcaatcatgcctgtgttacaaagtctccataaaagctcccaaaggactgggttcagagagcttctggatacctgaacacatggatgttactggagggtgccacctggggtcggggggtgcaaaggggaaggagtatggaagctccgcaccctttccttcatacctcactatatgcatttctttttctatatcctttggaatatcatttgtaataaaccaggaaatgtgtttcgctg

SEQ ID NO: 52246 - DNA, 289 bp, Homo sapiens
cctgtcatttggtcaatccaagtgcatttggcctccgcacaagccactaattcaaatcagttccatcagaaccctacaattatatgtcttaaagtaaaataaaacttggatgctatgattgtaagttaaagattgctcaagtaatacaaacatttgatatagctgttgggcagagttacaacatttatctaacatgattcaaaatgttaccctgggagcatgatctctgcattttgtagaacacatacagttttgttaaattccttagtagcaactccagagttgtgtg

SEQ ID NO: 52247 - DNA, 372 bp, Homo sapiens
aagaaagttcagcatgactataaaagattaagtagagtttgttcatgcttttccatcttacttttctgattaaagcaggcattttaatatactgattggaaaaatctatttatgtatatatctccttccaatgcattactgatgaagttttcaaaattatctttttggggagaaaaaaaaagcttggaaagattgagtcttaatcagtcaaattagtagcacttcgtttttcctaaatgtacctttaaaatcgaagtcatctttggaatgttttaaagagttaacagtgttactaaagacaatacctgctttaaataagttatcttttccgatttcttccactttgttttattttttagcccataatttcac

SEQ ID NO: 52248 - DNA, 462 bp, Homo sapiens
gattgtaggtatgttagcttttttcatacagtgtattaaatttactgagtcagcttgctgaataagacagaagcccaagaattttaacagtgtgtagctttagttgtctaaaagttaggccttcgggcttcaaaagttagtggtcatcgaaaagcattaatctttgcagtttcaggtacaacacattggttttgattagggatggggatggggccctctttttgcagaatggggaaagtattgacaggaattgagagctattggtaggccagtgtataaggtatgtgaaaacagaattaagttattggtctgaagtgactgaagcatttaggctctatcaaggcctaaaatttggtaatatgagtttggtaatgcgaattgtggcagtggacaatatttagttaaaattatgtaattgcataagtactagcacagtatttttaataaaagttatttcttagc

SEQ ID NO: 52249 - DNA, 245 bp, Homo sapiens
atgactattcttatttacaacccacagtgccaatagatatttacgagtggtctttctaaaaacatttaatagatgttgtgagttcttttccttaccttttgatacagtgtctgatattatacaaataaccccattagaaatttgtctgacttagcaaacatacttgtttagaaagtgaatctttgagtaggtaaaaagattgttaataattcacaaaagcagcatgaattgatgccaccagtttg

SEQ ID NO: 52250 - DNA, 410 bp, Homo sapiens
ctggaagataaaacgattgattctcctattagtgacactgttgcagtataagcgggcttgtcagcaattactagcaagtaggagagaaaataatgtgaagaggtaagaagtctgggaatgaggatgagtaaacattgaaataactagctcaattatatttacagatatgcttcttgccatattgctcaataggataaagattattttgagtttccagtgtgagagatttttccatagttgaatttgcatgctatgccttcaattagattataaaaccctcagaggccgtttgaaaaactgctgcaccactaaatcgacttcttccaaagtgaaggctcctccatccaagctttcttatcattgggctcaaggttgaaagccagtaaaaagttttcttattgaagactgaa

SEQ ID NO: 52251 - DNA, 964 bp, Homo sapiens
ggtatttatagcaatgtgagaatggactaatacaagggggaagcacaagcaaagacagaaggaaaatacaacagggtgtctgtgagtgtgtgtgcacatttgtgtgtgcatgtggcggggtctacaaagagtcactgtgaaccagggagtggggagtgctgagaatggacagaaaagattcatgtgcccagttgagaaatataatttgaggagtcacagaagtattgttaagtgagagttgagatcgcatggccacgttcgtcgccaggtttctaactttggatggcatctttcaccacgcaggactcaatggggaggaagcaggggtatgggttgaggattctgatgagactgtcactactactctttcttgcttcattagtgttgtttgtgacacccagaagagctgaagggggcatctttgtggggaaggagtagaagggtagccctcagaaagggggttcctgggatagtcagaatgtgtttaccaggaagagaggcagaattaaggggctggcaacatagctgggaagttgactgcatgggttgtcatatctaaaagagatttcaaagatggaaacaggagcatgggcgaagttgagatctcagccccctcattttactgttcccctacttgtgaaattcattttagttcttcagggcccatctgaaatgccagcttctctctgaaggttttcctttagaccttggctggaagatatctctttctctttggaaactctataacttgtggtttgcaagtattttatggctttgtattcccccttatgtgtaagatccttgaagattgttttgcatatctttgtatctcctccaccacctgagactctctgctgtgtgtaggatctctgctgaagaaatcataatggaactgaatctgtactttcacaggaaaagtacatgctacaggatttaataaatatgaatcttacataaggaaata

SEQ ID NO: 52252 - DNA, 909 bp, Homo sapiens
ggtatttatagcaatgtgagaatggactaatacaagggggaagcacaagcaaagacagaaggaaaatacaacagggtgtctgtgagtgtgtgtgcacatttgtgtgtgcatgtggcggggtctacaaagagtcactgtgaaccagggagtggggagtgctgagaatggacagaaaagattcatgtgcccagttgagaaatataatttgaggagtcacagaagtattgttaagtgagagttgagatcgcatggccacgttcgtcgccaggtttctaactttggatggcatctttcaccacgcaggactcaatggggaggaagcaggggtatgggttgaggattctgatgagactgtcactactactctttcttgcttcattagtgttgtttgtgacacccagaagagctgaagggggcatctttgtggggaaggagtagaagggtagccctcagaaagggggttcctgggatagtcagaatgtgtttaccaggaagagaggcagaattaaggggctggcaacatagctgggaagttgactgcatgggttgtcatatcccctcattttactgttcccctacttgtgaaattcattttagttcttcagggcccatctgaaatgccagcttctctctgaaggttttcctttagaccttggctggaagatatctctttctctttggaaactctataacttgtggtttgcaagtattttatggctttgtattcccccttatgtgtaagatccttgaagattgttttgcatatctttgtatctcctccaccacctgagactctctgctgtgtgtaggatctctgctgaagaaatcataatggaactgaatctgtactttcacaggaaaagtacatgctacaggatttaataaatatgaatcttacataaggaaata

SEQ ID NO: 52253 - DNA, 324 bp, Homo sapiens
gtggaatgttacagaggtcaccctgctatcctgctgtccttcaggcctgatcccctcgtttcccagcaagctgggaggaaggcaccactaccaacgtcgccatttcattgatgaggaagctgaggcccggggatgcttgggaacttgcccaaggttacccagcaaagattcaagctgggcttcctgtgcaattgcaaaacttcactttactttttttcttgagacagaatatcttgctcttttgcccaggctggggtgcaatggtgcgatctcagctcactgcaacctccgcttcttgggttcaagcaattcacttgcctcagc

SEQ ID NO: 52254 - DNA, 276 bp, Homo sapiens
ggggttttgccatgttggccaggtgatctcgaacccctgacctcaagtgatctgcccaccttggcctcccatagtgctgggattacaggcatgagccaccacatcctccatgtctggccagtttcctggtagtaatattgtactgtgtaccttgtttatatgtatagctcttgtttctatgtaacataaaaacattatattgggagaaactggttgaagggtacatgggacctcttggtactattttttgcaatttcctatgaatataattatttc

SEQ ID NO: 52255 - DNA, 415 bp, Homo sapiens
attttacttgtgaagaaacagaagcctgaagaagggaaatttgacaagttcaagatcaaacaacagtttgaggcaggccatgttccctttccattccaccatgctgcctccttagagcaagaaaggtaactctcctccaaattgaagaagactggaattcaacacatagaaatccctaagtgatataacaggatgtagaaactgaggacccgatttccactcagagcgcttgtgagatcaagtatcataaagaatgtaaataattggctgggcgtggtagctcacacctgtaatcccagcacttgtggagactgaggcgggaggattacttgagtccaggagttcgaaaccagcctgggcaacataatgagattctgtctctacaaaaaaataaaaaattagtctggcatggtgg

SEQ ID NO: 52256 - DNA, 222 bp, Homo sapiens
atatatgttcgtgactgacatttttcccttagcataatgttttcaaagtttatccatgttgtggcatgtataagtactttgttcctttttactaatgaataatattagaaaaatattccagtagttgatggacatttgagttgtttctactttttggctattatgaataatactgctgtaaataatgttattatgaataaaattgtgtgcaagtttttgtat

SEQ ID NO: 52257 - DNA, 351 bp, Homo sapiens
atatatgttcgtgactgacatttttcccttagcataatgttttcaaagtttatccatgttgtggcatgtataagtactttgttcctttttactaatgaataatattagaaaaatattccagtagttgatggacatttgagttgtttctactttttggctattatgaataatactgctgtaaataatgttattatgaataaaattgtgtgcaagtttttgtataaacatatgtttttatttcttttgggtatatacctaggagtgaagttgctgggtcgtattgtaactcaaaagtaaccttttgaggaatcatggaatggttttccaaagtggttatatcattatagtccc

SEQ ID NO: 52258 - DNA, 291 bp, Homo sapiens
tttttaaaagatatcttttgtgtagaagtaacccaggaatgccagcatttgttttgatagtctcattccaatagtagttactttaaaatgaagaatgttcttaatttacaaaatattatgtatgtatttaagttatgaatattgcagatatgtaaatatgtgtatatgtgtgttgattttaatttgtatcttcacagattttattatcagttatgttttgaatttttacctttggagaaaacatactacttaaatcttccagtgtagtgatagcaaattatctttatataa

SEQ ID NO: 52259 - DNA, 1615 bp, Homo sapiens
atcctgacttccgctttggaggcgaggacccgagcgagtgtagggggtgcggcgtctggtcagccaggggtgaattctcaggactggtcggcagtcaagccatcatgcctcgtggtcagaagagtaagctccgtgcccgtgagaaacgccgcaaggcccgagatgagacccggggtctcaatgttcctcaggtcactgaagcagaggaagaagaggccccctgctgttcctcttctgtttctgggggtgctgcttcaagctctcctgctgctggcattccccagaagcctcagagagccccaaccactgccgctgctgcagctgcgggtgtttcatccacaaaatctaaaaaaggtgccaagagccaccaaggtgagaaaaatgcaagttcctcccaggcctcaacatctactaagagcccaagcgaagatcctctaaccaggaagtcagggtcgttggtgcagttcctgttgtacaagtataaaataaaaaagtccgttacaaagggagaaatgctgaaaattgttggcaaaaggttcagggagcacttccctgagatcctcaagaaagcctctgagggcctcagtgttgtctttggccttgagctgaataaagtcaaccccaacggccacacttacaccttcatcgacaaggtagacctcactgatgaggaatccctgctcagttcctgggactttcccaggagaaagcttctgatgcctctcctgggtgtgatcttcttaaatggcaactcagctactgaggaagagatctgggaattcctgaatatgttgggagtctatgatggagaggagcactcagtctttggggaaccctggaagctcatcaccaaagatctggtgcaggaaaaatatctggagtacaagcaggtgcccagcagtgatcccccacgctttcaattcctgtggggtccgagagcctatgctgaaaccagcaagatgaaagtcctggagtttttggccaaggtaaatggtaccaccccctgtgccttcccaacccattacgaagaagctttgaaagatgaagagaaagccggagtctgagccagagttgtagccaggccttgcactactgccatagccaatcaatctcccaaagccaagtttacctgctgttctcacccccaatgaggtcttaggcagattctttactttgtaattcaaaaggcctgttaacctttgttcttgttatgcatgaataacttgttgacttttttttttttctctttttcaactagtgtttcaacaggtttatttagattcagaatgtaaatttacaaatgatatagatcaccctgttattgctgtttttcagggacagtagaaagtgttttgttttttgagtgaaacaacttattaataaaaatccttaaatcacttttgtaatccaggacaagaaaatgtggcattagaatagaaatatctttggaaatgtgaaagaccccatagtgaaatatttgggatcagaagccagaggggtaaaagtggtcaattcttggtttacttcatttaatctttcttttcataaagatacatacctggatttgtttatgttattcaagaatgtgtgagaaattaaaccatagttagttaaa

SEQ ID NO: 52260 - DNA, 1296 bp, Homo sapiens
atcctgacttccgctttggaggcgaggacccgagcgagtgtagggggtgcggcgtctggtcagccaggggtgaattctcaggactggtcggcagtcaagccatcatgcctcgtggtcagaagagtaagctccgtgcccgtgagaaacgccgcaaggcccgagatgagacccggggtctcaatgttcctcaggtcactgaagcagaggaagaagaggccccctgctgttcctcttctgtttctgggggtgctgcttcaagctctcctgctgctggcattccccagaagcctcagagagccccaaccactgccgctgctgcagctgcgggtgtttcatccacaaaatctaaaaaaggtgccaagagccaccaaggtgagaaaaatgcaagttcctcccaggcctcaacatctactaagagcccaagcgaagatcctctaaccaggaagtcagggtcgttggtgcagttcctgttgtacaagtataaaataaaaaagtccgttacaaagggagaaatgctgaaaattgttggcaaaaggttcagggagcacttccctgagatcctcaagaaagcctctgagggcctcagtgttgtctttggccttgagctgaataaagtcaaccccaacggccacacttacaccttcatcgacaaggtagacctcactgatgaggaatccctgctcagttcctgggactttcccaggagaaagcttctgatgcctctcctgggtgtgatcttcttaaatggcaactcagctactgaggaagagatctgggaattcctgaatatgttgggagtctatgatggagaggagcactcagtctttggggaaccctggaagctcatcaccaaagatctggtgcaggaaaaatatctggagtacaagcaggtgcccagcagtgatcccccacgctttcaattcctgtggggtccgagagcctatgctgaaaccagcaagatgaaagtcctggagtttttggccaaggtaaatggtaccaccccctgtgccttcccaacccattacgaagaagctttgaaagatgaagagaaagccggagtctgagccagagttgtagccaggccttgcactactgccatagccaatcaatctcccaaagccaagtttacctgctgttctcacccccatagtgaaatatttgggatcagaagccagaggggtaaaagtggtcaattcttggtttacttcatttaatctttcttttcataaagatacatacctggatttgtttatgttattcaagaatgtgtgagaaattaaaccatagttagttaaa

SEQ ID NO: 52261 - DNA, 575 bp, Homo sapiens
aagaattccactgcttgaacacatcagcaacaactgcttgataaccaccatgcttgatgattttcaggctctcttctagctctgggatgctgtgactgtagcagaatccagtgtggttgtttattgtgttctggatccccctctccccctggcaaccactccagtttagctgtcttcaacctctcccaaagagacagacctccctgtcactgagcggagatagccctgatctgagcctcctatggctgttccttgtcagtttggttcttgctctgaaaaacgaatattatcatgccagtctcccaggatgctgaggtgttgtttcgagattctacagaggggtaggtgggtgggccctggccaagctgagagagacactggggacctgtcaagaatatcacatagttatcagccttgtgaagaggctgtcagaaatatacatggtggggtgggtgcggtggctcacgcctgtaatcccagcactttgggagactgaggccggcagatcacctgaggtcaggagttcgagaccggcctagctaacatggtgaaaccctgtctctgctaaaatacaa

SEQ ID NO: 52262 - DNA, 411 bp, Homo sapiens
gagacggagtcttgctctgtcacccaggttggagtgtaatgtttcaatctcggttcactgcaacctccacctcccgggttcaagtgattctcctgcttcagcctcccgggtagctgggattacaggcacccaccactatgcctggctaatttttgtatttttgttggagatggggtttcaccatgttggccaggctggtttcgaactcctgacctcaggtgatccacccacctcggcctcccaaagtgctgggattacaggcgtgagccactgtgcccggcctgctatatgcattttcatagtcacctttttattctataatttgggttcataataatatttaaaccaaatttattactcatgacatataacagtacactagtgtgaccttgaaagtccaaaaaaacttag

SEQ ID NO: 52263 - DNA, 1193 bp, Homo sapiens
gccgcgggagcaggcggaggcggaggcggcgggggcaggaggatgtcgcagccgccgctgctccccgcctcggcggagactcggaagttcacccgggcgctgagtaagccgggcacggcggccgagctgcggcagagcgtgtctgaggtggtgcgcggctccgtgctcctggcaaagccaaagctaattgagccactcgactatgaaaatgtcatcgtccagaagaagactcagatcctgaacgactgtttacgggagatgctgctcttcccttacgatgactttcagacggccatcctgagacgacagggtcgatacatatgctcaacagtgcctgcgaaggcggaagaggaagcacagagcttgtttgttacagagtgcatcaaaacctataactctgactggcatcttgtgaactataaatatgaagattactcaggagagtttcgacagcttccgaacaaagtggtcaagttggataaacttccagttcatgtctatgaagttgacgaggaggtcgacaaagatgaggatgctgcctcccttggttcccagaagggtgggatcaccaagcatggctggctgtacaaaggcaacatgaacagtgccatcagcgtgaccatgaggtcatttaagagacgatttttccacctgattcaacttggcgatggatcctataatttgaatttttataaagatgaaaagatctccaaagaaccaaaaggatcaatatttctggattcctgtatgggtgtcgttcagaacaacaaagtcaggcgttttgcttttgagctcaagatgcaggacaaaagtagttatctcttggcagcagacagtgaagtggaaatggaagaatggatcacaattctaaataagatcctccagctcaactttgaagctgcaatgcaagaaaagcgaaatggcgactctcacgaagatgatgaacaaagcaaattggaaggttctggttccggtttagatagctacctgccggaacttgccaagagtgcaagagaagcagaaatcaaactgaaaagtgaaagcagagtcaaacttttttatttggacccagatgcccagaagcttgacttctcatcagctgagccagaagtgaagtcatttgaagagaagtttggaaaaaggatccttgtcaagtgcaatgatttatctttcaatttgcaatgctgtgttgc

SEQ ID NO: 52264 - DNA, 1325 bp, Homo sapiens
gccgcgggagcaggcggaggcggaggcggcgggggcaggaggatgtcgcagccgccgctgctccccgcctcggcggagactcggaagttcacccgggcgctgagtaagccgggcacggcggccgagctgcggcagagcgtgtctgaggtggtgcgcggctccgtgctcctggcagcaggtgagccactcccagttgatcccttttccctggagtcagtcatgtgtcccggaagtgcttccagcagctgctgaagacctctgccctatgaggtcactaggagttctttcattaagtgacctgaggcaaagccaaagctaattgagccactcgactatgaaaatgtcatcgtccagaagaagactcagatcctgaacgactgtttacgggagatgctgctcttcccttacgatgactttcagacggccatcctgagacgacagggtcgatacatatgctcaacagtgcctgcgaaggcggaagaggaagcacagagcttgtttgttacagagtgcatcaaaacctataactctgactggcatcttgtgaactataaatatgaagattactcaggagagtttcgacagcttccgaacaaagtggtcaagttggataaacttccagttcatgtctatgaagttgacgaggaggtcgacaaagatgaggatgctgcctcccttggttcccagaagggtgggatcaccaagcatggctggctgtacaaaggcaacatgaacagtgccatcagcgtgaccatgaggtcatttaagagacgatttttccacctgattcaacttggcgatggatcctataatttgaatttttataaagatgaaaagatctccaaagaaccaaaaggatcaatatttctggattcctgtatgggtgtcgttcagaacaacaaagtcaggcgttttgcttttgagctcaagatgcaggacaaaagtagttatctcttggcagcagacagtgaagtggaaatggaagaatggatcacaattctaaataagatcctccagctcaactttgaagctgcaatgcaagaaaagcgaaatggcgactctcacgaagatgatgaacaaagcaaattggaaggttctggttccggtttagatagctacctgccggaacttgccaagagtgcaagagaagcagaaatcaaactgaaaagtgaaagcagagtcaaacttttttatttggacccagatgcccagaagcttgacttctcatcagctgagccagaagtgaagtcatttgaagagaagtttggaaaaaggatccttgtcaagtgcaatgatttatctttcaatttgcaatgctgtgttgc

SEQ ID NO: 52265 - DNA, 369 bp, Homo sapiens
tgccatcttttaataaatattttcttagagaagctaatttgacaggctttctgtgtcttagatacctgatggggaacttcccttttgactgtccctatatcaattctacatctttcaaggcccacccaaattcttcctttttcttgaatcacatgaaaagataaggacatgatgccaactcataccaatcattcctgaatacatcacacaaaatctgcacttcataatttaagctgagatgggagcaactttcacttgtgaaacaatgcctttgatagactataactcactagactgaaaccctccttagggcagaggtaaagtgttgtatttcttcaatagtttctataattggagcactccagtagg

SEQ ID NO: 52266 - DNA, 1222 bp, Homo sapiens
gtaaaatccacttgagggagtgagggttaagacataagtgtgagtttgatgaatgaaagaactactctgtgtgtgggttcttggcaagctgccatgtctttggggatcatagaaattattgatgacacagaacactcatatgcccttagcctgtacagctgattcaacatggaacagaaacactgtctagagaaaagattttacgttgtattaaagcagcatgggctttgggtatttttatgctttaaagattacttgcaataattattttaaatgatttctgcattatgagaatttcctgaaaagcagcattatccaataactgtttaccccgtacctggtatgataaagaattattttcagaaacatttccacagtgtttttaaaaggaaggaacatcccttaggagatattgttttaattgttgctaaaatctacttgctgtatttttctcagttgtttgataaaattgtatcataaagaattaaatgagttttttaagaattagttaaactatattgtctggtcatatttattgttctgttctcttttatttcaggcaaatggcattaaaattggccctcagcatgctgctaccaatgcaacacatgcaggcaatcagggaggacagcaggctgggggcggctgctgttgagtctgtttttactgtctagctgcccaacggggcctactcacttattctttcaccccctctcctcctgctcagctgagacatgaaactatttgaaatggctttatgtcacagaagactttaatccgtcaaattcttgtataactttgaataaatggttaatgttcacttaaaaaaaaaaaaaaaaaaaaaaaaaaaaaaaaaaaaaaaaaaaaacaaaaaaaaaaaaaaaaaaaaaaaaaaaaaaaaaaaaaaaaaaaaaaaaaaaaaaaaaaaaaaaaaaaaaaaaacaaaaaaaaaaaacaaaaagtgcgaaaggagcaggagaagcagagtagagataaaaagagaagagaagacgaagaggataaagagacaaagaagaccgtcgggagagggaaggaaggagagatgagcctagcgcgaggcggagcgaggggcgcagcgggacggcgccatgaaaaggaggtcggtagggataagagcggcggcgcccgagttggaggggggggagtcgaagaggcagcggagggggcagcgggcgatgtaaaacacgagggagagagcgcg

SEQ ID NO: 52267 - DNA, 3259 bp, Homo sapiens
ctccggcggcgccggcagcggcagaacttccgggtcggcgcggaggcggggcggaggcgccgcggcggctgttattgttcggctgggctcggtcgggcgctgtctccctcggctctgcgggtgtcagttcgtccggcttcctcacagcccctcactcccggcggctgacagcagcagcggcggcggcgggcggcgcctggcgtttcgaggctgagcggcaccggggttggggcgcggaggaggagcagcagcgggaggaggagccgtgtgccctggcactgagcggccgcggccatggcgtacgcctatctcttcaagtacatcataatcggcgacacaggtgttggtaaatcatgcttattgctacagtttacagacaagaggtttcagccagtgcatgaccttactattggtgtagagttcggtgctcgaatgataactattgatgggaaacagataaaacttcagatatgggatacggcagggcaagaatcctttcgttccatcacaaggtcgtattacagaggtgcagcaggagctttactagtttacgatattacacggagagatacattcaaccacttgacaacctggttagaagatgcccgccagcattccaattccaacatggtcattatgcttattggaaataaaagtgatttagaatctagaagagaagtaaaaaaagaagaaggtgaagcttttgcacgagaacatggactcatcttcatggaaacgtctgctaagactgcttccaatgtagaagaggcatttattaatacagcaaaagaaatttatgaaaaaattcaagaaggagtctttgacattaataatgaggcaaatggcattaaaattggccctcagcatgctgctaccaatgcaacacatgcaggcaatcagggaggacagcaggctgggggcggctgctgttgagtctgtttttactgtctagctgcccaacggggcctactcacttattctttcaccccctctcctcctgctcagctgagacatgaaactatttgaaatggctttatgtcacagaagactttaatccgtcaaattcttgtataactttgaataaatggttaatgttcacttaaaagacagattttggagattgtattcatatctatttgcatttgatttctaggtcaattgatgtgattatttttgttaaatgttgtcttgtgcccttaactacgaactgaattgtattaaacactacaaagtcatcttgagtattttaaatcggtttgtgtagttaggtttcccaacatctgtggttacctaatgtttaatattatagaactgtcctcagaaactttgtcaattttcacggctataaggaaacagaaggactcttttaattctgtatttatcatttactttctgtatatatagtttaataacctgcttgggtgtaatttgccaagcttgaattctttaatgcatttgcataaattctatactgtttagagcttaaagctacagaagcattgttaggaattgcttggacactgaattttaaactttttgacattgttaacaagcatgttcatcttttcttgtcactagtccaagaaaaatatgcttaatgtatattacaaaggctttgtatatgttaacctgttttaatgccaaaagtttgctttgtccacaatttccttaagacctcttcagaaagggatttgtttgccttaatgaatactgttgggaaaaaacacagtataatgagtgaaaagggcagaagcaagaaatttctacatcttagcgactccaagaagaatgagtatccacatttagatggcacattatgaggactttaatctttccttaaacacaataatgttttcttttttcttttattcacatgatttctaagtatatttttcatgcaggacagtttttcaaccttgatgtacagtgactgtgtaaaatttttctttcagtggcaacctctataatctttaaaatatggtgagcatcttgtctgttttgaaggggatatgacaataaatctatcagatggaaaatcctgttacaaagtagaaaagctttagtaatttactcagtgtggtggttttatcctttttttctttttctcccttggtctataatgaaattgttacagcagtgcaaaataaaatcctatgtataaaagtgttctttttttttattatgaccacctcttttttaatgtatttttagtccacttacagcttttacatgggtttaagcatgttttttaaaagggtcagaatggttaacactcaaccctttttaaaaattttgctaaaatgcgacaaatctcaccatactgaaattatttttgttgatggtgtaagcagtgtaagcaagtgttttctcctgaactagcacaaaagcacttatgcctgaaagaaagcataaagaagttctaactctgaaactaactactttcatttcgctcatggccttcaactttctacaggtcttccctgaagattcagcagtactctctcaaaggtttgacagtactcttgtgggaaatcaccaaatgctgtcatagttttgttttaactgtctccttgagggcagagggaagggtgagagaaaatctgttttcatgggtatttgtagtacagcctttttttctttcaagtggctgtatcaaattcactggtcttactaatcactgtctttaccagtgagtacaaaaagttaaggcaactaggacaggtactgctctataccaagaagagaatgattctttggaaattgttatttttaagcttctgttaatttttccagaagtttagtgcgtttcttttccatactttctcccctaattcttttatttgaagaagagaacttaatggcaaataaacaacaaaccaggacatgcattttaataccctaaggaaaaatggaaccctcaaatataactcctcccacaaccaccctaatgtgcctcagtctggggcagcaggtggacttctcaatagttcttttccacattctctacaaatcacatctaccgttaaggaatatgttatgaatcctttctgttaattgagaaagcaatgttattgtctgtgatttccagtctttgctcattttattatccctgtcaaataatgtaatattggtacctgcagttgaatttgtaatattgtaattgaatttttagttgatcttcgatcagtttttatagcatctatggacatagaaaatcagtcactgaaaaaaataaacacagctttcaatgtctcactca

SEQ ID NO: 52268 - DNA, 3808 bp, Homo sapiens
ctccggcggcgccggcagcggcagaacttccgggtcggcgcggaggcggggcggaggcgccgcggcggctgttattgttcggctgggctcggtcgggcgctgtctccctcggctctgcgggtgtcagttcgtccggcttcctcacagcccctcactcccggcggctgacagcagcagcggcggcggcgggcggcgcctggcgtttcgaggctgagcggcaccggggttggggcgcggaggaggagcagcagcgggaggaggagccgtgtgccctggcactgagcggccgcggccatggcgtacgcctatctcttcaagtacatcataatcggcgacacaggtgttggtaaatcatgcttattgctacagtttacagacaagaggtttcagccagtgcatgaccttactattggtgtagagttcggtgctcgaatgataactattgatgggaaacagataaaacttcagatatgggatacggcagggcaagaatcctttcgttccatcacaaggtcgtattacagaggtgcagcaggagctttactagtttacgatattacacggagagatacattcaaccacttgacaacctggttagaagatgcccgccagcattccaattccaacatggtcattatgcttattggaaataaaagtgatttagaatctagaagagaagtaaaaaaagaagaaggtgaagcttttgcacgagaacatggactcatcttcatggaaacgtctgctaagactgcttccaatgtagaagaggcatttattaatacagcaaaagaaatttatgaaaaaattcaagaaggagtctttgacattaataatgaggcaaatggcattaaaattggccctcagcatgctgctaccaatgcaacacatgcaggcaatcagggaggacagcaggctgggggcggctgctgttgagtctgtttttactgtctagctgcccaacggggcctactcacttattctttcaccccctctcctcctgctcagctgagacatgaaactatttgaaatggctttatgtcacagaagactttaatccgtcaaattcttgtataactttgaataaatggttaatgttcacttaaaagacagattttggagattgtattcatatctatttgcatttgatttctaggtcaattgatgtgattatttttgttaaatgttgtcttgtgcccttaactacgaactgaattgtattaaacactacaaagtcatcttgagtattttaaatcggtttgtgtagttaggtttcccaacatctgtggttacctaatgtttaatattatagaactgtcctcagaaactttgtcaattttcacggctataaggaaacagaaggactcttttaattctgtatttatcatttactttctgtatatatagtttaataacctgcttgggtgtaatttgccaagcttgaattctttaatgcatttgcataaattctatactgtttagagcttaaagctacagaagcattgttaggaattgcttggacactgaattttaaactttttgacattgttaacaagcatgttcatcttttcttgtcactagtccaagaaaaatatgcttaatgtatattacaaaggctttgtatatgttaacctgttttaatgccaaaagtttgctttgtccacaatttccttaagacctcttcagaaagggatttgtttgccttaatgaatactgttgggaaaaaacacagtataatgagtgaaaagggcagaagcaagaaatttctacatcttagcgactccaagaagaatgagtatccacatttagatggcacattatgaggactttaatctttccttaaacacaataatgttttcttttttcttttattcacatgatttctaagtatatttttcatgcaggacagtttttcaaccttgatgtacagtgactgtgtaaaatttttctttcagtggcaacctctataatctttaaaatatggtgagcatcttgtctgttttgaaggggatatgacaataaatctatcagatggaaaatcctgttacaaagtagaaaagctttagtaatttactcagtgtggtggttttatcctttttttctttttctcccttggtctataatgaaattgttacagcagtgcaaaataaaatcctatgtataaaagtgttctttttttttattatgaccacctcttttttaatgtatttttagtccacttacagcttttacatgggtttaagcatgttttttaaaagggtcagaatggttaacactcaaccctttttaaaaattttgctaaaatgcgacaaatctcaccatactgaaattatttttgttgatggtgtaagcagtgtaagcaagtgttttctcctgaactagcacaaaagcacttatgcctgaaagaaagcataaagaagttctaactctgaaactaactactttcatttcgctcatggccttcaactttctacaggtcttccctgaagattcagcagtactctctcaaaggtttgacagtactcttgtgggaaatcaccaaatgctgtcatagttttgttttaactgtctccttgagggcagagggaagggtgagagaaaatctgttttcatgggtatttgtagtacagcctttttttctttcaagtggctgtatcaaattcactggtcttactaatcactgtctttaccagtgagtacaaaaagttaaggcaactaggacaggtactgctctataccaagaagagaatgattctttggaaattgttatttttaagcttctgttaatttttccagaagtttagtgcgtttcttttccatactttctcccctaattcttttatttgaagaagagaacttaatggcaaataaacaacaaaccaggacatgcattttaataccctaaggaaaaatggaaccctcaaatataactcctcccacaaccaccctaatgtgcctcagtctggggcagcaggtggacttctcaatagttcttttccacattctctacaaatcacatctaccgttaaggaatatgttatgaatcctttctgttaattgagaaagcaatgttattgtctgtgatttccagtctttgctcattttattatccctgtcaaataatgtaatattggtacctgcagttgaatttgtaatattgtaattgaatttttagttgatcttcgatcagtttttatagcatctatggacatagaaaatcagtcactgaaaaaaataaacacagctttcaatgtctcactcaacatgtaacattcaaaattgtgatcttcataaagacattgttaccattcgtcttgcaaatttaagacaactgaatgaaaagccaattttttgaaagaatgtggcatataattagatatacaactgaaacaggatatacaactgcatacaatttgtttttaatgatattttaaaatagcctgttagcaggaaaatagtccctatttatctgctaatggtcaaaaagagttaggatataaatcgtaccaaaatgtttccaatcactcagaaaaactgattcatgtctggctttgcaacaccttaaacatttattctgtcatagatagtaaagccccatctcagtttatttagtcctgaggttggcagcatggggtttgactatatgagctaaaagatacacaaagagataacgctgtttcataataaacaggaattgactatacaaataggtaaaccagcatatctacctgtatttctcagagtttagatgtgtgctttatgtttacattaaaataaagcctaacgccacagtagatcatctcatactgca

SEQ ID NO: 52269 - DNA, 3277 bp, Homo sapiens
gccagcacctgcaggcggagaagaagaagatgcagcagaacatccaggagcttgaggagcagctggaggaggaggagagcgcccggctgttattgttcggctgggctcggtcgggcgctgtctccctcggctctgcgggtgtcagttcgtccggcttcctcacagcccctcactcccggcggctgacagcagcagcggcggcggcgggcggcgcctggcgtttcgaggctgagcggcaccggggttggggcgcggaggaggagcagcagcgggaggaggagccgtgtgccctggcactgagcggccgcggccatggcgtacgcctatctcttcaagtacatcataatcggcgacacaggtgttggtaaatcatgcttattgctacagtttacagacaagaggtttcagccagtgcatgaccttactattggtgtagagttcggtgctcgaatgataactattgatgggaaacagataaaacttcagatatgggatacggcagggcaagaatcctttcgttccatcacaaggtcgtattacagaggtgcagcaggagctttactagtttacgatattacacggagagatacattcaaccacttgacaacctggttagaagatgcccgccagcattccaattccaacatggtcattatgcttattggaaataaaagtgatttagaatctagaagagaagtaaaaaaagaagaaggtgaagcttttgcacgagaacatggactcatcttcatggaaacgtctgctaagactgcttccaatgtagaagaggcatttattaatacagcaaaagaaatttatgaaaaaattcaagaaggagtctttgacattaataatgaggcaaatggcattaaaattggccctcagcatgctgctaccaatgcaacacatgcaggcaatcagggaggacagcaggctgggggcggctgctgttgagtctgtttttactgtctagctgcccaacggggcctactcacttattctttcaccccctctcctcctgctcagctgagacatgaaactatttgaaatggctttatgtcacagaagactttaatccgtcaaattcttgtataactttgaataaatggttaatgttcacttaaaagacagattttggagattgtattcatatctatttgcatttgatttctaggtcaattgatgtgattatttttgttaaatgttgtcttgtgcccttaactacgaactgaattgtattaaacactacaaagtcatcttgagtattttaaatcggtttgtgtagttaggtttcccaacatctgtggttacctaatgtttaatattatagaactgtcctcagaaactttgtcaattttcacggctataaggaaacagaaggactcttttaattctgtatttatcatttactttctgtatatatagtttaataacctgcttgggtgtaatttgccaagcttgaattctttaatgcatttgcataaattctatactgtttagagcttaaagctacagaagcattgttaggaattgcttggacactgaattttaaactttttgacattgttaacaagcatgttcatcttttcttgtcactagtccaagaaaaatatgcttaatgtatattacaaaggctttgtatatgttaacctgttttaatgccaaaagtttgctttgtccacaatttccttaagacctcttcagaaagggatttgtttgccttaatgaatactgttgggaaaaaacacagtataatgagtgaaaagggcagaagcaagaaatttctacatcttagcgactccaagaagaatgagtatccacatttagatggcacattatgaggactttaatctttccttaaacacaataatgttttcttttttcttttattcacatgatttctaagtatatttttcatgcaggacagtttttcaaccttgatgtacagtgactgtgtaaaatttttctttcagtggcaacctctataatctttaaaatatggtgagcatcttgtctgttttgaaggggatatgacaataaatctatcagatggaaaatcctgttacaaagtagaaaagctttagtaatttactcagtgtggtggttttatcctttttttctttttctcccttggtctataatgaaattgttacagcagtgcaaaataaaatcctatgtataaaagtgttctttttttttattatgaccacctcttttttaatgtatttttagtccacttacagcttttacatgggtttaagcatgttttttaaaagggtcagaatggttaacactcaaccctttttaaaaattttgctaaaatgcgacaaatctcaccatactgaaattatttttgttgatggtgtaagcagtgtaagcaagtgttttctcctgaactagcacaaaagcacttatgcctgaaagaaagcataaagaagttctaactctgaaactaactactttcatttcgctcatggccttcaactttctacaggtcttccctgaagattcagcagtactctctcaaaggtttgacagtactcttgtgggaaatcaccaaatgctgtcatagttttgttttaactgtctccttgagggcagagggaagggtgagagaaaatctgttttcatgggtatttgtagtacagcctttttttctttcaagtggctgtatcaaattcactggtcttactaatcactgtctttaccagtgagtacaaaaagttaaggcaactaggacaggtactgctctataccaagaagagaatgattctttggaaattgttatttttaagcttctgttaatttttccagaagtttagtgcgtttcttttccatactttctcccctaattcttttatttgaagaagagaacttaatggcaaataaacaacaaaccaggacatgcattttaataccctaaggaaaaatggaaccctcaaatataactcctcccacaaccaccctaatgtgcctcagtctggggcagcaggtggacttctcaatagttcttttccacattctctacaaatcacatctaccgttaaggaatatgttatgaatcctttctgttaattgagaaagcaatgttattgtctgtgatttccagtctttgctcattttattatccctgtcaaataatgtaatattggtacctgcagttgaatttgtaatattgtaattgaatttttagttgatcttcgatcagtttttatagcatctatggacatagaaaatcagtcactgaaaaaaataaacacagctttcaatgtctcactca

SEQ ID NO: 52270 - DNA, 2160 bp, Homo sapiens
ctccggcggcgccggcagcggcagaacttccgggtcggcgcggaggcggggcggaggcgccgcggcggctgttattgttcggctgggctcggtcgggcgctgtctccctcggctctgcgggtgtcagttcgtccggcttcctcacagcccctcactcccggcggctgacagcagcagcggcggcggcgggcggcgcctggcgtttcgaggctgagcggcaccggggttggggcgcggaggaggagcagcagcgggaggaggagccgtgtgccctggcactgagcggccgcggccatggcgtacgcctatctcttcaagtacatcataatcggcgacacaggtgttggtaaatcatgcttattgctacagtttacagacaagaggtttcagccagtgcatgaccttactattggtgtagagttcggtgctcgaatgataactattgatgggaaacagataaaacttcagatatgggatacggcagggcaagaatcctttcgttccatcacaaggtcgtattacagaggtgcagcaggagctttactagtttacgatattacacggagagatacattcaaccacttgacaacctggttagaagatgcccgccagcattccaattccaacatggtcattatgcttattggaaataaaagtgatttagaatctagaagagaagtaaaaaaagaagaaggtgaagcttttgcacgagaacatggactcatcttcatggaaacgtctgctaagactgcttccaatgtagaagaggcatttattaatacagcaaaagaaatttatgaaaaaattcaagaaggagtctttgacattaataatgaggcaaatggcattaaaattggccctcagcatgctgctaccaatgcaacacatgcaggcaatcagggaggacagcaggctgggggcggctgctgttgagtctgtttttactgtctagctgcccaacggggcctactcacttattctttcaccccctctcctcctgctcagctgagacatgaaactatttgaaatggctttatgtcacagaagactttaatccgtcaaattcttgtataactttgaataaatggttaatgttcacttaaaagacagattttggagattgtattcatatctatttgcatttgatttctaggtcaattgatgtgattatttttgttaaatgttgtcttgtgcccttaactacgaactgaattgtattaaacactacaaagtcatcttgagtattttaaatcggtttgtgtagttaggtttcccaacatctgtggttacctaatgtttaatattatagaactgtcctcagaaactttgtcaattttcacggctataaggaaacagaaggactcttttaattctgtatttatcatttactttctgtatatatagtttaataacctgcttgggtgtaatttgccaagcttgaattctttaatgcatttgcataaattctatactgtttagagcttaaagctacagaagcattgttaggaattgcttggacactgaattttaaactttttgacattgttaacaagcatgttcatcttttcttgtcactagtccaagaaaaatatgcttaatgtatattacaaaggctttgtatatgttaacctgttttaatgccaaaagtttgctttgtccacaatttccttaagacctcttcagaaagggatttgtttgccttaatgaatactgttgggaaaaaacacagtataatgagtgaaaagggcagaagcaagaaatttctacatcttagcgactccaagaagaatgagtatccacatttagatggcacattatgaggactttaatctttccttaaacacaataatgttttcttttttcttttattcacatgatttctaagtatatttttcatgcaggacagtttttcaaccttgatgtacagtgactgtgtaaaatttttctttcagtggcaacctctataatctttaaaatatggtgagcatcttgtctgttttgaaggggatatgacaataaatctatcagatggaaaatcctgttacaaagtagaaaagctttagtaatttactcagtgtggtggttttatcctttttttctttttctcccttggtctataatgaaattgttacagcagtgcaaaataaaatcctatgtata

SEQ ID NO: 52271 - DNA, 2043 bp, Homo sapiens
ctccggcggcgccggcagcggcagaacttccgggtcggcgcggaggcggggcggaggcgccgcggcggctgttattgttcggctgggctcggtcgggcgctgtctccctcggctctgcgggtgtcagttcgtccggcttcctcacagcccctcactcccggcggctgacagcagcagcggcggcggcgggcggcgcctggcgtttcgaggctgagcggcaccggggttggggcgcggaggaggagcagcagcgggaggaggagccgtgtgccctggcactgagcggccgcggccatggcgtacgcctatctcttcaagtacatcataatcggcgacacaggtgttggtaaatcatgcttattgctacagtttacagacaagaggtttcagccagtgcatgaccttactattggtgtagagttcggtgctcgaatgataactattgatgggaaacagataaaacttcagatatgggatacggcagggcaagaatcctttcgttccatcacaaggtcgtattacagaggtgcagcaggagctttactagtttacgatattacacggagagatacattcaaccacttgacaacctggttagaagatgcccgccagcattccaattccaacatggtcattatgcttattggaaataaaagtgatttagaatctagaagagaagtaaaaaaagaagaaggtgaagcttttgcacgagaacatggactcatcttcatggaaacgtctgctaagactgcttccaatgtagaagaggcatttattaatacagcaaaagaaatttatgaaaaaattcaagaaggagtctttgacattaataatgaggcaaatggcattaaaattggccctcagcatgctgctaccaatgcaacacatgcaggcaatcagggaggacagcaggctgggggcggctgctgttgagtctgtttttactgtctagctgcccaacggggcctactcacttattctttcaccccctctcctcctgctcagctgagacatgaaactatttgaaatggctttatgtcacagaagactttaatccgtcaaattcttgtataactttgaataaatggttaatgttcacttaaaagacagattttggagattgtattcatatctatttgcatttgatttctaggtcaattgatgtgattatttttgttaaatgttgtcttgtgcccttaactacgaactgaattgtattaaacactacaaagtcatcttgagtattttaaatcggtttgtgtagttaggtttcccaacatctgtggttacctaatgtttaatattatagaactgtcctcagaaactttgtcaattttcacggctataaggaaacagaaggactcttttaattctgtatttatcatttactttctgtatatatagtttaataacctgcttgggtgtaatttgccaagcttgaattctttaatgcatttgcataaattctatactgtttagagcttaaagctacagaagcattgttaggaattgcttggacactgaattttaaactttttgacattgttaacaagcatgttcatcttttcttgtcactagtccaagaaaaatatgcttaatgtatattacaaaggctttgtatatgttaacctgttttaatgccaaaagtttgctttgtccacaatttccttaagacctcttcagaaagggatttgtttgccttaatgaatactgttgggaaaaaacacagtataatgagtgaaaagggcagaagcaagaaatttctacatcttagcgactccaagaagaatgagtatccacatttagatggcacattatgaggactttaatctttccttaaacacaataatgttttcttttttcttttattcacatgatttctaagtatatttttcatgcaggacagtttttcaaccttgatgtacagtgactgtgtaaaatttttctttcagtggcaacctctataatctttaaaatatggtgagcatcttgtctgttttgaaggggatatgacaataaatctatcagatggaaaatcctgtt

SEQ ID NO: 52272 - DNA, 2171 bp, Homo sapiens
ctccggcggcgccggcagcggcagaacttccgggtcggcgcggaggcggggcggaggcgccgcggcggctgttattgttcggctgggctcggtcgggcgctgtctccctcggctctgcgggtgtcagttcgtccggcttcctcacagcccctcactcccggcggctgacagcagcagcggcggcggcgggcggcgcctggcgtttcgaggctgagcggcaccggggttggggcgcggaggaggagcagcagcgggaggaggagccgtgtgccctggcactgagcggccgcggccatggcgtacgcctatctcttcaagtacatcataatcggcgacacaggtgttggtaaatcatgcttattgctacagtttacagacaagaggtttcagccagtgcatgaccttactattggtgtagagttcggtgctcgaatgataactattgatgggaaacagataaaacttcagatatgggatacggcagggcaagaatcctttcgttccatcacaaggtcgtattacagaggtgcagcaggagctttactagtttacgatattacacggagagatacattcaaccacttgacaacctggttagaagatgcccgccagcattccaattccaacatggtcattatgcttattggaaataaaagtgatttagaatctagaagagaagtaaaaaaagaagaaggtgaagcttttgcacgagaacatggactcatcttcatggaaacgtctgctaagactgcttccaatgtagaagaggcatttattaatacagcaaaagaaatttatgaaaaaattcaagaaggagtctttgacattaataatgaggcaaatggcattaaaattggccctcagcatgctgctaccaatgcaacacatgcaggcaatcagggaggacagcaggctgggggcggctgctgttgagtctgtttttactgtctagctgcccaacggggcctactcacttattctttcaccccctctcctcctgctcagctgagacatgaaactatttgaaatggctttatgtcacagaagactttaatccgtcaaattcttgtataactttgaataaatggttaatgttcacttaaaagacagattttggagattgtattcatatctatttgcatttgatttctaggtcaattgatgtgattatttttgttaaatgttgtcttgtgcccttaactacgaactgaattgtattaaacactacaaagtcatcttgagtattttaaatcggtttgtgtagttaggtttcccaacatctgtggttacctaatgtttaatattatagaactgtcctcagaaactttgtcaattttcacggctataaggaaacagaaggactcttttaattctgtatttatcatttactttctgtatatatagtttaataacctgcttgggtgtaatttgccaagcttgaattctttaatgcatttgcataaattctatactgtttagagcttaaagctacagaagcattgttaggaattgcttggacactgaattttaaactttttgacattgttaacaagcatgttcatcttttcttgtcactagtccaagaaaaatatgcttaatgtatattacaaaggctttgtatatgttaacctgttttaatgccaaaagtttgctttgtccacaatttccttaagacctcttcagaaagggatttgtttgccttaatgaatactgttgggaaaaaacacagtataatgagtgaaaagggcagaagcaagaaatttctacatcttagcgactccaagaagaatgagtatccacatttagatggcacattatgaggactttaatctttccttaaacacaataatgttttcttttttcttttattcacatgatttctaagtatatttttcatgcaggacagtttttcaaccttgatgtacagtgactgtgtaaaatttttctttcagtggcaacctctataatctttaaaatatggtgagcatcttgtctgttttgaaggggatatgacaataaatctatcagatggaaaatcctgttacaaagtagaaaagctttagtaatttactcagtgtggtggttttatcctttttttctttttctcccttggtctataatgaaattgttacagccatttaggtaacagcctttaggtacagccatttaga

SEQ ID NO: 52273 - DNA, 2563 bp, Homo sapiens
ctccggcggcgccggcagcggcagaacttccgggtcggcgcggaggcggggcggaggcgccgcggcggctgttattgttcggctgggctcggtcgggcgctgtctccctcggctctgcgggtgtcagttcgtccggcttcctcacagcccctcactcccggcggctgacagcagcagcggcggcggcgggcggcgcctggcgtttcgaggctgagcggcaccggggttggggcgcggaggaggagcagcagcgggaggaggagccgtgtgccctggcactgagcggccgcggccatggcgtacgcctatctcttcaagtacatcataatcggcgacacaggtgttggtaaatcatgcttattgctacagtttacagacaagaggtttcagccagtgcatgaccttactattggtgtagagttcggtgctcgaatgataactattgatgggaaacagataaaacttcagatatgggatacggcagggcaagaatcctttcgttccatcacaaggtcgtattacagaggtgcagcaggagctttactagtttacgatattacacggagagatacattcaaccacttgacaacctggttagaagatgcccgccagcattccaattccaacatggtcattatgcttattggaaataaaagtgatttagaatctagaagagaagtaaaaaaagaagaaggtgaagcttttgcacgagaacatggactcatcttcatggaaacgtctgctaagactgcttccaatgtagaagaggcatttattaatacagcaaaagaaatttatgaaaaaattcaagaaggagtctttgacattaataatgaggcaaatggcattaaaattggccctcagcatgctgctaccaatgcaacacatgcaggcaatcagggaggacagcaggctgggggcggctgctgttgagtctgtttttactgtctagctgcccaacggggcctactcacttattctttcaccccctctcctcctgctcagctgagacatgaaactatttgaaatggctttatgtcacagaagactttaatccgtcaaattcttgtataactttgaataaatggttaatgttcacttaaaagacagattttggagattgtattcatatctatttgcatttgatttctaggtcaattgatgtgattatttttgttaaatgttgtcttgtgcccttaactacgaactgaattgtattaaacactacaaagtcatcttgagtattttaaatcggtttgtgtagttaggtttcccaacatctgtggttacctaatgtttaatattatagaactgtcctcagaaactttgtcaattttcacggctataaggaaacagaaggactcttttaattctgtatttatcatttactttctgtatatatagtttaataacctgcttgggtgtaatttgccaagcttgaattctttaatgcatttgcataaattctatactgtttagagcttaaagctacagaagcattgttaggaattgcttggacactgaattttaaactttttgacattgttaacaagcatgttcatcttttcttgtcactagtccaagaaaaatatgcttaatgtatattacaaaggctttgtatatgttaacctgttttaatgccaaaagtttgctttgtccacaatttccttaagacctcttcagaaagggatttgtttgccttaatgaatactgttgggaaaaaacacagtataatgagtgaaaagggcagaagcaagaaatttctacatcttagcgactccaagaagaatgagtatccacatttagatggcacattatgaggactttaatctttccttaaacacaataatgttttcttttttcttttattcacatgatttctaagtatatttttcatgcaggacagtttttcaaccttgatgtacagtgactgtgcatcaaggttgaaaaactgtcccggacgcgtggggaaaaagaactattacaatcaaaaacaggtttatctagtgtcgaaaaccagttcttctcaaggtataataagaaatacgactctagtcaagatccatagcatctgaagttgtagccaggcctgtttcattgtctaatgataagactgatggaaaagtcagagcccgttgaccagcgaagacatactgcaggaaaagcaattgttgatagtagatcagctcagcccaagagaaacctcggaagagagaaacagctcgtctgagtgagtggaaagctggctgaaggaagagtgctatgaaggcccctaagttcagtagttactcagcatgaagcctgcaggacactgtgagaaaccagttgggtctttttggattaccatggcacgaagaagatgaaccaacagattatttactggcaacaagtaaagcaacaacatagctcggaatgtcctgaacttgattaagtggagggatgtctccatagaagatatcctggtcacacctgtaatgaccctgatttcacaatcattccggtttccaaaaccttggtcaggcctgggcaattgtctggcaccttttttggaccctttccaaag

SEQ ID NO: 52274 - DNA, 1872 bp, Homo sapiens
ctccggcggcgccggcagcggcagaacttccgggtcggcgcggaggcggggcggaggcgccgcggcggctgttattgttcggctgggctcggtcgggcgctgtctccctcggctctgcgggtgtcagttcgtccggcttcctcacagcccctcactcccggcggctgacagcagcagcggcggcggcgggcggcgcctggcgtttcgaggctgagcggcaccggggttggggcgcggaggaggagcagcagcgggaggaggagccgtgtgccctggcactgagcggccgcggccatggcgtacgcctatctcttcaagtacatcataatcggcgacacaggtgttggtaaatcatgcttattgctacagtttacagacaagaggtttcagccagtgcatgaccttactattggtgtagagttcggtgctcgaatgataactattgatgggaaacagataaaacttcagatatgggatacggcagggcaagaatcctttcgttccatcacaaggtcgtattacagaggtgcagcaggagctttactagtttacgatattacacggagagatacattcaaccacttgacaacctggttagaagatgcccgccagcattccaattccaacatggtcattatgcttattggaaataaaagtgatttagaatctagaagagaagtaaaaaaagaagaaggtgaagcttttgcacgagaacatggactcatcttcatggaaacgtctgctaagactgcttccaatgtagaagaggcatttattaatacagcaaaagaaatttatgaaaaaattcaagaaggagtctttgacattaataatgaggcaaatggcattaaaattggccctcagcatgctgctaccaatgcaacacatgcaggcaatcagggaggacagcaggctgggggcggctgctgttgagtctgtttttactgtctagctgcccaacggggcctactcacttattctttcaccccctctcctcctgctcagctgagacatgaaactatttgaaatggctttatgtcacagaagactttaatccgtcaaattcttgtataactttgaataaatggttaatgttcacttaaaagacagattttggagattgtattcatatctatttgcatttgatttctaggtcaattgatgtgattatttttgttaaatgttgtcttgtgcccttaactacgaactgaattgtattaaacactacaaagtcatcttgagtattttaaatcggtttgtgtagttaggtttcccaacatctgtggttacctaatgtttaatattatagaactgtcctcagaaactttgtcaattttcacggctataaggaaacagaaggactcttttaattctgtatttatcatttactttctgtatatatagtttaataacctgcttgggtgtaatttgccaagcttgaattctttaatgcatttgcataaattctatactgtttagagcttaaagctacagaagcattgttaggaattgcttggacactgaattttaaactttttgacattgttaacaagcatgttcatcttttcttgtcactagtccaagaaaaatatgcttaatgtatattacaaaggctttgtatatgttaacctgttttaatgccaaaagtttgctttgtccacaatttccttaagacctcttcagaaagggatttgtttgccttaatgaatactgttgggaaaaaacacagtataatgagtgaaaagggcagaagcaagaaatttctacatcttagcgactccaagaagaatgagtatccacatttagatggcacattatgaggatactcattcttcttgtagtgtagtgtagaaagtgaaccggggtcctcta

SEQ ID NO: 52275 - DNA, 3186 bp, Homo sapiens
tggctagtcgaggctgggtggtaatcggccgaggctcggctctgcgggtgtcagttcgtccggcttcctcacagcccctcactcccggcggctgacagcagcagcggcggcggcgggcggcgcctggcgtttcgaggctgagcggcaccggggttggggcgcggaggaggagcagcagcgggaggaggagccgtgtgccctggcactgagcggccgcggccatggcgtacgcctatctcttcaagtacatcataatcggcgacacaggtgttggtaaatcatgcttattgctacagtttacagacaagaggtttcagccagtgcatgaccttactattggtgtagagttcggtgctcgaatgataactattgatgggaaacagataaaacttcagatatgggatacggcagggcaagaatcctttcgttccatcacaaggtcgtattacagaggtgcagcaggagctttactagtttacgatattacacggagagatacattcaaccacttgacaacctggttagaagatgcccgccagcattccaattccaacatggtcattatgcttattggaaataaaagtgatttagaatctagaagagaagtaaaaaaagaagaaggtgaagcttttgcacgagaacatggactcatcttcatggaaacgtctgctaagactgcttccaatgtagaagaggcatttattaatacagcaaaagaaatttatgaaaaaattcaagaaggagtctttgacattaataatgaggcaaatggcattaaaattggccctcagcatgctgctaccaatgcaacacatgcaggcaatcagggaggacagcaggctgggggcggctgctgttgagtctgtttttactgtctagctgcccaacggggcctactcacttattctttcaccccctctcctcctgctcagctgagacatgaaactatttgaaatggctttatgtcacagaagactttaatccgtcaaattcttgtataactttgaataaatggttaatgttcacttaaaagacagattttggagattgtattcatatctatttgcatttgatttctaggtcaattgatgtgattatttttgttaaatgttgtcttgtgcccttaactacgaactgaattgtattaaacactacaaagtcatcttgagtattttaaatcggtttgtgtagttaggtttcccaacatctgtggttacctaatgtttaatattatagaactgtcctcagaaactttgtcaattttcacggctataaggaaacagaaggactcttttaattctgtatttatcatttactttctgtatatatagtttaataacctgcttgggtgtaatttgccaagcttgaattctttaatgcatttgcataaattctatactgtttagagcttaaagctacagaagcattgttaggaattgcttggacactgaattttaaactttttgacattgttaacaagcatgttcatcttttcttgtcactagtccaagaaaaatatgcttaatgtatattacaaaggctttgtatatgttaacctgttttaatgccaaaagtttgctttgtccacaatttccttaagacctcttcagaaagggatttgtttgccttaatgaatactgttgggaaaaaacacagtataatgagtgaaaagggcagaagcaagaaatttctacatcttagcgactccaagaagaatgagtatccacatttagatggcacattatgaggactttaatctttccttaaacacaataatgttttcttttttcttttattcacatgatttctaagtatatttttcatgcaggacagtttttcaaccttgatgtacagtgactgtgtaaaatttttctttcagtggcaacctctataatctttaaaatatggtgagcatcttgtctgttttgaaggggatatgacaataaatctatcagatggaaaatcctgttacaaagtagaaaagctttagtaatttactcagtgtggtggttttatcctttttttctttttctcccttggtctataatgaaattgttacagcagtgcaaaataaaatcctatgtataaaagtgttctttttttttattatgaccacctcttttttaatgtatttttagtccacttacagcttttacatgggtttaagcatgttttttaaaagggtcagaatggttaacactcaaccctttttaaaaattttgctaaaatgcgacaaatctcaccatactgaaattatttttgttgatggtgtaagcagtgtaagcaagtgttttctcctgaactagcacaaaagcacttatgcctgaaagaaagcataaagaagttctaactctgaaactaactactttcatttcgctcatggccttcaactttctacaggtcttccctgaagattcagcagtactctctcaaaggtttgacagtactcttgtgggaaatcaccaaatgctgtcatagttttgttttaactgtctccttgagggcagagggaagggtgagagaaaatctgttttcatgggtatttgtagtacagcctttttttctttcaagtggctgtatcaaattcactggtcttactaatcactgtctttaccagtgagtacaaaaagttaaggcaactaggacaggtactgctctataccaagaagagaatgattctttggaaattgttatttttaagcttctgttaatttttccagaagtttagtgcgtttcttttccatactttctcccctaattcttttatttgaagaagagaacttaatggcaaataaacaacaaaccaggacatgcattttaataccctaaggaaaaatggaaccctcaaatataactcctcccacaaccaccctaatgtgcctcagtctggggcagcaggtggacttctcaatagttcttttccacattctctacaaatcacatctaccgttaaggaatatgttatgaatcctttctgttaattgagaaagcaatgttattgtctgtgatttccagtctttgctcattttattatccctgtcaaataatgtaatattggtacctgcagttgaatttgtaatattgtaattgaatttttagttgatcttcgatcagtttttatagcatctatggacatagaaaatcagtcactgaaaaaaataaacacagctttcaatgtctcactca

SEQ ID NO: 52276 - DNA, 3223 bp, Homo sapiens
gccagcacctgcaggcggagaagaagaagatgcagcagaacatccaggagcttgaggagcagctggaggaggaggagagcgcccggctgttattgttcggctgggctcggtcgggcgctgtctccctcggctctgcgggtgtcagttcgtccggcttcctcacagcccctcactcccggcggctgacagcagcagcggcggaggaggagcagcagcgggaggaggagccgtgtgccctggcactgagcggccgcggccatggcgtacgcctatctcttcaagtacatcataatcggcgacacaggtgttggtaaatcatgcttattgctacagtttacagacaagaggtttcagccagtgcatgaccttactattggtgtagagttcggtgctcgaatgataactattgatgggaaacagataaaacttcagatatgggatacggcagggcaagaatcctttcgttccatcacaaggtcgtattacagaggtgcagcaggagctttactagtttacgatattacacggagagatacattcaaccacttgacaacctggttagaagatgcccgccagcattccaattccaacatggtcattatgcttattggaaataaaagtgatttagaatctagaagagaagtaaaaaaagaagaaggtgaagcttttgcacgagaacatggactcatcttcatggaaacgtctgctaagactgcttccaatgtagaagaggcatttattaatacagcaaaagaaatttatgaaaaaattcaagaaggagtctttgacattaataatgaggcaaatggcattaaaattggccctcagcatgctgctaccaatgcaacacatgcaggcaatcagggaggacagcaggctgggggcggctgctgttgagtctgtttttactgtctagctgcccaacggggcctactcacttattctttcaccccctctcctcctgctcagctgagacatgaaactatttgaaatggctttatgtcacagaagactttaatccgtcaaattcttgtataactttgaataaatggttaatgttcacttaaaagacagattttggagattgtattcatatctatttgcatttgatttctaggtcaattgatgtgattatttttgttaaatgttgtcttgtgcccttaactacgaactgaattgtattaaacactacaaagtcatcttgagtattttaaatcggtttgtgtagttaggtttcccaacatctgtggttacctaatgtttaatattatagaactgtcctcagaaactttgtcaattttcacggctataaggaaacagaaggactcttttaattctgtatttatcatttactttctgtatatatagtttaataacctgcttgggtgtaatttgccaagcttgaattctttaatgcatttgcataaattctatactgtttagagcttaaagctacagaagcattgttaggaattgcttggacactgaattttaaactttttgacattgttaacaagcatgttcatcttttcttgtcactagtccaagaaaaatatgcttaatgtatattacaaaggctttgtatatgttaacctgttttaatgccaaaagtttgctttgtccacaatttccttaagacctcttcagaaagggatttgtttgccttaatgaatactgttgggaaaaaacacagtataatgagtgaaaagggcagaagcaagaaatttctacatcttagcgactccaagaagaatgagtatccacatttagatggcacattatgaggactttaatctttccttaaacacaataatgttttcttttttcttttattcacatgatttctaagtatatttttcatgcaggacagtttttcaaccttgatgtacagtgactgtgtaaaatttttctttcagtggcaacctctataatctttaaaatatggtgagcatcttgtctgttttgaaggggatatgacaataaatctatcagatggaaaatcctgttacaaagtagaaaagctttagtaatttactcagtgtggtggttttatcctttttttctttttctcccttggtctataatgaaattgttacagcagtgcaaaataaaatcctatgtataaaagtgttctttttttttattatgaccacctcttttttaatgtatttttagtccacttacagcttttacatgggtttaagcatgttttttaaaagggtcagaatggttaacactcaaccctttttaaaaattttgctaaaatgcgacaaatctcaccatactgaaattatttttgttgatggtgtaagcagtgtaagcaagtgttttctcctgaactagcacaaaagcacttatgcctgaaagaaagcataaagaagttctaactctgaaactaactactttcatttcgctcatggccttcaactttctacaggtcttccctgaagattcagcagtactctctcaaaggtttgacagtactcttgtgggaaatcaccaaatgctgtcatagttttgttttaactgtctccttgagggcagagggaagggtgagagaaaatctgttttcatgggtatttgtagtacagcctttttttctttcaagtggctgtatcaaattcactggtcttactaatcactgtctttaccagtgagtacaaaaagttaaggcaactaggacaggtactgctctataccaagaagagaatgattctttggaaattgttatttttaagcttctgttaatttttccagaagtttagtgcgtttcttttccatactttctcccctaattcttttatttgaagaagagaacttaatggcaaataaacaacaaaccaggacatgcattttaataccctaaggaaaaatggaaccctcaaatataactcctcccacaaccaccctaatgtgcctcagtctggggcagcaggtggacttctcaatagttcttttccacattctctacaaatcacatctaccgttaaggaatatgttatgaatcctttctgttaattgagaaagcaatgttattgtctgtgatttccagtctttgctcattttattatccctgtcaaataatgtaatattggtacctgcagttgaatttgtaatattgtaattgaatttttagttgatcttcgatcagtttttatagcatctatggacatagaaaatcagtcactgaaaaaaataaacacagctttcaatgtctcactca

SEQ ID NO: 52277 - DNA, 3016 bp, Homo sapiens
  misc_feature (8)..(8): n is a, c, g, or t
  misc_feature (10)..(10): n is a, c, g, or t
  misc_feature (12)..(12): n is a, c, g, or t
cccaattngncnttggccggccgtgtgccctggcactgagcggccgcggccatggcgtacgcctatctcttcaagtacatcataatcggcgacacaggtgttggtaaatcatgcttattgctacagtttacagacaagaggtttcagccagtgcatgaccttactattggtgtagagttcggtgctcgaatgataactattgatgggaaacagataaaacttcagatatgggatacggcagggcaagaatcctttcgttccatcacaaggtcgtattacagaggtgcagcaggagctttactagtttacgatattacacggagagatacattcaaccacttgacaacctggttagaagatgcccgccagcattccaattccaacatggtcattatgcttattggaaataaaagtgatttagaatctagaagagaagtaaaaaaagaagaaggtgaagcttttgcacgagaacatggactcatcttcatggaaacgtctgctaagactgcttccaatgtagaagaggcatttattaatacagcaaaagaaatttatgaaaaaattcaagaaggagtctttgacattaataatgaggcaaatggcattaaaattggccctcagcatgctgctaccaatgcaacacatgcaggcaatcagggaggacagcaggctgggggcggctgctgttgagtctgtttttactgtctagctgcccaacggggcctactcacttattctttcaccccctctcctcctgctcagctgagacatgaaactatttgaaatggctttatgtcacagaagactttaatccgtcaaattcttgtataactttgaataaatggttaatgttcacttaaaagacagattttggagattgtattcatatctatttgcatttgatttctaggtcaattgatgtgattatttttgttaaatgttgtcttgtgcccttaactacgaactgaattgtattaaacactacaaagtcatcttgagtattttaaatcggtttgtgtagttaggtttcccaacatctgtggttacctaatgtttaatattatagaactgtcctcagaaactttgtcaattttcacggctataaggaaacagaaggactcttttaattctgtatttatcatttactttctgtatatatagtttaataacctgcttgggtgtaatttgccaagcttgaattctttaatgcatttgcataaattctatactgtttagagcttaaagctacagaagcattgttaggaattgcttggacactgaattttaaactttttgacattgttaacaagcatgttcatcttttcttgtcactagtccaagaaaaatatgcttaatgtatattacaaaggctttgtatatgttaacctgttttaatgccaaaagtttgctttgtccacaatttccttaagacctcttcagaaagggatttgtttgccttaatgaatactgttgggaaaaaacacagtataatgagtgaaaagggcagaagcaagaaatttctacatcttagcgactccaagaagaatgagtatccacatttagatggcacattatgaggactttaatctttccttaaacacaataatgttttcttttttcttttattcacatgatttctaagtatatttttcatgcaggacagtttttcaaccttgatgtacagtgactgtgtaaaatttttctttcagtggcaacctctataatctttaaaatatggtgagcatcttgtctgttttgaaggggatatgacaataaatctatcagatggaaaatcctgttacaaagtagaaaagctttagtaatttactcagtgtggtggttttatcctttttttctttttctcccttggtctataatgaaattgttacagcagtgcaaaataaaatcctatgtataaaagtgttctttttttttattatgaccacctcttttttaatgtatttttagtccacttacagcttttacatgggtttaagcatgttttttaaaagggtcagaatggttaacactcaaccctttttaaaaattttgctaaaatgcgacaaatctcaccatactgaaattatttttgttgatggtgtaagcagtgtaagcaagtgttttctcctgaactagcacaaaagcacttatgcctgaaagaaagcataaagaagttctaactctgaaactaactactttcatttcgctcatggccttcaactttctacaggtcttccctgaagattcagcagtactctctcaaaggtttgacagtactcttgtgggaaatcaccaaatgctgtcatagttttgttttaactgtctccttgagggcagagggaagggtgagagaaaatctgttttcatgggtatttgtagtacagcctttttttctttcaagtggctgtatcaaattcactggtcttactaatcactgtctttaccagtgagtacaaaaagttaaggcaactaggacaggtactgctctataccaagaagagaatgattctttggaaattgttatttttaagcttctgttaatttttccagaagtttagtgcgtttcttttccatactttctcccctaattcttttatttgaagaagagaacttaatggcaaataaacaacaaaccaggacatgcattttaataccctaaggaaaaatggaaccctcaaatataactcctcccacaaccaccctaatgtgcctcagtctggggcagcaggtggacttctcaatagttcttttccacattctctacaaatcacatctaccgttaaggaatatgttatgaatcctttctgttaattgagaaagcaatgttattgtctgtgatttccagtctttgctcattttattatccctgtcaaataatgtaatattggtacctgcagttgaatttgtaatattgtaattgaatttttagttgatcttcgatcagtttttatagcatctatggacatagaaaatcagtcactgaaaaaaataaacacagctttcaatgtctcactca

SEQ ID NO: 52278 - DNA, 1500 bp, Homo sapiens
ctccggcggcgccggcagcggcagaacttccgggtcggcgcggaggcggggcggaggcgccgcggcggctgttattgttcggctgggctcggtcgggcgctgtctccctcggctctgcgggtgtcagttcgtccggcttcctcacagcccctcactcccggcggctgacagcagcagcggcggcggcgggcggcgcctggcgtttcgaggctgagcggcaccggggttggggcgcggaggaggagcagcagcgggaggaggagccgtgtgccctggcactgagcggccgcggccatggcgtacgcctatctcttcaagtacatcataatcggcgacacaggtgttggtaaatcatgcttattgctacagtttacagacaagaggtttcagccagtgcatgaccttactattggtgtagagttcggtgctcgaatgataactattgatgggaaacagataaaacttcagatatgggatacggcagggcaagaatcctttcgttccatcacaaggtcgtattacagaggtgcagcaggagctttactagtttacgatattacacggagagatacattcaaccacttgacaacctggttagaagatgcccgccagcattccaattccaacatggtcattatgcttattggaaataaaagtgatttagaatctagaagagaagtaaaaaaagaagaaggtgaagcttttgcacgagaacatggactcatcttcatggaaacgtctgctaagactgcttccaatgtagaagaggcatttattaatacagcaaaagaaatttatgaaaaaattcaagaaggagtctttgacattaataatgaggcaaatggcattaaaattggccctcagcatgctgctaccaatgcaacacatgcaggcaatcagggaggacagcaggctgggggcggctgctgttgagtctgtttttactgtctagctgcccaacggggcctactcacttattctttcaccccctctcctcctgctcagctgagacatgaaactatttgaaatggctttatgtcacagaagactttaatccgtcaaattcttgtataactttgaataaatggttaatgttcacttaaaaaaaaaaaaaaaaaaaaaaaaaaaaaaaaaaaaaaaaaaaaacaaaaaaaaaaaaaaaaaaaaaaaaaaaaaaaaaaaaaaaaaaaaaaaaaaaaaaaaaaaaaaaaaaaaaaaaacaaaaaaaaaaaacaaaaagtgcgaaaggagcaggagaagcagagtagagataaaaagagaagagaagacgaagaggataaagagacaaagaagaccgtcgggagagggaaggaaggagagatgagcctagcgcgaggcggagcgaggggcgcagcgggacggcgccatgaaaaggaggtcggtagggataagagcggcggcgcccgagttggaggggggggagtcgaagaggcagcggagggggcagcgggcgatgtaaaacacgagggagagagcgcg

SEQ ID NO: 52279 - DNA, 3192 bp, Homo sapiens
ctccggcggcgccggcagcggcagaacttccgggtcggcgcggaggcggggcggaggcgccgcggcggctgttattgttcggctgggctcggtcgggcgctgtctccctcggctctgcgggtgtcagttcgtccggcttcctcacagcccctcactcccggcggctgacagcagcagcggcggcggcgggcggcgcctggcgtttcgaggctgagcggcaccggggttggggcgcggaggaggagcagcagcgggaggaggagccgtgtgccctggcactgagcggccgcggccatggcgtacgcctatctcttcaagtacatcataatcggcgacacaggtgttggtaaatcatgcttattgctacagtttacagacaagaggtttcagccagtgcatgaccttactattggtgtagagttcggtgctcgaatgataactattgatgggaaacagataaaacttcagatatgggatacggcagggcaagaatcctttcgttccatcacaaggtcgtattacagaggtgcagcaggagctttactagtttacgatattacacggagagatacattcaaccacttgacaacctggttagaagatgcccgccagcattccaattccaacatggtcattatgcttattggaaataaaagtgatttagaatctagaagagaagtaaaaaaagaagaaggtgaagcttttgcacgagaacatggactcatcttcatggaaacgtctgctaagactgcttccaatgtagaagaggcatttattaatacagcaaaagaaatttatgaaaaaattcaagaaggagtctttgacattaataatgaggacagcaggctgggggcggctgctgttgagtctgtttttactgtctagctgcccaacggggcctactcacttattctttcaccccctctcctcctgctcagctgagacatgaaactatttgaaatggctttatgtcacagaagactttaatccgtcaaattcttgtataactttgaataaatggttaatgttcacttaaaagacagattttggagattgtattcatatctatttgcatttgatttctaggtcaattgatgtgattatttttgttaaatgttgtcttgtgcccttaactacgaactgaattgtattaaacactacaaagtcatcttgagtattttaaatcggtttgtgtagttaggtttcccaacatctgtggttacctaatgtttaatattatagaactgtcctcagaaactttgtcaattttcacggctataaggaaacagaaggactcttttaattctgtatttatcatttactttctgtatatatagtttaataacctgcttgggtgtaatttgccaagcttgaattctttaatgcatttgcataaattctatactgtttagagcttaaagctacagaagcattgttaggaattgcttggacactgaattttaaactttttgacattgttaacaagcatgttcatcttttcttgtcactagtccaagaaaaatatgcttaatgtatattacaaaggctttgtatatgttaacctgttttaatgccaaaagtttgctttgtccacaatttccttaagacctcttcagaaagggatttgtttgccttaatgaatactgttgggaaaaaacacagtataatgagtgaaaagggcagaagcaagaaatttctacatcttagcgactccaagaagaatgagtatccacatttagatggcacattatgaggactttaatctttccttaaacacaataatgttttcttttttcttttattcacatgatttctaagtatatttttcatgcaggacagtttttcaaccttgatgtacagtgactgtgtaaaatttttctttcagtggcaacctctataatctttaaaatatggtgagcatcttgtctgttttgaaggggatatgacaataaatctatcagatggaaaatcctgttacaaagtagaaaagctttagtaatttactcagtgtggtggttttatcctttttttctttttctcccttggtctataatgaaattgttacagcagtgcaaaataaaatcctatgtataaaagtgttctttttttttattatgaccacctcttttttaatgtatttttagtccacttacagcttttacatgggtttaagcatgttttttaaaagggtcagaatggttaacactcaaccctttttaaaaattttgctaaaatgcgacaaatctcaccatactgaaattatttttgttgatggtgtaagcagtgtaagcaagtgttttctcctgaactagcacaaaagcacttatgcctgaaagaaagcataaagaagttctaactctgaaactaactactttcatttcgctcatggccttcaactttctacaggtcttccctgaagattcagcagtactctctcaaaggtttgacagtactcttgtgggaaatcaccaaatgctgtcatagttttgttttaactgtctccttgagggcagagggaagggtgagagaaaatctgttttcatgggtatttgtagtacagcctttttttctttcaagtggctgtatcaaattcactggtcttactaatcactgtctttaccagtgagtacaaaaagttaaggcaactaggacaggtactgctctataccaagaagagaatgattctttggaaattgttatttttaagcttctgttaatttttccagaagtttagtgcgtttcttttccatactttctcccctaattcttttatttgaagaagagaacttaatggcaaataaacaacaaaccaggacatgcattttaataccctaaggaaaaatggaaccctcaaatataactcctcccacaaccaccctaatgtgcctcagtctggggcagcaggtggacttctcaatagttcttttccacattctctacaaatcacatctaccgttaaggaatatgttatgaatcctttctgttaattgagaaagcaatgttattgtctgtgatttccagtctttgctcattttattatccctgtcaaataatgtaatattggtacctgcagttgaatttgtaatattgtaattgaatttttagttgatcttcgatcagtttttatagcatctatggacatagaaaatcagtcactgaaaaaaataaacacagctttcaatgtctcactca

SEQ ID NO: 52280 - DNA, 1141 bp, Homo sapiens
ctccggcggcgccggcagcggcagaacttccgggtcggcgcggaggcggggcggaggcgccgcggcggctgttattgttcggctgggctcggtcgggcgctgtctccctcggctctgcgggtgtcagttcgtccggcttcctcacagcccctcactcccggcggctgacagcagcagcggcggcggcgggcggcgcctggcgtttcgaggctgagcggcaccggggttggggcgcggaggaggagcagcagcgggaggaggagccgtgtgccctggcactgagcggccgcggccatggcgtacgcctatctcttcaagtacatcataatcggcgacacaggtgttggtaaatcatgcttattgctacagtttacagacaagaggtttcagccagtgcatgaccttactattggtgtagagttcggtgctcgaatgataactattgatgggaaacagataaaacttcagatatgggatacggcagggcaagaatcctttcgttccatcacaaggtcgtattacagaggtgcagcaggagctttactagtttacgatattacacggagagatacattcaaccacttgacaacctggttagaagatgcccgccagcattccaattccaacatggtcattatgcttattggaaataaaagtgatttagaatctagaagagaagtaaaaaaagaagaaggtgaagcttttgcacgagaacatggactcatcttcatggaaacgtctgctaagactgcttccaatgtagaagaggcatttattaatacagcaaaagaaatttatgaaaaaattcaagaaggagtctttgacattaataatgaggcaaatggcattaaaattggccctcagcatgctgctaccaatgcaacacatgcaggcaatcagggaggacagcaggctgggggcggctgctgttgagtctgtttttactgtctagctgcccaacggggcctactcacttattctttcaccccctctcctcctgctcagctgagacatgaaactatttgaaatggctttatgtcacagaagactttaatccgtcaaattcttgtataactttgaatcaaacagtgatgcggcaggcctgtcccacttccgcacacactaccgtcttacgtcgtct

SEQ ID NO: 52281 - DNA, 1034 bp, Homo sapiens
ctccggcggcgccggcagcggcagaacttccgggtcggcgcggaggcggggcggaggcgccgcggcggctgttattgttcggctgggctcggtcgggcgctgtctccctcggctctgcgggtgtcagttcgtccggcttcctcacagcccctcactcccggcggctgacagcagcagcggcggcggcgggcggcgcctggcgtttcgaggctgagcggcaccggggttggggcgcggaggaggagcagcagcgggaggaggagccgtgtgccctggcactgagcggccgcggccatggcgtacgcctatctcttcaagtacatcataatcggcgacacaggtgttggtaaatcatgcttattgctacagtttacagacaagaggtttcagccagtgcatgaccttactattggtgtagagttcggtgctcgaatgataactattgatgggaaacagataaaacttcagatatgggatacggcagggcaagaatcctttcgttccatcacaaggtcgtattacagaggtgcagcaggagctttactagtttacgatattacacggagagatacattcaaccacttgacaacctggttagaagatgcccgccagcattccaattccaacatggtcattatgcttattggaaataaaagtgatttagaatctagaagagaagtaaaaaaagaagaaggtgaagcttttgcacgagaacatggactcatcttcatggaaacgtctgctaagactgcttccaatgtagaagaggcatttattaatacagcaaaagaaatttatgaaaaaattcaagaaggagtctttgacattaataatgaggcaaatggcattaaaattggccctcagcatgctgctaccaatgcaacacatgcaggcaatcagggaggacagcaggctgggggcggctgctgttgagtctgtttttactgtctagctgcccaacggggcctactcacttattctttcacccccattcccccactccagataaagcttcagttatatctcaaaaaaaa

SEQ ID NO: 52282 - DNA, 2941 bp, Homo sapiens
aggggtttatctttattttataaaaactggtagacacacacatagctacagtttacagacaagaggtttcagccagtgcatgaccttactattggtgtagagttcggtgctcgaatgataactattgatgggaaacagataaaacttcagatatgggatacggcagggcaagaatcctttcgttccatcacaaggtcgtattacagaggtgcagcaggagctttactagtttacgatattacacggagagatacattcaaccacttgacaacctggttagaagatgcccgccagcattccaattccaacatggtcattatgcttattggaaataaaagtgatttagaatctagaagagaagtaaaaaaagaagaaggtgaagcttttgcacgagaacatggactcatcttcatggaaacgtctgctaagactgcttccaatgtagaagaggcatttattaatacagcaaaagaaatttatgaaaaaattcaagaaggagtctttgacattaataatgaggcaaatggcattaaaattggccctcagcatgctgctaccaatgcaacacatgcaggcaatcagggaggacagcaggctgggggcggctgctgttgagtctgtttttactgtctagctgcccaacggggcctactcacttattctttcaccccctctcctcctgctcagctgagacatgaaactatttgaaatggctttatgtcacagaagactttaatccgtcaaattcttgtataactttgaataaatggttaatgttcacttaaaagacagattttggagattgtattcatatctatttgcatttgatttctaggtcaattgatgtgattatttttgttaaatgttgtcttgtgcccttaactacgaactgaattgtattaaacactacaaagtcatcttgagtattttaaatcggtttgtgtagttaggtttcccaacatctgtggttacctaatgtttaatattatagaactgtcctcagaaactttgtcaattttcacggctataaggaaacagaaggactcttttaattctgtatttatcatttactttctgtatatatagtttaataacctgcttgggtgtaatttgccaagcttgaattctttaatgcatttgcataaattctatactgtttagagcttaaagctacagaagcattgttaggaattgcttggacactgaattttaaactttttgacattgttaacaagcatgttcatcttttcttgtcactagtccaagaaaaatatgcttaatgtatattacaaaggctttgtatatgttaacctgttttaatgccaaaagtttgctttgtccacaatttccttaagacctcttcagaaagggatttgtttgccttaatgaatactgttgggaaaaaacacagtataatgagtgaaaagggcagaagcaagaaatttctacatcttagcgactccaagaagaatgagtatccacatttagatggcacattatgaggactttaatctttccttaaacacaataatgttttcttttttcttttattcacatgatttctaagtatatttttcatgcaggacagtttttcaaccttgatgtacagtgactgtgtaaaatttttctttcagtggcaacctctataatctttaaaatatggtgagcatcttgtctgttttgaaggggatatgacaataaatctatcagatggaaaatcctgttacaaagtagaaaagctttagtaatttactcagtgtggtggttttatcctttttttctttttctcccttggtctataatgaaattgttacagcagtgcaaaataaaatcctatgtataaaagtgttctttttttttattatgaccacctcttttttaatgtatttttagtccacttacagcttttacatgggtttaagcatgttttttaaaagggtcagaatggttaacactcaaccctttttaaaaattttgctaaaatgcgacaaatctcaccatactgaaattatttttgttgatggtgtaagcagtgtaagcaagtgttttctcctgaactagcacaaaagcacttatgcctgaaagaaagcataaagaagttctaactctgaaactaactactttcatttcgctcatggccttcaactttctacaggtcttccctgaagattcagcagtactctctcaaaggtttgacagtactcttgtgggaaatcaccaaatgctgtcatagttttgttttaactgtctccttgagggcagagggaagggtgagagaaaatctgttttcatgggtatttgtagtacagcctttttttctttcaagtggctgtatcaaattcactggtcttactaatcactgtctttaccagtgagtacaaaaagttaaggcaactaggacaggtactgctctataccaagaagagaatgattctttggaaattgttatttttaagcttctgttaatttttccagaagtttagtgcgtttcttttccatactttctcccctaattcttttatttgaagaagagaacttaatggcaaataaacaacaaaccaggacatgcattttaataccctaaggaaaaatggaaccctcaaatataactcctcccacaaccaccctaatgtgcctcagtctggggcagcaggtggacttctcaatagttcttttccacattctctacaaatcacatctaccgttaaggaatatgttatgaatcctttctgttaattgagaaagcaatgttattgtctgtgatttccagtctttgctcattttattatccctgtcaaataatgtaatattggtacctgcagttgaatttgtaatattgtaattgaatttttagttgatcttcgatcagtttttatagcatctatggacatagaaaatcagtcactgaaaaaaataaacacagctttcaatgtctcactca

SEQ ID NO: 52283 - DNA, 3187 bp, Homo sapiens
ctccggcggcgccggcagcggcagaacttccgggtcggcgcggaggcggggcggaggcgccgcggcggctgttattgttcggctgggctcggtcgggcgctgtctccctcggctctgcgggtgtcagttcgtccggcttcctcacagcccctcactcccggcggctgacagcagcagcggcggcggcgggcggcgcctggcgtttcgaggctgagcggcaccggggttggggcgcggaggaggagcagcagcgggaggaggagccgtgtgccctggcactgagcggccgcggccatggcgtacgcctatctcttcaagtacatcataatcggcgacacaggtgtagagttcggtgctcgaatgataactattgatgggaaacagataaaacttcagatatgggatacggcagggcaagaatcctttcgttccatcacaaggtcgtattacagaggtgcagcaggagctttactagtttacgatattacacggagagatacattcaaccacttgacaacctggttagaagatgcccgccagcattccaattccaacatggtcattatgcttattggaaataaaagtgatttagaatctagaagagaagtaaaaaaagaagaaggtgaagcttttgcacgagaacatggactcatcttcatggaaacgtctgctaagactgcttccaatgtagaagaggcatttattaatacagcaaaagaaatttatgaaaaaattcaagaaggagtctttgacattaataatgaggcaaatggcattaaaattggccctcagcatgctgctaccaatgcaacacatgcaggcaatcagggaggacagcaggctgggggcggctgctgttgagtctgtttttactgtctagctgcccaacggggcctactcacttattctttcaccccctctcctcctgctcagctgagacatgaaactatttgaaatggctttatgtcacagaagactttaatccgtcaaattcttgtataactttgaataaatggttaatgttcacttaaaagacagattttggagattgtattcatatctatttgcatttgatttctaggtcaattgatgtgattatttttgttaaatgttgtcttgtgcccttaactacgaactgaattgtattaaacactacaaagtcatcttgagtattttaaatcggtttgtgtagttaggtttcccaacatctgtggttacctaatgtttaatattatagaactgtcctcagaaactttgtcaattttcacggctataaggaaacagaaggactcttttaattctgtatttatcatttactttctgtatatatagtttaataacctgcttgggtgtaatttgccaagcttgaattctttaatgcatttgcataaattctatactgtttagagcttaaagctacagaagcattgttaggaattgcttggacactgaattttaaactttttgacattgttaacaagcatgttcatcttttcttgtcactagtccaagaaaaatatgcttaatgtatattacaaaggctttgtatatgttaacctgttttaatgccaaaagtttgctttgtccacaatttccttaagacctcttcagaaagggatttgtttgccttaatgaatactgttgggaaaaaacacagtataatgagtgaaaagggcagaagcaagaaatttctacatcttagcgactccaagaagaatgagtatccacatttagatggcacattatgaggactttaatctttccttaaacacaataatgttttcttttttcttttattcacatgatttctaagtatatttttcatgcaggacagtttttcaaccttgatgtacagtgactgtgtaaaatttttctttcagtggcaacctctataatctttaaaatatggtgagcatcttgtctgttttgaaggggatatgacaataaatctatcagatggaaaatcctgttacaaagtagaaaagctttagtaatttactcagtgtggtggttttatcctttttttctttttctcccttggtctataatgaaattgttacagcagtgcaaaataaaatcctatgtataaaagtgttctttttttttattatgaccacctcttttttaatgtatttttagtccacttacagcttttacatgggtttaagcatgttttttaaaagggtcagaatggttaacactcaaccctttttaaaaattttgctaaaatgcgacaaatctcaccatactgaaattatttttgttgatggtgtaagcagtgtaagcaagtgttttctcctgaactagcacaaaagcacttatgcctgaaagaaagcataaagaagttctaactctgaaactaactactttcatttcgctcatggccttcaactttctacaggtcttccctgaagattcagcagtactctctcaaaggtttgacagtactcttgtgggaaatcaccaaatgctgtcatagttttgttttaactgtctccttgagggcagagggaagggtgagagaaaatctgttttcatgggtatttgtagtacagcctttttttctttcaagtggctgtatcaaattcactggtcttactaatcactgtctttaccagtgagtacaaaaagttaaggcaactaggacaggtactgctctataccaagaagagaatgattctttggaaattgttatttttaagcttctgttaatttttccagaagtttagtgcgtttcttttccatactttctcccctaattcttttatttgaagaagagaacttaatggcaaataaacaacaaaccaggacatgcattttaataccctaaggaaaaatggaaccctcaaatataactcctcccacaaccaccctaatgtgcctcagtctggggcagcaggtggacttctcaatagttcttttccacattctctacaaatcacatctaccgttaaggaatatgttatgaatcctttctgttaattgagaaagcaatgttattgtctgtgatttccagtctttgctcattttattatccctgtcaaataatgtaatattggtacctgcagttgaatttgtaatattgtaattgaatttttagttgatcttcgatcagtttttatagcatctatggacatagaaaatcagtcactgaaaaaaataaacacagctttcaatgtctcactca

SEQ ID NO: 52284 - DNA, 3192 bp, Homo sapiens
gccagcacctgcaggcggagaagaagaagatgcagcagaacatccaggagcttgaggagcagctggaggaggaggagagcgcccggctgttattgttcggctgggctcggtcgggcgctgtctccctcggctctgcgggtgtcagttcgtccggcttcctcacagcccctcactcccggcggctgacagcagcagcggcgcctggcgtttcgaggctgagcggcaccggggttggggcgcggaggaggagcagcagcgggaggaggagccgtgtgccctggcactgagcggccgcggccatggcgtacgcctatctcttcaagtacatcataatcggcgacacaggtgtagagttcggtgctcgaatgataactattgatgggaaacagataaaacttcagatatgggatacggcagggcaagaatcctttcgttccatcacaaggtcgtattacagaggtgcagcaggagctttactagtttacgatattacacggagagatacattcaaccacttgacaacctggttagaagatgcccgccagcattccaattccaacatggtcattatgcttattggaaataaaagtgatttagaatctagaagagaagtaaaaaaagaagaaggtgaagcttttgcacgagaacatggactcatcttcatggaaacgtctgctaagactgcttccaatgtagaagaggcatttattaatacagcaaaagaaatttatgaaaaaattcaagaaggagtctttgacattaataatgaggcaaatggcattaaaattggccctcagcatgctgctaccaatgcaacacatgcaggcaatcagggaggacagcaggctgggggcggctgctgttgagtctgtttttactgtctagctgcccaacggggcctactcacttattctttcaccccctctcctcctgctcagctgagacatgaaactatttgaaatggctttatgtcacagaagactttaatccgtcaaattcttgtataactttgaataaatggttaatgttcacttaaaagacagattttggagattgtattcatatctatttgcatttgatttctaggtcaattgatgtgattatttttgttaaatgttgtcttgtgcccttaactacgaactgaattgtattaaacactacaaagtcatcttgagtattttaaatcggtttgtgtagttaggtttcccaacatctgtggttacctaatgtttaatattatagaactgtcctcagaaactttgtcaattttcacggctataaggaaacagaaggactcttttaattctgtatttatcatttactttctgtatatatagtttaataacctgcttgggtgtaatttgccaagcttgaattctttaatgcatttgcataaattctatactgtttagagcttaaagctacagaagcattgttaggaattgcttggacactgaattttaaactttttgacattgttaacaagcatgttcatcttttcttgtcactagtccaagaaaaatatgcttaatgtatattacaaaggctttgtatatgttaacctgttttaatgccaaaagtttgctttgtccacaatttccttaagacctcttcagaaagggatttgtttgccttaatgaatactgttgggaaaaaacacagtataatgagtgaaaagggcagaagcaagaaatttctacatcttagcgactccaagaagaatgagtatccacatttagatggcacattatgaggactttaatctttccttaaacacaataatgttttcttttttcttttattcacatgatttctaagtatatttttcatgcaggacagtttttcaaccttgatgtacagtgactgtgtaaaatttttctttcagtggcaacctctataatctttaaaatatggtgagcatcttgtctgttttgaaggggatatgacaataaatctatcagatggaaaatcctgttacaaagtagaaaagctttagtaatttactcagtgtggtggttttatcctttttttctttttctcccttggtctataatgaaattgttacagcagtgcaaaataaaatcctatgtataaaagtgttctttttttttattatgaccacctcttttttaatgtatttttagtccacttacagcttttacatgggtttaagcatgttttttaaaagggtcagaatggttaacactcaaccctttttaaaaattttgctaaaatgcgacaaatctcaccatactgaaattatttttgttgatggtgtaagcagtgtaagcaagtgttttctcctgaactagcacaaaagcacttatgcctgaaagaaagcataaagaagttctaactctgaaactaactactttcatttcgctcatggccttcaactttctacaggtcttccctgaagattcagcagtactctctcaaaggtttgacagtactcttgtgggaaatcaccaaatgctgtcatagttttgttttaactgtctccttgagggcagagggaagggtgagagaaaatctgttttcatgggtatttgtagtacagcctttttttctttcaagtggctgtatcaaattcactggtcttactaatcactgtctttaccagtgagtacaaaaagttaaggcaactaggacaggtactgctctataccaagaagagaatgattctttggaaattgttatttttaagcttctgttaatttttccagaagtttagtgcgtttcttttccatactttctcccctaattcttttatttgaagaagagaacttaatggcaaataaacaacaaaccaggacatgcattttaataccctaaggaaaaatggaaccctcaaatataactcctcccacaaccaccctaatgtgcctcagtctggggcagcaggtggacttctcaatagttcttttccacattctctacaaatcacatctaccgttaaggaatatgttatgaatcctttctgttaattgagaaagcaatgttattgtctgtgatttccagtctttgctcattttattatccctgtcaaataatgtaatattggtacctgcagttgaatttgtaatattgtaattgaatttttagttgatcttcgatcagtttttatagcatctatggacatagaaaatcagtcactgaaaaaaataaacacagctttcaatgtctcactca

SEQ ID NO: 52285 - DNA, 2907 bp, Homo sapiens
gttgtttgttttggttttatggaagagtggtttgttcgggttggttgatggttattgttggtgtagagttcggtgctcgaatgataactattgatgggaaacagataaaacttcagatatgggatacggcagggcaagaatcctttcgttccatcacaaggtcgtattacagaggtgcagcaggagctttactagtttacgatattacacggagagatacattcaaccacttgacaacctggttagaagatgcccgccagcattccaattccaacatggtcattatgcttattggaaataaaagtgatttagaatctagaagagaagtaaaaaaagaagaaggtgaagcttttgcacgagaacatggactcatcttcatggaaacgtctgctaagactgcttccaatgtagaagaggcatttattaatacagcaaaagaaatttatgaaaaaattcaagaaggagtctttgacattaataatgaggcaaatggcattaaaattggccctcagcatgctgctaccaatgcaacacatgcaggcaatcagggaggacagcaggctgggggcggctgctgttgagtctgtttttactgtctagctgcccaacggggcctactcacttattctttcaccccctctcctcctgctcagctgagacatgaaactatttgaaatggctttatgtcacagaagactttaatccgtcaaattcttgtataactttgaataaatggttaatgttcacttaaaagacagattttggagattgtattcatatctatttgcatttgatttctaggtcaattgatgtgattatttttgttaaatgttgtcttgtgcccttaactacgaactgaattgtattaaacactacaaagtcatcttgagtattttaaatcggtttgtgtagttaggtttcccaacatctgtggttacctaatgtttaatattatagaactgtcctcagaaactttgtcaattttcacggctataaggaaacagaaggactcttttaattctgtatttatcatttactttctgtatatatagtttaataacctgcttgggtgtaatttgccaagcttgaattctttaatgcatttgcataaattctatactgtttagagcttaaagctacagaagcattgttaggaattgcttggacactgaattttaaactttttgacattgttaacaagcatgttcatcttttcttgtcactagtccaagaaaaatatgcttaatgtatattacaaaggctttgtatatgttaacctgttttaatgccaaaagtttgctttgtccacaatttccttaagacctcttcagaaagggatttgtttgccttaatgaatactgttgggaaaaaacacagtataatgagtgaaaagggcagaagcaagaaatttctacatcttagcgactccaagaagaatgagtatccacatttagatggcacattatgaggactttaatctttccttaaacacaataatgttttcttttttcttttattcacatgatttctaagtatatttttcatgcaggacagtttttcaaccttgatgtacagtgactgtgtaaaatttttctttcagtggcaacctctataatctttaaaatatggtgagcatcttgtctgttttgaaggggatatgacaataaatctatcagatggaaaatcctgttacaaagtagaaaagctttagtaatttactcagtgtggtggttttatcctttttttctttttctcccttggtctataatgaaattgttacagcagtgcaaaataaaatcctatgtataaaagtgttctttttttttattatgaccacctcttttttaatgtatttttagtccacttacagcttttacatgggtttaagcatgttttttaaaagggtcagaatggttaacactcaaccctttttaaaaattttgctaaaatgcgacaaatctcaccatactgaaattatttttgttgatggtgtaagcagtgtaagcaagtgttttctcctgaactagcacaaaagcacttatgcctgaaagaaagcataaagaagttctaactctgaaactaactactttcatttcgctcatggccttcaactttctacaggtcttccctgaagattcagcagtactctctcaaaggtttgacagtactcttgtgggaaatcaccaaatgctgtcatagttttgttttaactgtctccttgagggcagagggaagggtgagagaaaatctgttttcatgggtatttgtagtacagcctttttttctttcaagtggctgtatcaaattcactggtcttactaatcactgtctttaccagtgagtacaaaaagttaaggcaactaggacaggtactgctctataccaagaagagaatgattctttggaaattgttatttttaagcttctgttaatttttccagaagtttagtgcgtttcttttccatactttctcccctaattcttttatttgaagaagagaacttaatggcaaataaacaacaaaccaggacatgcattttaataccctaaggaaaaatggaaccctcaaatataactcctcccacaaccaccctaatgtgcctcagtctggggcagcaggtggacttctcaatagttcttttccacattctctacaaatcacatctaccgttaaggaatatgttatgaatcctttctgttaattgagaaagcaatgttattgtctgtgatttccagtctttgctcattttattatccctgtcaaataatgtaatattggtacctgcagttgaatttgtaatattgtaattgaatttttagttgatcttcgatcagtttttatagcatctatggacatagaaaatcagtcactgaaaaaaataaacacagctttcaatgtctcactca

SEQ ID NO: 52286 - DNA, 3175 bp, Homo sapiens
ttcaaatgtgaggctctgggttatttgcttcctttcaaatttgtcttcagagcttagttgctaggagtccattctgtcctttaataatgattcgtgtattgtgaagccattcagtaaattgggttgtcagggattgccaaaaagggtttagaggtcttgcgggctggggaggttgcaggagcgactacatgtgcactacatgtgcgtctcgttgacttgagcaatcttgagcaatagcggtgttttgtaactttttcctaagactggtgaagttaagttttcttgtctctctttatgcactccttccctacctgctcttattctgtatatgaataatatgaaaatgtagaggacattgtattaaaggaaactctccaaccttttttttcgttacaggcagggcaagaatcctttcgttccatcacaaggtcgtattacagaggtgcagcaggagctttactagtttacgatattacacggagagatacattcaaccacttgacaacctggttagaagatgcccgccagcattccaattccaacatggtcattatgcttattggaaataaaagtgatttagaatctagaagagaagtaaaaaaagaagaaggtgaagcttttgcacgagaacatggactcatcttcatggaaacgtctgctaagactgcttccaatgtagaagaggcatttattaatacagcaaaagaaatttatgaaaaaattcaagaaggagtctttgacattaataatgaggcaaatggcattaaaattggccctcagcatgctgctaccaatgcaacacatgcaggcaatcagggaggacagcaggctgggggcggctgctgttgagtctgtttttactgtctagctgcccaacggggcctactcacttattctttcaccccctctcctcctgctcagctgagacatgaaactatttgaaatggctttatgtcacagaagactttaatccgtcaaattcttgtataactttgaataaatggttaatgttcacttaaaagacagattttggagattgtattcatatctatttgcatttgatttctaggtcaattgatgtgattatttttgttaaatgttgtcttgtgcccttaactacgaactgaattgtattaaacactacaaagtcatcttgagtattttaaatcggtttgtgtagttaggtttcccaacatctgtggttacctaatgtttaatattatagaactgtcctcagaaactttgtcaattttcacggctataaggaaacagaaggactcttttaattctgtatttatcatttactttctgtatatatagtttaataacctgcttgggtgtaatttgccaagcttgaattctttaatgcatttgcataaattctatactgtttagagcttaaagctacagaagcattgttaggaattgcttggacactgaattttaaactttttgacattgttaacaagcatgttcatcttttcttgtcactagtccaagaaaaatatgcttaatgtatattacaaaggctttgtatatgttaacctgttttaatgccaaaagtttgctttgtccacaatttccttaagacctcttcagaaagggatttgtttgccttaatgaatactgttgggaaaaaacacagtataatgagtgaaaagggcagaagcaagaaatttctacatcttagcgactccaagaagaatgagtatccacatttagatggcacattatgaggactttaatctttccttaaacacaataatgttttcttttttcttttattcacatgatttctaagtatatttttcatgcaggacagtttttcaaccttgatgtacagtgactgtgtaaaatttttctttcagtggcaacctctataatctttaaaatatggtgagcatcttgtctgttttgaaggggatatgacaataaatctatcagatggaaaatcctgttacaaagtagaaaagctttagtaatttactcagtgtggtggttttatcctttttttctttttctcccttggtctataatgaaattgttacagcagtgcaaaataaaatcctatgtataaaagtgttctttttttttattatgaccacctcttttttaatgtatttttagtccacttacagcttttacatgggtttaagcatgttttttaaaagggtcagaatggttaacactcaaccctttttaaaaattttgctaaaatgcgacaaatctcaccatactgaaattatttttgttgatggtgtaagcagtgtaagcaagtgttttctcctgaactagcacaaaagcacttatgcctgaaagaaagcataaagaagttctaactctgaaactaactactttcatttcgctcatggccttcaactttctacaggtcttccctgaagattcagcagtactctctcaaaggtttgacagtactcttgtgggaaatcaccaaatgctgtcatagttttgttttaactgtctccttgagggcagagggaagggtgagagaaaatctgttttcatgggtatttgtagtacagcctttttttctttcaagtggctgtatcaaattcactggtcttactaatcactgtctttaccagtgagtacaaaaagttaaggcaactaggacaggtactgctctataccaagaagagaatgattctttggaaattgttatttttaagcttctgttaatttttccagaagtttagtgcgtttcttttccatactttctcccctaattcttttatttgaagaagagaacttaatggcaaataaacaacaaaccaggacatgcattttaataccctaaggaaaaatggaaccctcaaatataactcctcccacaaccaccctaatgtgcctcagtctggggcagcaggtggacttctcaatagttcttttccacattctctacaaatcacatctaccgttaaggaatatgttatgaatcctttctgttaattgagaaagcaatgttattgtctgtgatttccagtctttgctcattttattatccctgtcaaataatgtaatattggtacctgcagttgaatttgtaatattgtaattgaatttttagttgatcttcgatcagtttttatagcatctatggacatagaaaatcagtcactgaaaaaaataaacacagctttcaatgtctcactca

SEQ ID NO: 52287 - DNA, 3147 bp, Homo sapiens
ctccggcggcgccggcagcggcagaacttccgggtcggcgcggaggcggggcggaggcgccgcggcggctgttattgttcggctgggctcggtcgggcgctgtctccctcggctctgcgggtgtcagttcgtccggcttcctcacagcccctcactcccggcggctgacagcagcagcggcggcggcgggcggcgcctggcgtttcgaggctgagcggcaccggggttggggcgcggaggaggagcagcagcgggaggaggagccgtgtgccctggcactgagcggccgcggccatggcgtacgcctatctcttcaagtacatcataatcggcgacacaggtgttggtaaatcatgcttattgctacagtttacagacaagaggtttcagccagtgcatgaccttactattggtgtagagttcggtgctcgaatgataactattgatgggaaacagataaaacttcagatatgggatacggcagggcaagaatcctttcgttccatcacaaggtcgtattacagaggtgcagcaggagctttactagtttacgatattacacggagagatacattcaaccacttgacaacctggttagaagatgcccgccagcattccaattccaacatggtcattatgcttattggaaataaaaggcatttattaatacagcaaaagaaatttatgaaaaaattcaagaaggagtctttgacattaataatgaggcaaatggcattaaaattggccctcagcatgctgctaccaatgcaacacatgcaggcaatcagggaggacagcaggctgggggcggctgctgttgagtctgtttttactgtctagctgcccaacggggcctactcacttattctttcaccccctctcctcctgctcagctgagacatgaaactatttgaaatggctttatgtcacagaagactttaatccgtcaaattcttgtataactttgaataaatggttaatgttcacttaaaagacagattttggagattgtattcatatctatttgcatttgatttctaggtcaattgatgtgattatttttgttaaatgttgtcttgtgcccttaactacgaactgaattgtattaaacactacaaagtcatcttgagtattttaaatcggtttgtgtagttaggtttcccaacatctgtggttacctaatgtttaatattatagaactgtcctcagaaactttgtcaattttcacggctataaggaaacagaaggactcttttaattctgtatttatcatttactttctgtatatatagtttaataacctgcttgggtgtaatttgccaagcttgaattctttaatgcatttgcataaattctatactgtttagagcttaaagctacagaagcattgttaggaattgcttggacactgaattttaaactttttgacattgttaacaagcatgttcatcttttcttgtcactagtccaagaaaaatatgcttaatgtatattacaaaggctttgtatatgttaacctgttttaatgccaaaagtttgctttgtccacaatttccttaagacctcttcagaaagggatttgtttgccttaatgaatactgttgggaaaaaacacagtataatgagtgaaaagggcagaagcaagaaatttctacatcttagcgactccaagaagaatgagtatccacatttagatggcacattatgaggactttaatctttccttaaacacaataatgttttcttttttcttttattcacatgatttctaagtatatttttcatgcaggacagtttttcaaccttgatgtacagtgactgtgtaaaatttttctttcagtggcaacctctataatctttaaaatatggtgagcatcttgtctgttttgaaggggatatgacaataaatctatcagatggaaaatcctgttacaaagtagaaaagctttagtaatttactcagtgtggtggttttatcctttttttctttttctcccttggtctataatgaaattgttacagcagtgcaaaataaaatcctatgtataaaagtgttctttttttttattatgaccacctcttttttaatgtatttttagtccacttacagcttttacatgggtttaagcatgttttttaaaagggtcagaatggttaacactcaaccctttttaaaaattttgctaaaatgcgacaaatctcaccatactgaaattatttttgttgatggtgtaagcagtgtaagcaagtgttttctcctgaactagcacaaaagcacttatgcctgaaagaaagcataaagaagttctaactctgaaactaactactttcatttcgctcatggccttcaactttctacaggtcttccctgaagattcagcagtactctctcaaaggtttgacagtactcttgtgggaaatcaccaaatgctgtcatagttttgttttaactgtctccttgagggcagagggaagggtgagagaaaatctgttttcatgggtatttgtagtacagcctttttttctttcaagtggctgtatcaaattcactggtcttactaatcactgtctttaccagtgagtacaaaaagttaaggcaactaggacaggtactgctctataccaagaagagaatgattctttggaaattgttatttttaagcttctgttaatttttccagaagtttagtgcgtttcttttccatactttctcccctaattcttttatttgaagaagagaacttaatggcaaataaacaacaaaccaggacatgcattttaataccctaaggaaaaatggaaccctcaaatataactcctcccacaaccaccctaatgtgcctcagtctggggcagcaggtggacttctcaatagttcttttccacattctctacaaatcacatctaccgttaaggaatatgttatgaatcctttctgttaattgagaaagcaatgttattgtctgtgatttccagtctttgctcattttattatccctgtcaaataatgtaatattggtacctgcagttgaatttgtaatattgtaattgaatttttagttgatcttcgatcagtttttatagcatctatggacatagaaaatcagtcactgaaaaaaataaacacagctttcaatgtctcactca

SEQ ID NO: 52288 - DNA, 2771 bp, Homo sapiens
gtgttctaaatactaaccctcataataccctgaataatacagttagtatgttaaaaattaattaaaagaatggtcatcacaactttgaattccatggtacactttccacaaatgcttctgtttgtaccatgttgattagtaatgtgaccctttctttcccatgtttagtgatttagaatctagaagagaagtaaaaaaagaagaaggtgaagcttttgcacgagaacatggactcatcttcatggaaacgtctgctaagactgcttccaatgtagaagaggcatttattaatacagcaaaagaaatttatgaaaaaattcaagaaggagtctttgacattaataatgaggcaaatggcattaaaattggccctcagcatgctgctaccaatgcaacacatgcaggcaatcagggaggacagcaggctgggggcggctgctgttgagtctgtttttactgtctagctgcccaacggggcctactcacttattctttcaccccctctcctcctgctcagctgagacatgaaactatttgaaatggctttatgtcacagaagactttaatccgtcaaattcttgtataactttgaataaatggttaatgttcacttaaaagacagattttggagattgtattcatatctatttgcatttgatttctaggtcaattgatgtgattatttttgttaaatgttgtcttgtgcccttaactacgaactgaattgtattaaacactacaaagtcatcttgagtattttaaatcggtttgtgtagttaggtttcccaacatctgtggttacctaatgtttaatattatagaactgtcctcagaaactttgtcaattttcacggctataaggaaacagaaggactcttttaattctgtatttatcatttactttctgtatatatagtttaataacctgcttgggtgtaatttgccaagcttgaattctttaatgcatttgcataaattctatactgtttagagcttaaagctacagaagcattgttaggaattgcttggacactgaattttaaactttttgacattgttaacaagcatgttcatcttttcttgtcactagtccaagaaaaatatgcttaatgtatattacaaaggctttgtatatgttaacctgttttaatgccaaaagtttgctttgtccacaatttccttaagacctcttcagaaagggatttgtttgccttaatgaatactgttgggaaaaaacacagtataatgagtgaaaagggcagaagcaagaaatttctacatcttagcgactccaagaagaatgagtatccacatttagatggcacattatgaggactttaatctttccttaaacacaataatgttttcttttttcttttattcacatgatttctaagtatatttttcatgcaggacagtttttcaaccttgatgtacagtgactgtgtaaaatttttctttcagtggcaacctctataatctttaaaatatggtgagcatcttgtctgttttgaaggggatatgacaataaatctatcagatggaaaatcctgttacaaagtagaaaagctttagtaatttactcagtgtggtggttttatcctttttttctttttctcccttggtctataatgaaattgttacagcagtgcaaaataaaatcctatgtataaaagtgttctttttttttattatgaccacctcttttttaatgtatttttagtccacttacagcttttacatgggtttaagcatgttttttaaaagggtcagaatggttaacactcaaccctttttaaaaattttgctaaaatgcgacaaatctcaccatactgaaattatttttgttgatggtgtaagcagtgtaagcaagtgttttctcctgaactagcacaaaagcacttatgcctgaaagaaagcataaagaagttctaactctgaaactaactactttcatttcgctcatggccttcaactttctacaggtcttccctgaagattcagcagtactctctcaaaggtttgacagtactcttgtgggaaatcaccaaatgctgtcatagttttgttttaactgtctccttgagggcagagggaagggtgagagaaaatctgttttcatgggtatttgtagtacagcctttttttctttcaagtggctgtatcaaattcactggtcttactaatcactgtctttaccagtgagtacaaaaagttaaggcaactaggacaggtactgctctataccaagaagagaatgattctttggaaattgttatttttaagcttctgttaatttttccagaagtttagtgcgtttcttttccatactttctcccctaattcttttatttgaagaagagaacttaatggcaaataaacaacaaaccaggacatgcattttaataccctaaggaaaaatggaaccctcaaatataactcctcccacaaccaccctaatgtgcctcagtctggggcagcaggtggacttctcaatagttcttttccacattctctacaaatcacatctaccgttaaggaatatgttatgaatcctttctgttaattgagaaagcaatgttattgtctgtgatttccagtctttgctcattttattatccctgtcaaataatgtaatattggtacctgcagttgaatttgtaatattgtaattgaatttttagttgatcttcgatcagtttttatagcatctatggacatagaaaatcagtcactgaaaaaaataaacacagctttcaatgtctcactca

SEQ ID NO: 52289 - DNA, 1270 bp, Homo sapiens
ctccggcggcgccggcagcggcagaacttccgggtcggcgcggaggcggggcggaggcgccgcggcggctgttattgttcggctgggctcggtcgggcgctgtctccctcggctctgcgggtgtcagttcgtccggcttcctcacagcccctcactcccggcggctgacagcagcagcggcggcggcgggcggcgcctggcgtttcgaggctgagcggcaccggggttggggcgcggaggaggagcagcagcgggaggaggagccgtgtgccctggcactgagcggccgcggccatggcgtacgcctatctcttcaagtacatcataatcggcgacacaggtgttggtaaatcatgcttattgctacagtttacagacaagaggtttcagccagtgcatgaccttactattggtgtagagttcggtgctcgaatgataactattgatgggaaacagataaaacttcagatatgggatacggcagggcaagaatcctttcgttccatcacaaggtcgtattacagaggtgcagcaggagctttactagtttacgatattacacggagagatacattcaaccacttgacaacctggttagaagatgcccgccagcattccaattccaacatggtcattatgcttattggaaataaaagtgatttagaatctagaagagaagtaaaaaaagaagaaggtgaagcttttgcacgagaacatggactcatcttcatggaaacgtctgctaagactgcttccaatgtagaagaggcatttattaatacagcaaaagaaatttatgaaaaaattcaagaaggagtctttgacattaataatgagtatatacatataaatattgttggtcaatattaatttagagttcacttttgattactattttatattttttattttataattcattattttataatttttttaattcctaaaatcaatcatgataatcagttaacaccattagtttacagtcatccaactgaaaaattggtatatgtggtatagtagttaaatatttatgttctagtagagcaacactttgtctatggaaatggattaaagtaagtggccctatccattcattgcaagcaatgcaaaataatataaatcccccaaagagaaaagaaaatccacttttatccacatgaccatatggtgtcatctgctttgggaataatgttctggtatataaatgcatgtactatgtactaatgcaagatgctctctctgttatctggcaggaaagagggaaata

SEQ ID NO: 52290 - DNA, 2981 bp, Homo sapiens
gtaaaatccacttgagggagtgagggttaagacataagtgtgagtttgatgaatgaaagaactactctgtgtgtgggttcttggcaagctgccatgtctttggggatcatagaaattattgatgacacagaacactcatatgcccttagcctgtacagctgattcaacatggaacagaaacactgtctagagaaaagattttacgttgtattaaagcagcatgggctttgggtatttttatgctttaaagattacttgcaataattattttaaatgatttctgcattatgagaatttcctgaaaagcagcattatccaataactgtttaccccgtacctggtatgataaagaattattttcagaaacatttccacagtgtttttaaaaggaaggaacatcccttaggagatattgttttaattgttgctaaaatctacttgctgtatttttctcagttgtttgataaaattgtatcataaagaattaaatgagttttttaagaattagttaaactatattgtctggtcatatttattgttctgttctcttttatttcaggcaaatggcattaaaattggccctcagcatgctgctaccaatgcaacacatgcaggcaatcagggaggacagcaggctgggggcggctgctgttgagtctgtttttactgtctagctgcccaacggggcctactcacttattctttcaccccctctcctcctgctcagctgagacatgaaactatttgaaatggctttatgtcacagaagactttaatccgtcaaattcttgtataactttgaataaatggttaatgttcacttaaaagacagattttggagattgtattcatatctatttgcatttgatttctaggtcaattgatgtgattatttttgttaaatgttgtcttgtgcccttaactacgaactgaattgtattaaacactacaaagtcatcttgagtattttaaatcggtttgtgtagttaggtttcccaacatctgtggttacctaatgtttaatattatagaactgtcctcagaaactttgtcaattttcacggctataaggaaacagaaggactcttttaattctgtatttatcatttactttctgtatatatagtttaataacctgcttgggtgtaatttgccaagcttgaattctttaatgcatttgcataaattctatactgtttagagcttaaagctacagaagcattgttaggaattgcttggacactgaattttaaactttttgacattgttaacaagcatgttcatcttttcttgtcactagtccaagaaaaatatgcttaatgtatattacaaaggctttgtatatgttaacctgttttaatgccaaaagtttgctttgtccacaatttccttaagacctcttcagaaagggatttgtttgccttaatgaatactgttgggaaaaaacacagtataatgagtgaaaagggcagaagcaagaaatttctacatcttagcgactccaagaagaatgagtatccacatttagatggcacattatgaggactttaatctttccttaaacacaataatgttttcttttttcttttattcacatgatttctaagtatatttttcatgcaggacagtttttcaaccttgatgtacagtgactgtgtaaaatttttctttcagtggcaacctctataatctttaaaatatggtgagcatcttgtctgttttgaaggggatatgacaataaatctatcagatggaaaatcctgttacaaagtagaaaagctttagtaatttactcagtgtggtggttttatcctttttttctttttctcccttggtctataatgaaattgttacagcagtgcaaaataaaatcctatgtataaaagtgttctttttttttattatgaccacctcttttttaatgtatttttagtccacttacagcttttacatgggtttaagcatgttttttaaaagggtcagaatggttaacactcaaccctttttaaaaattttgctaaaatgcgacaaatctcaccatactgaaattatttttgttgatggtgtaagcagtgtaagcaagtgttttctcctgaactagcacaaaagcacttatgcctgaaagaaagcataaagaagttctaactctgaaactaactactttcatttcgctcatggccttcaactttctacaggtcttccctgaagattcagcagtactctctcaaaggtttgacagtactcttgtgggaaatcaccaaatgctgtcatagttttgttttaactgtctccttgagggcagagggaagggtgagagaaaatctgttttcatgggtatttgtagtacagcctttttttctttcaagtggctgtatcaaattcactggtcttactaatcactgtctttaccagtgagtacaaaaagttaaggcaactaggacaggtactgctctataccaagaagagaatgattctttggaaattgttatttttaagcttctgttaatttttccagaagtttagtgcgtttcttttccatactttctcccctaattcttttatttgaagaagagaacttaatggcaaataaacaacaaaccaggacatgcattttaataccctaaggaaaaatggaaccctcaaatataactcctcccacaaccaccctaatgtgcctcagtctggggcagcaggtggacttctcaatagttcttttccacattctctacaaatcacatctaccgttaaggaatatgttatgaatcctttctgttaattgagaaagcaatgttattgtctgtgatttccagtctttgctcattttattatccctgtcaaataatgtaatattggtacctgcagttgaatttgtaatattgtaattgaatttttagttgatcttcgatcagtttttatagcatctatggacatagaaaatcagtcactgaaaaaaataaacacagctttcaatgtctcactca

SEQ ID NO: 52291 - DNA, 2277 bp, Homo sapiens
  misc_feature (6)..(6): n is a, c, g, or t
  misc_feature (8)..(8): n is a, c, g, or t
  misc_feature (21)..(21): n is a, c, g, or t
ttttgngntgcccaagacttngaatgggacatgaaactatttgaaatggctttatgtcacagaagactttaatccgtcaaattcttgtataactttgaataaatggttaatgttcacttaaaagacagattttggagattgtattcatatctatttgcatttgatttctaggtcaattgatgtgattatttttgttaaatgttgtcttgtgcccttaactacgaactgaattgtattaaacactacaaagtcatcttgagtattttaaatcggtttgtgtagttaggtttcccaacatctgtggttacctaatgtttaatattatagaactgtcctcagaaactttgtcaattttcacggctataaggaaacagaaggactcttttaattctgtatttatcatttactttctgtatatatagtttaataacctgcttgggtgtaatttgccaagcttgaattctttaatgcatttgcataaattctatactgtttagagcttaaagctacagaagcattgttaggaattgcttggacactgaattttaaactttttgacattgttaacaagcatgttcatcttttcttgtcactagtccaagaaaaatatgcttaatgtatattacaaaggctttgtatatgttaacctgttttaatgccaaaagtttgctttgtccacaatttccttaagacctcttcagaaagggatttgtttgccttaatgaatactgttgggaaaaaacacagtataatgagtgaaaagggcagaagcaagaaatttctacatcttagcgactccaagaagaatgagtatccacatttagatggcacattatgaggactttaatctttccttaaacacaataatgttttcttttttcttttattcacatgatttctaagtatatttttcatgcaggacagtttttcaaccttgatgtacagtgactgtgtaaaatttttctttcagtggcaacctctataatctttaaaatatggtgagcatcttgtctgttttgaaggggatatgacaataaatctatcagatggaaaatcctgttacaaagtagaaaagctttagtaatttactcagtgtggtggttttatcctttttttctttttctcccttggtctataatgaaattgttacagcagtgcaaaataaaatcctatgtataaaagtgttctttttttttattatgaccacctcttttttaatgtatttttagtccacttacagcttttacatgggtttaagcatgttttttaaaagggtcagaatggttaacactcaaccctttttaaaaattttgctaaaatgcgacaaatctcaccatactgaaattatttttgttgatggtgtaagcagtgtaagcaagtgttttctcctgaactagcacaaaagcacttatgcctgaaagaaagcataaagaagttctaactctgaaactaactactttcatttcgctcatggccttcaactttctacaggtcttccctgaagattcagcagtactctctcaaaggtttgacagtactcttgtgggaaatcaccaaatgctgtcatagttttgttttaactgtctccttgagggcagagggaagggtgagagaaaatctgttttcatgggtatttgtagtacagcctttttttctttcaagtggctgtatcaaattcactggtcttactaatcactgtctttaccagtgagtacaaaaagttaaggcaactaggacaggtactgctctataccaagaagagaatgattctttggaaattgttatttttaagcttctgttaatttttccagaagtttagtgcgtttcttttccatactttctcccctaattcttttatttgaagaagagaacttaatggcaaataaacaacaaaccaggacatgcattttaataccctaaggaaaaatggaaccctcaaatataactcctcccacaaccaccctaatgtgcctcagtctggggcagcaggtggacttctcaatagttcttttccacattctctacaaatcacatctaccgttaaggaatatgttatgaatcctttctgttaattgagaaagcaatgttattgtctgtgatttccagtctttgctcattttattatccctgtcaaataatgtaatattggtacctgcagttgaatttgtaatattgtaattgaatttttagttgatcttcgatcagtttttatagcatctatggacatagaaaatcagtcactgaaaaaaataaacacagctttcaatgtctcactca

SEQ ID NO: 52292 - DNA, 2067 bp, Homo sapiens
aggtgcctgcaggacccccaggtagactaacactacaaagtcatcttgagtattttaaatcggtttgtgtagttaggtttcccaacatctgtggttacctaatgtttaatattatagaactgtcctcagaaactttgtcaattttcacggctataaggaaacagaaggactcttttaattctgtatttatcatttactttctgtatatatagtttaataacctgcttgggtgtaatttgccaagcttgaattctttaatgcatttgcataaattctatactgtttagagcttaaagctacagaagcattgttaggaattgcttggacactgaattttaaactttttgacattgttaacaagcatgttcatcttttcttgtcactagtccaagaaaaatatgcttaatgtatattacaaaggctttgtatatgttaacctgttttaatgccaaaagtttgctttgtccacaatttccttaagacctcttcagaaagggatttgtttgccttaatgaatactgttgggaaaaaacacagtataatgagtgaaaagggcagaagcaagaaatttctacatcttagcgactccaagaagaatgagtatccacatttagatggcacattatgaggactttaatctttccttaaacacaataatgttttcttttttcttttattcacatgatttctaagtatatttttcatgcaggacagtttttcaaccttgatgtacagtgactgtgtaaaatttttctttcagtggcaacctctataatctttaaaatatggtgagcatcttgtctgttttgaaggggatatgacaataaatctatcagatggaaaatcctgttacaaagtagaaaagctttagtaatttactcagtgtggtggttttatcctttttttctttttctcccttggtctataatgaaattgttacagcagtgcaaaataaaatcctatgtataaaagtgttctttttttttattatgaccacctcttttttaatgtatttttagtccacttacagcttttacatgggtttaagcatgttttttaaaagggtcagaatggttaacactcaaccctttttaaaaattttgctaaaatgcgacaaatctcaccatactgaaattatttttgttgatggtgtaagcagtgtaagcaagtgttttctcctgaactagcacaaaagcacttatgcctgaaagaaagcataaagaagttctaactctgaaactaactactttcatttcgctcatggccttcaactttctacaggtcttccctgaagattcagcagtactctctcaaaggtttgacagtactcttgtgggaaatcaccaaatgctgtcatagttttgttttaactgtctccttgagggcagagggaagggtgagagaaaatctgttttcatgggtatttgtagtacagcctttttttctttcaagtggctgtatcaaattcactggtcttactaatcactgtctttaccagtgagtacaaaaagttaaggcaactaggacaggtactgctctataccaagaagagaatgattctttggaaattgttatttttaagcttctgttaatttttccagaagtttagtgcgtttcttttccatactttctcccctaattcttttatttgaagaagagaacttaatggcaaataaacaacaaaccaggacatgcattttaataccctaaggaaaaatggaaccctcaaatataactcctcccacaaccaccctaatgtgcctcagtctggggcagcaggtggacttctcaatagttcttttccacattctctacaaatcacatctaccgttaaggaatatgttatgaatcctttctgttaattgagaaagcaatgttattgtctgtgatttccagtctttgctcattttattatccctgtcaaataatgtaatattggtacctgcagttgaatttgtaatattgtaattgaatttttagttgatcttcgatcagtttttatagcatctatggacatagaaaatcagtcactgaaaaaaataaacacagctttcaatgtctcactca

SEQ ID NO: 52293 - DNA, 1833 bp, Homo sapiens
  misc_feature (48)..(48): n is a, c, g, or t
  misc_feature (57)..(58): n is a, c, g, or t
agagagagagagagagagagagagagagagagcaggagagagagaganagcaggagnnatagatagagaagcattgttaggaattgcttggacactgaattttaaactttttgacattgttaacaagcatgttcatcttttcttgtcactagtccaagaaaaatatgcttaatgtatattacaaaggctttgtatatgttaacctgttttaatgccaaaagtttgctttgtccacaatttccttaagacctcttcagaaagggatttgtttgccttaatgaatactgttgggaaaaaacacagtataatgagtgaaaagggcagaagcaagaaatttctacatcttagcgactccaagaagaatgagtatccacatttagatggcacattatgaggactttaatctttccttaaacacaataatgttttcttttttcttttattcacatgatttctaagtatatttttcatgcaggacagtttttcaaccttgatgtacagtgactgtgtaaaatttttctttcagtggcaacctctataatctttaaaatatggtgagcatcttgtctgttttgaaggggatatgacaataaatctatcagatggaaaatcctgttacaaagtagaaaagctttagtaatttactcagtgtggtggttttatcctttttttctttttctcccttggtctataatgaaattgttacagcagtgcaaaataaaatcctatgtataaaagtgttctttttttttattatgaccacctcttttttaatgtatttttagtccacttacagcttttacatgggtttaagcatgttttttaaaagggtcagaatggttaacactcaaccctttttaaaaattttgctaaaatgcgacaaatctcaccatactgaaattatttttgttgatggtgtaagcagtgtaagcaagtgttttctcctgaactagcacaaaagcacttatgcctgaaagaaagcataaagaagttctaactctgaaactaactactttcatttcgctcatggccttcaactttctacaggtcttccctgaagattcagcagtactctctcaaaggtttgacagtactcttgtgggaaatcaccaaatgctgtcatagttttgttttaactgtctccttgagggcagagggaagggtgagagaaaatctgttttcatgggtatttgtagtacagcctttttttctttcaagtggctgtatcaaattcactggtcttactaatcactgtctttaccagtgagtacaaaaagttaaggcaactaggacaggtactgctctataccaagaagagaatgattctttggaaattgttatttttaagcttctgttaatttttccagaagtttagtgcgtttcttttccatactttctcccctaattcttttatttgaagaagagaacttaatggcaaataaacaacaaaccaggacatgcattttaataccctaaggaaaaatggaaccctcaaatataactcctcccacaaccaccctaatgtgcctcagtctggggcagcaggtggacttctcaatagttcttttccacattctctacaaatcacatctaccgttaaggaatatgttatgaatcctttctgttaattgagaaagcaatgttattgtctgtgatttccagtctttgctcattttattatccctgtcaaataatgtaatattggtacctgcagttgaatttgtaatattgtaattgaatttttagttgatcttcgatcagtttttatagcatctatggacatagaaaatcagtcactgaaaaaaataaacacagctttcaatgtctcactca

SEQ ID NO: 52294 - DNA, 793 bp, Homo sapiens
ctccggcggcgccggcagcggcagaacttccgggtcggcgcggaggcggggcggaggcgccgcggcggctgttattgttcggctgggctcggtcgggcgctgtctccctcggctctgcgggtgtcagttcgtccggcttcctcacagcccctcactcccggcggctgacagcagcagcggcggcggcgggcggcgcctggcgtttcgaggctgagcggcaccggggttggggcgcggaggaggagcagcagcgggaggaggagccgtgtgccctggcactgagcggccgcggccatggcgtacgcctatctcttcaagtacatcataatcggcgacacaggtgttggtaaatcatgcttattgctacagtttacagacaagaggtttcagccagtgcatgaccttactattggtgtagagttcggtgctcgaatgataactattgatgggaaacagataaaacttcagatatgggatacggcagggcaagaatcctttcgttccatcacaaggtcgtattacagaggtgcagcaggagctttactagtttacgatattacacggagagatacattcaaccacttgacaacctggttagaagatgcccgccagcattccaattccaacatggtcattatgcttattggaaataaaaggtaaaaaggctaatttagagcttacattgcattagtgatgaagactgtactgtttatttgactactttccttaacatttgttcaaatgtgagttaccagcctcttaaattataaaatttcggaaattctaaggtgtt

SEQ ID NO: 52295 - DNA, 388 bp, Homo sapiens
ctccggcggcgccggcagcggcagaacttccgggtcggcgcggaggcggggcggaggcgccgcggcggctgttattgttcggctgggctcggtcgggcgctgtctccctcggctctgcgggtgtcagttcgtccggcttcctcacagcccctcactcccggcggctgacagcagcagcggcggcggcgggcggcgcctggcgtttcgaggctgagcggcaccggggttggggcgcggaggaggagcagcagcgggaggaggagccgtgtgccctggcactgagcggccgcggccatggcgtttcgaggctgagcggcaccggggttggggcgcggaggaggagcagcagcgggaggaggagccgtgtgccctggcactgagcggccgc

SEQ ID NO: 52296 - DNA, 510 bp, Homo sapiens
ttcctgctactttcctgcttggtgtcttgcctttgaggtgatgttttcctcagacccctctgtgtccttcttgcttcctgggggacctttgtggaactagaaaatagctgtttactagcctggagcaaggagcctgagtggtgagccggctgcataaggaaggcacagcagctcatgcttccctaatgcttcactaaacatgcaagacacaaaaggacccagagggctccagcaagggtctggggaccgaacgtctaagcttggaaactggctggacttgtatgggtaaaaccaagagtttttgtcttagctctcccgcctcacagctttgaactgggggtggctcttggtctgcatttcacatgcacggcacctggagaagtgctgctagccctggcacctctgtggggttctggccctggcggagactttgccggccacggcttctccaataggttgctggtggcatctccagcaattggtggtcattgagttggagaagaagaaaag

SEQ ID NO: 52297 - DNA, 428 bp, Homo sapiens
gtttctgggtgacatggccatggattagtaagaaatacatactatatttaattaatgccctaatttatagataatagtggtattacatgaatttagtatattttcatgaggaaaccaatatgttcccttctattaagtagttcataaataatccagaattttcaaacactgtagatacactttatagatgataaggatatatcaaatgtgtagtttggtgttgattatggttatttatagtatctatgattttgcagtacccaaaaccagaagttgttataatatacatgttgttatacgctaatatacataaagtaatatacgtaagtatactttgtgtacataatagatctcaataattaaaaacttttttttttaaaactgacatttgttttatataatggcatttatagatgggctttgtgagt

SEQ ID NO: 52298 - DNA, 390 bp, Homo sapiens
tctgaccataaactgcatctgtctcatgagctggatccagtataggacagggacactgggccaccactggctctgtacaaccccagtgccccattctcatggtgtggatggagccccgttttctcctaaaacttgtcccactagttcaggggtccccagtccccaggccatagaccggtacttggttcatggcctgttaggaacccagccacacagcaggaggtgagcagcaggcgagaagcattccccactgagctccacctcctgtcagatcagtggaggcgttagatacttacaggagcatgaaccctaatgtgagctgcacatgtgagggatctaggttgcatgccccttgtgagaatctaatgcctgattatctgagttggaaca

SEQ ID NO: 52299 - DNA, 266 bp, Homo sapiens
agcatgggaaattccattaacagaaacaataatggtttgttggcaaacaagcaagggaggactgaagttttaatactacttggcaaacaagcagaggaggcctgaagttttaatactggttggggcagacagtaaagatcctgagagaagatagccacagttggctggccttgataaagttctacttattcctggttgggtagaagattatgtttatgcataaggctgtacatatgcatgagagatattggtgaaggccctaatga

SEQ ID NO: 52300 - DNA, 291 bp, Homo sapiens
cttccaaactcacagatcaaagtttctgacttagaaattagcaaaatctaggagtcctgcacaagctccaattctgtttgtttgtttgcttataacctcaaggctctggcatacacagtccacatggctgaaaatggaacaaaaagctcctgtgtattcaggctactgcccttttaaccatactgtaaaagcaagcatggaatgacagcacaggagaggacagaacaggatctgtgtttacttcatgctgaccagtatgaaattcatttattttatcaaaaggtgaatggt

SEQ ID NO: 52301 - DNA, 452 bp, Homo sapiens
aagagcgaagctgcacaatgagaggcccttagctccccgaaaggcaattataactccagcaggcacagcgagctggcagcaccgatccactgcacacctcatggcaagatgcctcgttgttccctcctggcctcacagctctcgtctgcttgtccctctgggcacattcacaatttatctgaaaagcacattgttcctgccccggggattaaggcctcagagtggcaggagtcggtgtgtgaaaatgaaggtgtgacaacgaaacacacatacacgccccataacaaacctcttccctttgaacagttaaaaaaggcttaagaaggcctgtcagccagtgtttgtgtgggtgaggctggagttttgtaaagggaggaaggagttggaccacacttgcctgcacggtggccctgggacacacgtcccttggtgggctcctcagagctcctcga

SEQ ID NO: 52302 - DNA, 333 bp, Homo sapiens
cacctttgggaggtagggatcatagttccacttcattgatgaggaaaactgtagtgcagagatggcaaacactgtccaagaacatggtggtggatgggacccaaaccccaacttttgctcccatgttctctgtccactggctatggctcttgcccctgtgtacagatacaggctctggacaagttcaccaaatcccttaggcttcagccccctcatctgcagaatagtggcttggattccaccatcttcaaggtccctgccagcttttctttatttgaatttggatttattaagcagaaaaaaaagtaatgggagtttgtgggtaccaatgga

SEQ ID NO: 52303 - DNA, 239 bp, Homo sapiens
gcaatcttttgagtgacttactttgagtctttgtcacctttcctctgattttttcacatggtttaactcagtgtacccaagagtactaggtgcactcaattctgctattaactctataagcaagttcttaagaaagttaatgttaaaaaataatcttaaaattgtcttgataggaaaaatgtatttgaaattaaaaaaaattcttatgttgacttcttggttttgaaacaatgaatata

SEQ ID NO: 52304 - DNA, 169 bp, Homo sapiens
attaggtaaccattttttggtgactgaaaccctattgatctattctctaaatgtctgccatttgaagaatcccagggcaaactactatgcttttattggctttgtaaattgggacttccataagttgggcttccaaccacattagcattgttagtatggtggcattttg

SEQ ID NO: 52305 - DNA, 323 bp, Homo sapiens
taggcatatggcttcccaaaatactagtttaattcgtcggttaaatgcatggatcatagtagacaagttatttctagtctataaccagttaataattataaaatcattgccatttctaaagtgaaatagcagctaatgtttaataagcgttcagtatgttgtaggcactgtgctacatgttttcctgtgttctctcactgagttctctatagtctatgaaggagggactactattatgtctgttttgtttaaagcggaactgacatggtgaaaaagtttgtggagaaaagtcaaatcacttgctcaagataccaagtgaataa

SEQ ID NO: 52306 - DNA, 641 bp, Homo sapiens
ctacccactagatgccatgagcacctcccactccaagtcgtgacaaccaaacatgtctccagtcattgccaaatgtcccctgggggagcaaaatgtcccctggacttctgttgaatcactgtttggaagtgtttacttgagtggttttcaggccagggcctcatactctgaatttttgttgtaaatggtctgggggtgctgggggtggagagcagagcactggtatttttaggagatccccctgtcattctaaagcatatccagggttaagcaccattaatcagatgatcttctgtctgatctgctggccccctttcatctatgtgcagtatttttctctatgctttttaaaataatgaaagtttcttgaactccatcttgacttgaaatatagcctgccacacagttagcaaatatagcaagaataacaagtgttctaaatggatttttaatttattatggcaatagtacattccaaagggtggcattttttaaaatgagatttttcttttgggcctaagattacagtcacatggttccaaattcagagggttcaaaaggacacagaaaagcctgcttcccacttgtgcccactggcctccccttttttcgcataaatggcagtttatagctttgtctgt

SEQ ID NO: 52307 - DNA, 470 bp, Homo sapiens
  misc_feature (433)..(433): n is a, c, g, or t
  misc_feature (452)..(452): n is a, c, g, or t
aggtgtgaaccgttttccaaaaatggttgtactgttctacagtcccccaccaatgcttgagttccggggcctccatgctgtgccagcactgcttggtgttgtcggtctctccaatttttgccattctaacttgcctgtggtggcgtctcactgcctttaaaatgtggatttccccatgactagtggggttgaccatcttttcatgtgtgtcggcctttggatgccttctcatgaagtttatgttcaatcttttgtccattttaaatattgggtttggcctgttgggctgctcttgtaagagttccttatatcatctggaaacaagtctttgtgagatatatatatatatgtgtgtgtgtgtgtgtgtgtgtgtgtgtgtatatacatatatatatttatttgtttgttttttgagacaaagtcttgctccaanccagggaaaagaagcagantccagtctcaaaaaaagg

SEQ ID NO: 52308 - DNA, 276 bp, Homo sapiens
gattgttacctttattgatgattttccctttgtgcttcctggtgtctggcaccaagaccacacccctacttctccaatggccctttccctcagtaagcttagcttattgctcacctcccaccttctccctgaaccccagcagaaagacatggacctgtcagatgctcccgatatttaagtgtctatgccaaaatctcatgtggaccttgtttgttcaaatgagttactattgagagagacagcaaagtcatcttctttagggaacctgaaaattgt

SEQ ID NO: 52309 - DNA, 332 bp, Homo sapiens
aggttctataatattggatgtcagttggttgcagttctcacctatttgaaaaaaaaattgaaactacttgtcgctaaaccatggtaactcaaaaacattaaaggcaaatatctactaaggcactatatttcatttcataatttatttctccatcccccaaaaaaggcatcacctagttatttataggacactatcactattgcaacataacagaaaaatcttaacatcattgataactgtagcattttagtgtgtaaaatctatattagattttaggtgtcaaatctatactagattctaatagtgcactctacattcaacctctgatttaa

SEQ ID NO: 52310 - DNA, 257 bp, Homo sapiens
agagagcagaaatcggttcttgggaggacaaaaataaataaataaacaaatggtctgtggccctcaccaaagctcaaccttatctgaaaaatgtatattctttagtactggattcctcccattagggagaacttaattacctgggctaatttaataaaaattaaatctgttattaattacattttatttaaatgtaatttttctcctgagggggtaataatgaaaaaatgttgagaaacactgttctagataaacct

SEQ ID NO: 52311 - DNA, 379 bp, Homo sapiens
agaccaaatcgtaaaacctccaaaggtttcaaggtcttcttcaaaactatgaagtcagctgacatcaatacctttcccattccctacccaaattaaccacgtttatctttcaatccagaattgagaatccagtcttctaatagccctataaaaaaattttttttatagcccgggacattaaagagctattttgtgtcctggtgatgtagaatgcaattggcaaagaacaggagggacatgtctagtgtctcccttcagactcattagtatgctccacaaagtaaatgagactgagcaccaccgtgtccccataacattaccaaactccttgtacttctcacactctgtgtgatttaacccacaatctcagccacatccc

SEQ ID NO: 52312 - DNA, 855 bp, Homo sapiens
gcaaagtaagaagacaccagttaaggagataatagagaaagagtttgaaagaattttagataagcaacttgattagcggtccagtacaacatgtgcacaggtcctaaacaaatggaaagggtcaacctaactgaaggaaaaagaaaataactctccatgctgggacacacacagaactcttcattctgagtgccaaagcagctacaacttggctcaacaattgaactttacttccctactaattccatctgattgattctgccttcctcacctgagaagtcatctcttaagacttctctagtcttagtttccagatcaaagacctgtagatcctgttccagctgggagagcccatcaggcttggaaattggaaatcctgatcatagagaaggaaatgggtgtggcaatgtatccccagatgctacaccagccactttttcttttaactaatgattaagacagagagaaggtaaactctgagaagacgttaattaggaaggcctggagagtgaagagggcaaagatcttctacaaggagctcaaatttgggctctagaaagatgtgtgttaaggggcaagttgatggcttgggagcagaaggattcatttaaacattattcggacaacaggatgtgtgcatgggtttgtcttcacagaagttatccttatcactctccatctgttacctaaagatcaatctttggattagagctggtctacaagcatcaaaatggaggtcatcaaaatataattctgctggactggagaaaggtgaaactcaagcatctgctacatggttagctaacctgtagcaaaagaatcagtgaaaactgaataaatattctaagaaccaaa

SEQ ID NO: 52313 - DNA, 372 bp, Homo sapiens
ttttttttcctttggagagagtctcattttgtcgcccagcccgggaggtcgaggctgcagtgaaccatgatcatgccactgtacttcagcttgggcaaccaggtgagatcctatcttaaaacaaaaacaaaaacaaaaacaaaacaaaaaagcaccacaagtgatgctgatgggcagcttggattaagcaccactgaattaaaataataaaggttaggggtaagaatgctgcatgctttatagggatatctgaaagagcaacagttaggtttcatatagatggttactaaccatctctgcttttgaattttttttttaattttgcagttctgaatggttttcagattagtactttcagatgattttaagtat

SEQ ID NO: 52314 - DNA, 436 bp, Homo sapiens
  misc_feature (42)..(42): n is a, c, g, or t
tggctaatttttgtatttatgtagagatgggattttgtcatnttgcccaggctggacttgaactactgggctcaagcaatcctcctgctttgccctcccaaagtgctgggattacaggcgtgcgacccgcgcccggcccccccaattactcttaaaggtaacatcactattgtgaacctaagatcagctttttgagatgccttttcaggtgtaatggttaatactgagtgtcagcttgattggattgaaggctacaaagtattgatcctgggtgtgtctgtgagggtgttgcaaaagagattacctggggaaggcagatgcacagttaatctggtgggcacaatctaatcagataccagcgaatataaagcaggcagaaaaacataaaaaggacagactggcctagctcccagcctacatctttctcccatgctgg

SEQ ID NO: 52315 - DNA, 734 bp, Homo sapiens
tggctatgtttcttttcaggcatgtctactgtagtttgggcattaaaagttagcccacagaggtggcttacccccataatcccagcactttgggagactaaggtgggaggatcactttagctcaggagttctcacctggacaacatagtgagacccccatctgtacaaagaaataaaaaattagccaggagtggtggtttgtgcctgttgtcctggctactcgggaggctgaagtgggagaatcacttgagtccaggagtcaagactgcagtaagccataatcacaacactgcactccagtgtgggcaacagagcaagaccctgtgattaaaaaaaaaaaaaaaatagtaatgggttgtcgccacaggctaatcaagcctggatgtagcttgtatacctatgatgattgtcatgctaaattaaagagaaaattatcaaaataaaacaatttatacctctttattctaatttcagtggtaaaaagaaaattacatttagcaaattaaaacttcatagagatattatttcttacctatgagattgccaaaagttcaaaagtttgctaacatactccattggtcagattatagagaaatagatgctcttatacattgctaatcagaatacacaatggcatagcccctatccaaggcaatttggcaatacctaccaaaaatatacatttacacttggacccagccattttatttctaggaatcaatcccaaagatata

SEQ ID NO: 52316 - DNA, 153 bp, Homo sapiens
gcaaaagttgctcgatgactctaagctatgtagacacaggagtgatccttagaaagccaggctaataaatgagcagagatgtaaaaaactctacattccggggtaaacagatccacagttgaagcccagaaagttactagaaaagaagagaca

SEQ ID NO: 52317 - DNA, 488 bp, Homo sapiens
ggaaaaagacactatggcaacctttgaatgtgaaacttcagaaccatttgtcaaagtgaaatggtataaagatggtatggaggttcatgagggagataaatacaggatgcactctgacagaaaggttcacttcctctccatactgaccattgatacgtctgatgctgaagattacagctgtgtacttgtggaagatgaaaatgtcaaaacgactgctaaacttattgttgaaggtgcagttgttgagtttgtgaaagaacttcaggacatagaagttccagaatcatattcaggagaattagagtgcattgtatccccagaaaatatagaaggaaaatggtatcataatgatgtggagcttaaatccaatggcaaatatacaattacatctcgtcgtggacgtcagaacctcacggtcaaggatgtaaccaaggaggaccagggagaatacagctttgtcatcgacgggaaaaagacaacctgtaaat

SEQ ID NO: 52318 - DNA, 333 bp, Homo sapiens
  misc_feature (305)..(305): n is a, c, g, or t
  misc_feature (315)..(315): n is a, c, g, or t
cttaggcccctgggttctaacccatggaaatgaatcatgaagcctgggcacttgtaataaactgctaccaagaactagactttgaaatatggagaaatactttttccatatgaatatccagtatccattgggcaaggaattaagaaagtgattccaagattttagagcaaaacaaatttgaggaagaatgtaaatatttcacatcagcggatgtgagactgtggttgcatttttagatccgagaattctgaggatggagtaattgcttgagcctgggaggtggaggttgcagtgggccgagattncggccactgnaccccagcctgggtgaca

SEQ ID NO: 52319 - DNA, 1804 bp, Homo sapiens
agagacgacagcggcggaaacgcgcacaggcgcagctgcgtcctctggctccgggcccggctagcttcgctccagagattgcgcgggctcagggactaggcccgtggccacacccccccttgcgacaaagaccaatggaagcgggcgttgctggtcgctaagagaaccctcggcggcaagatggcagcggcgggcgagggcaccccgagctcccgcgggccgcgtcgggacccgcctaggcggccgccccggaacggttatggtgtctacgtatacccaaattccttctttcgatatgaaggagaatggaaagcagggaggaagcacggtcacgggaagttgttatttaaagatggcagttattacgaaggggcgtttgtggacggagagatcacgggagaaggccgccggcactgggcctggtcaggagacaccttctctggacagtttgttctgggagagcctcaaggctacggcgtcatggagtacaaagccggcggatgttatgaaggggaggtctcccacggcatgcgggaaggacacgggtttctggtggaccgggatggacaagtgtaccagggctccttccatgacaacaagaggcacggccctgggcagatgctctttcagaacggtgacaagtacgacggcgactgggtccgggaccggcgtcagggacacggggtgctgcgctgcgccgacggctccacctacaagggacagtggcacagcgacgtcttcagtggactgggcagcatggcccactgctcaggggtcacctattatgggttgtggatcaatggccacccagcagaacaagctacgaggatcgtgatcttgggtccggaggtgatggaagtggcccaagggtctcccttctcggtgaacgttcagctgctgcaggaccacggggaaattgccaagagcgagagcggccgggtcctgcagatctcagcgggcgtcagatacgtgcagctgtcagcctactctgaggtcaactttttcaaagtggacagagacaaccaagagacactcatccagaccccatttgggttcgaatgcatcccttatcctgtgtccagccccgcagctggggtgccggggcccagagctgccaagggaggggcagaagccgacgtgcccctgcccaggggagacctggagctgcatttgggtgccctccatggccaggaggacacccctggtggcctgcttgccaggggacatgcgccccattgtcccggggcctgtcagcgagtggagcagggctgtgccgagttcacagatgtcctcctggggccgcccccgcctgggtaccaccccttcctgttcctggacagcctccacaagaaggcaggcggcagatccagaggcggcctgcaccccagggggacaccacccacggcacaggagcctcctggaggcagcaggcctgaggggagagccacggaggagcaggctgcggcagcacacctaggggagtacgtgctcatgatccgcgacgtgaccaccccgccgttcctggggcgcaggctgcccccggccttcaaacacctgcgggtcgtagcgaagagggctggccagccaccccatgtcctggaagaaggccctgaagcctcaagcagctggcaggccgcccacagctgcaccccagagccgccagcgcctcggtgaggccccgtgtccacaggaggccacctcggtgtgaatggaaggaaacgctgcctctgcttgcgtgactctgctccccgattctccagagccccgtggttgctggcttgaataaaatgctcagtggcggcta

SEQ ID NO: 52320 - DNA, 962 bp, Homo sapiens
tctgaatgtgtatacgtgtgggggggcacgcgtgcacgtgtgtcagagtgtccttcctttttaggaggaacagtcttccattctagtgaggggctactttctgcttccccactcatccgctgctggccatcgcagttgtttgtaccttgggctgttatgaatagtgctgctgtggacatgtgtatacaagtttttgtgtgaatgtgttttcatttctcatgggtatgcacctatgaatggaattgctggatcacatggtagatttatgtttgaactttttttttttttttttgagatggagtttcactcttgctgtccaggctggagtgcagtggtgcaatgtcggctctccgcaacctccgcctcccgcgttcaagtgattctgccttggcctcctgagtagctgggattacaggcatgtgccatcatgccccactaattttgtattttgagtagagatggggtttcgccatgttggtcaggctggtctcgaactcccgacctcaggtgatcagcccgccccagcctcccaaagtgctgggattacaggcgtgagccaccgcgcctggcctaaacttttaaagaaactgctaaactgtttttccaaaattgctgcagcattttacagtcccaccagtaatgcatgaaggttcagatttctctgcgtcttcccaacacttggaattgtgtctttttgtaatagctgccctgtgggtgtgaagtgatagttcctcgtgattttgattcgcatttccctaacgagtgatgacgatgagtggctctcgctgtgttgattggctgtttgtttatcttctttggagaaatgtctattcaaatattgtacccattttttaaaaattagactatcagtcaggcacagtggctcacacctaaaatcccagcacttcgggaggctgaggtgcgaggatcactagagcccaggagatctttcttcttggtgt

SEQ ID NO: 52321 - DNA, 610 bp, Homo sapiens
tagagacggggtctctccgtgttgctcaggctggctgcctgcacttcgattcctgtgcttgttctggctgaaggcgccggccgctcaagcgtgtttcggcagatatttttgagaacatttttttatttttaaatacatgtatagcatgagtgatggagccaaacacaagttttgaagccaagctcttggttctgagaaacaggcccaacactgcacagtgtcattcgcagtcaacccaaccactgtctgagttcacgtgacgatttctcctgccaggtcacgggaagttgttatttaaagatggcagttattacgaaggggcgtttgtggacggagagatcacgggagaaggccgccggcactgggcctggtcaggtgagctctagctgggatggcacattcactcctttctcataacccatcgggctcagttggtccgccgagtctagatgcagaaggcgtgacgtgtagacgggaagctttgtgccgtgagaggcctggcctaccgagaagccctggggacctgactgaggctctgtggtcaccgctgagagcaactcaggcttccggagacacttttctagaataaagatttatctgtcccaagtta

SEQ ID NO: 52322 - DNA, 1638 bp, Homo sapiens
agagacgacagcggcggaaacgcgcacaggcgcagctgcgtcctctggctccgggcccggctagcttcgctccagagattgcgcgggctcagggactaggcccgtggccacacccccccttgcgacaaagaccaatggaagcgggcgttgctggtcgctaagagaaccctcggcggcaagatggcagcggcgggcgagggcaccccgagctcccgcgggccgcgtcgggacccgcctaggcggccgccccggaacggttatggtgtctacgtatacccaaattccttctttcgatatgaaggagaatggaaagcagggaggaagcacggtcacgggaagttgttatttaaagatggcagttattacgaaggggcgtttgtggacggagagatcacgggagaaggccgccggcactgggcctggtcaggagacaccttctctggacagtttgttctgggagagcctcaaggctacggcgtcatggagtacaaagccggcggatgttatgaaggggaggtctcccacggcatgcgggaaggacacgggtttctggtggaccgggatggacaagtgtaccagggctccttccatgacaacaagaggcacggccctgggcagatgctctttcagaacggtgacaagtacgacggcgactgggtccgggaccggcgtcagggacacggggtgctgcgctgcgccgacggctccacctacaagggacagtggcacagcgacgtcttcagtggactgggcagcatggcccactgctcaggggtcacctattatgggttgtggatcaatggccacccagcagaacaagctacgaggatcgtgatcttgggtccggaggtgatggaagtggcccaagggtctcccttctcggtgaacgttcagctgctgcaggaccacggggaaattgccaagagcgagagcggccgggtcctgcagatctcagcgggcgtcagatacgtgcagctgtcagcctactctgaggtcaactttttcaaagtggacagagacaaccaagagacactcatccagaccccatttgggttcgaatgcatcccttatcctgtgtccagccccgcagctggggtgccggggcccagagctgccaagggaggggcagaagccgacgtgcccctgcccaggggagacctggagctgcatttgggtgccctccatggccaggaggacacccctggtggcctgcttgccaggggacatgcgccccattgtcccggggcctgtcagcgagtggagcagggctgtgccgagttcacagatgtcctcctggggccgcccccgcctgggtaccaccccttcctgttcctggacagcctccacaagaaggcaggcggcagatccagaggcggcctgcaccccagggggacaccacccacggcacaggagcctcctggaggcagcaggcctgaggggagagccacggaggagcaggctgcggcagcacacctaggggagtacgtgctcatgatccgcgacgtgaccaccccgtgtccacaggaggccacctcggtgtgaatggaaggaaacgctgcctctgcttgcgtgactctgctccccgattctccagagccccgtggttgctggcttgaataaaatgctcagtggcggcta

SEQ ID NO: 52323 - DNA, 947 bp, Homo sapiens
agagacgacagcggcggaaacgcgcacaggcgcagctgcgtcctctggctccgggcccggctagcttcgctccagagattgcgcgggctcagggactaggcccgtggccacacccccccttgcgacaaagaccaatggaagcgggcgttgctggtcgctaagagaaccctcggcggcaagatggcagcggcgggcgagggcaccccgagctcccgcgggccgcgtcgggacccgcctaggcggccgccccggaacggttatggtgtctacgtatacccaaattccttctttcgatatgaaggagaatggaaagcagggaggaagcacggtcacgggaagttgttatttaaagatggcagttattacgaaggggcgtttgtggacggagagatcacgggagaaggccgccggcactgggcctggtcaggagacaccttctctggacagtttgttctgggagagcctcaaggctacggcgtcatggagtacaaagccggcggatgttatgaaggggaggtctcccacggcatgcgggaaggacacgggtttctggtggaccgggatggacaagtgtaccagggctccttccatgacaacaagaggcacggccctgggcagatgctctttcagaacggtgacaagtacgacggcgactgggtccgggaccggcgtcagggacacggggtgctgcgctgcgccgacggctccacctacaagctctgatccacccatctatagtaggagaaactcaaggagacatcggctgctacccaggcaccatgagctcagggttggtgaggcccctccgggagacctgttctccctctcgacagcaggtgtgttttctgcaaaccgtgtctcctgccttgcagccagtattccttaatgcaaagctctatgaagaacctttttttaaaaatgcattctagaaaaaaatgcattcctga

SEQ ID NO: 52324 - DNA, 826 bp, Homo sapiens
agagacgacagcggcggaaacgcgcacaggcgcagctgcgtcctctggctccgggcccggctagcttcgctccagagattgcgcgggctcagggactaggcccgtggccacacccccccttgcgacaaagaccaatggaagcgggcgttgctggtcgctaagagaaccctcggcggcaagatggcagcggcgggcgagggcaccccgagctcccgcgggccgcgtcgggacccgcctaggcggccgccccggaacggttatggtgtctacgtatacccaaattccttctttcgatatgaaggagaatggaaagcagggaggaagcacggtcacgggaagttgttatttaaagatggcagttattacgaaggggcgtttgtggacggagagatcacgggagaaggccgccggcactgggcctggtcaggagacaccttctctggacagtttgttctgggagagcctcaaggctacggcgtcatggagtacaaagccggcggatgttatgaaggggaggtctcccacggcatgcgggaaggacacgggtttctggtggaccgggatggacaagtgtaccagggctccttccatgacaacaagaggcacggccctgggcagatgctctttcagaacggtgacaagtacgacggcgactgggtccgggaccggcgtcagggacacggggtgctgcgctgcgccgacggctccacctacaagggacagtggcacagcgacgtcttcagtggactgggcagcatggcccactgctcaggggtcacctattatgggttgtgacataaacgtgagtaccggctgtattttgttt

SEQ ID NO: 52325 - DNA, 662 bp, Homo sapiens
agagacgacagcggcggaaacgcgcacaggcgcagctgcgtcctctggctccgggcccggctagcttcgctccagagattgcgcgggctcagggactaggcccgtggccacacccccccttgcgacaaagaccaatggaagcgggcgttgctggtcgctaagagaaccctcggcggcaagatggcagcggcgggcgagggcaccccgagctcccgcgggccgcgtcgggacccgcctaggcggccgccccggaacggttatggtgtctacgtatacccaaattccttctttcgatatgaaggagaatggaaagcagggaggaagcacggtcacgggaagttgttatttaaagatggcagttattacgaaggggcgtttgtggacggagagatcacgggagaaggccgccggcactgggcctggtcaggtgagctctagctgggatggcacattcactcctttctcataacccatcgggctcagttggtccgccgagtctagatgcagaaggcgtgacgtgtagacgggaagctttgtgccgtgagaggcctggcctaccgagaagccctggggacctgactgaggctctgtggtcaccgctgagagcaactcaggcttccggagacacttttctagaataaagatttatctgtcccaagtta

SEQ ID NO: 52326 - DNA, 901 bp, Homo sapiens
agagacgacagcggcggaaacgcgcacaggcgcagctgcgtcctctggctccgggcccggctagcttcgctccagagattgcgcgggctcagggactaggcccgtggccacacccccccttgcgacaaagaccaatggaagcgggcgttgctggtcgctaagagaaccctcggcggcaagatggcagcggcgggcgagggcaccccgagctcccgcgggccgcgtcgggacccgcctaggcggccgccccggaacggttatggtgtctacgtatacccaaattccttctttcgatatgaaggagaatggaaagcagggaggaagcacggtcacgggaagttgttatttaaagatggcagttattacgaaggggcgtttgtggacggagagatcacgggagaaggccgccggcactgggcctggtcaggagacaccttctctggacagtttgttctgggagagcctcaaggctacggcgtcatggagtacaaagccggcggatgttatgaaggggaggtctcccacggcatgcgggaaggtctggcgcccacaggagccgggtgctgtgagggtgggcgctttcaggacatggaatcctacgtccacttgggttcaggaacctctgagagggcctgcctgacttcagagggttggaaaggaggtagggggcccatgccctcttctccgcaccaccaggccatgtcctatgcccggcatacaccagtatgcccagcgggtcctgcggcgcttgatgcagctctgtcatccgctaccgcggaacagacgcccgtggcttaggggttaaaatggccactgctttattaactgctcctgatcctggggtcagtaggttggcctgggccctgcagggaggggcttctggtctggtctatgtggggtc

SEQ ID NO: 52327 - DNA, 4318 bp, Homo sapiens
  misc_feature (4)..(5): n is a, c, g, or t
ggcnngggctgtttgaatggctttgggatggagcaggggagagagtggctccgtttgcctccccgctttggtgatgctgtgcgagcggcttcgggggccctggagacgtccgagtcactgagggtgggctgggactcggggcccgcgtcccatctccccgccgattggtccgccccccgtgcgagtgtaacacagccagcctcgaagacttccctctgagttggaatgataatgaccgaatcccgagaagttatagacttagaccccccagctgagacttcccaggagcaggaagaccttttcatagtgaaggtggaagaagaagactgcacctggatgcaggagtacaacccgccaacgtttgagactttttaccagcgcttcaggcacttccagtaccatgaggcttcaggaccccgggaggctctcagccaactccgggtgctctgctgtgagtggctgaggcccgagctgcacacgaaggagcagatcctggagctgctggtgctggagcagttcctgaccatcctgcctgaagagttccagccctgggtgagggaacatcaccctgaaagtggagaagaggcggtggccgtgatagaaaatatacagcgagaacttgaggaacgcagacagcagattgttgcctgccctgatgtgcttcctcggaagatggcaacacctggagcagtgcaggagtcctgcagcccccatcccctgaccgtggacacccagcctgagcaagcgccacagaagcctcgtctcctggaggaaaatgcccttcctgttctccaagttccttcccttcccctgaaggacagccaggagctgacagcttcacttctctcaactgggtcccagaagttggtgaaaattgaagaggtggctgatgtggctgtatccttcatcctggaggaatgggggcatttggaccagtcccagaagtccctttatagggatgacaggaaggagaactatgggagtattacttccatgggttatgagtccagggacaatatggagctcatagtgaagcagatttctgatgactctgaatcacactgggtggcgccagaacacaccgaaaggagcgttcctcaggatccagactttgcagaagtcagtgaccttaaaggcatggtacaaaggtggcaggtcaaccccactgtggggaaatcaaggcagaatccttcccagaaaagggatctggatgcaatcacagacatcagccctaagcaaagcacacatggcgagagagggcacagatgcagcgattgtggcaaattcttcctccaagcctcaaactttattcagcatcggcgcatccacactggagaaaaaccgtttaagtgcggagaatgtgggaagagctacaatcagcgggtgcacctcacccagcaccagcgcgtccacacaggggagaaaccctacaaatgtcaggtgtgcggaaaggctttccgggtgagttcccacctggttcagcaccacagtgtccacagcggagagaggccctatggctgcaatgagtgtgggaagaacttcggtcgccattcgcatctgatcgaacacctaaaacgccacttcagggagaaatcccagagatgcagtgacaaaagaagtaagaacacaaaattaagtgttaagaagaaaatttcagaatattcagaagcagacatggaactatctggaaaaacccaaagaaatgtttctcaagttcaagattttggagaaggctgtgagtttcaaggcaagctggatagaaagcagggaattcccatgaaagagatactaggacaaccatcttcaaagaggatgaactacagtgaagtcccatatgtccacaaaaaatcctccactggagagagaccacataaatgtaacgagtgtgggaaaagcttcattcagagtgcacatcttattcaacatcaaagaatacacactggggagaaaccattcaggtgtgaggaatgtgggaaaagctacaaccaacgcgtgcacctaactcagcatcagcgcgtccacacaggtgagaagccctacacctgtcccttatgtgggaaagccttcagagtgaggtcccaccttgttcagcatcagagcgtgcacagtggggagagacccttcaagtgtaacgaatgtgggaaaggctttgggaggcgttcccacctggctggacatcttcgactccactcccgagagaaatcccatcagtgtcgtgaatgtggggaaatcttttttcagtacgttagcctaattgaacatcaggtgctccacatgggtcagaaaaatgaaaaaaatggcatctgtgaggaagcatatagttggaacttgacagtgattgaagacaagaagattgagttacaagagcagccttatcagtgtgatatctgtggaaaagcctttggttatagctcagacctcattcagcattacagaactcatacagcagagaagccctatcaatgtgatatatgtagagaaaatgttggccagtgttcccacaccaaacaacatcaaaaaatctactccagcacaaaatcccatcaatgtcatgaatgtggcagaggcttcactctgaagtcacatcttaatcaacatcagagaatccatactggtgagaaaccttttcaatgtaaagaatgtggaatgaatttcagctggagttgtagcctctttaaacacctgagaagccatgagaggacagatcccataaataccttaagtgtagaggggtctctgttgtagaatagctcttaattttagagaaaccttcctggagggaaaccatactcctataatgagcaaagtaacaacttcaagcatttttccagcgttaccatcaaactcacaaataggttgaaatcctttagttataactcagcctttaggaacaccggagaacccacaataatagaaatcttttcgtgttccccattgagaaatgctttagttagcatcttcatgcttggaaatctagacaagaagagaatccatggatggacatggtcgaggaattcggaaagcctgcagttgacattcagtcttcacttgaaactcaaaactgacactaggaacagcttcatgagttcagtagaagtaagctttatttgtagcttctgccttgtttgacggcgtatctattcagggaagcgcacagtaaaagaattccttagcatgatgtctgttttggtacctcagcaatgaaccttttctagaaattattattccaaccactagaataccctagtcactattcccactttgagcattaacccctttgaaaagaaatggacttaaagtatctctgttttggcaaaattcaggttcaggggctggatggtatgtgtttctgctgccttattcaatccaccacttctctgtgaaacactctaccttgtttttggtttgattctactgatgtcagggtttagccggtagaaggagtagttcagtttgtcaattcaggagaaactgtactggtcagtcacatcttacggcgaagggagagggaccttaggggagcagagaagacaggcaaagttgtggactgtttgatcttgtattacccacaggaatgagggcagctaaacccatagaaggagttggaccaaggcgaattacgagtcctggtcccagcagtatgtgtgctgacttctgggtgccccagaaatagacctctcctgtagagtggtgatatacagaatgagtttcagtttgcattgcagctgggattgaaagtaatcagtcgtgagcaggcaggcaggaggtcctgttagccctgccttccaggaaggttggggtgggagttttgagtgggaaagaggatgacatgtgtgagagagttctgagcctgtttgctagggagagtgagtgagtgctcttgggcactgctcaggccgtttctgctgacttgcctggcttacaataaatgcccaataaatatttgttgaccatatgtgttgtacactgtggtgccctgtccagtcccctctaccaagctgagacccccatccccagctgctctgagtttgggctgcaagtgctcacagctcttgttctccagaaactggagaattgccctcaggagatgagagccatctcacctcacccaggagtcacttcctctctacaccccaacacctggttcatttgattaaagcggagaaaactccagggtgctatgactgctctggcacccttggatcaggccaagctagactttttctgagccttcatccgtgctaagctctctcccttctctatcctgtttcattccctccctcaaaggcgtttcccaaataaatcacactgtcaatca

SEQ ID NO: 52328 - DNA, 3178 bp, Homo sapiens
  misc_feature (4)..(5): n is a, c, g, or t
ggcnngggctgtttgaatggctttgggatggagcaggggagagagtggctccgtttgcctccccgctttggtgatgctgtgcgagcggcttcgggggccctggagacgtccgagtcactgagggtgggctgggactcggggcccgcgtcccatctccccgccgattggtccgccccccgtgcgagtgtaacacagccagcctcgaagacttccctctgagttggaatgataatgaccgaatcccgagaagttatagacttagaccccccagctgagacttcccaggagcaggaagaccttttcatagtgaaggtggaagaagaagactgcacctggatgcaggagtacaacccgccaacgtttgagactttttaccagcgcttcaggcacttccagtaccatgaggcttcaggaccccgggaggctctcagccaactccgggtgctctgctgtgagtggctgaggcccgagctgcacacgaaggagcagatcctggagctgctggtgctggagcagttcctgaccatcctgcctgaagagttccagccctgggtgagggaacatcaccctgaaagtggagaagaggcggtggccgtgatagaaaatatacagcgagaacttgaggaacgcagacagcagattgttgcctgccctgatgtgcttcctcggaagatggcaacacctggagcagtgcaggagtcctgcagcccccatcccctgaccgtggacacccagcctgagcaagcgccacagaagcctcgtctcctggaggaaaatgcccttcctgttctccaagttccttcccttcccctgaaggacagccaggagctgacagcttcacttctctcaactgggtcccagaagttggtgaaaattgaagaggtggctgatgtggctgtatccttcatcctggaggaatgggggcatttggaccagtcccagaagtccctttatagggatgacaggaaggagaactatgggagtattacttccatgggttatgagtccagggacaatatggagctcatagtgaagcagatttctgatgactctgaatcacactgggtggcgccagaacacaccgaaaggagcgttcctcaggatccagactttgcagaagtcagtgaccttaaaggcatggtacaaaggtggcaggtcaaccccactgtggggaaatcaaggcagaatccttcccagaaaagggatctggatgcaatcacagacatcagccctaagcaaagcacacatggcgagagagggcacagatgcagcgattgtggcaaattcttcctccaagcctcaaactttattcagcatcggcgcatccacactggagaaaaaccgtttaagtgcggagaatgtgggaagagctacaatcagcgggtgcacctcacccagcaccagcgcgtccacacaggggagaaaccctacaaatgtcaggtgtgcggaaaggctttccgggtgagttcccacctggttcagcaccacagtgtccacagcggagagaggccctatggctgcaatgagtgtgggaagaacttcggtcgccattcgcatctgatcgaacacctaaaacgccacttcagggagaaatcccagagatgcagtgacaaaagaagtaagaacacaaaattaagtgttaagaagaaaatttcagaatattcagaagcagacatggaactatctggaaaaacccaaagaaatgtttctcaagttcaagattttggagaaggctgtgagtttcaaggcaagctggatagaaagcagggaattcccatgaaagagatactaggacaaccatcttcaaagaggatgaactacagtgaagtcccatatgtccacaaaaaatcctccactggagagagaccacataaatgtaacgagtgtgggaaaagcttcattcagagtgcacatcttattcaacatcaaagaatacacactggggagaaaccattcaggtgtgaggaatgtgggaaaagctacaaccaacgcgtgcacctaactcagcatcagcgcgtccacacaggtgagaagccctacacctgtcccttatgtgggaaagccttcagagtgaggtcccaccttgttcagcatcagagcgtgcacagtggggagagacccttcaagtgtaacgaatgtgggaaaggctttgggaggcgttcccacctggctggacatcttcgactccactcccgagagaaatcccatcagtgtcgtgaatgtggggaaatcttttttcagtacgttagcctaattgaacatcaggtgctccacatgggtcagaaaaatgaaaaaaatggcatctgtgaggaagcatatagttggaacttgacagtgattgaagacaagaagattgagttacaagagcagccttatcagtgtgatatctgtggaaaagcctttggttatagctcagacctcattcagcattacagaactcatacagcagagaagccctatcaatgtgatatatgtagagaaaatgttggccagtgttcccacaccaaacaacatcaaaaaatctactccagcacaaaatcccatcaatgtcatgaatgtggcagaggcttcactctgaagtcacatcttaatcaacatcagagaatccatactggtgagaaaccttttcaatgtaaagaatgtggaatgaatttcagctggagttgtagcctctttaaacacctgagaagccatgagaggacagatcccataaataccttaagtgtagaggggtctctgttgtagaatagctcttaattttagagaaaccttcctggagggaaaccatactcctataatgagcaaagtaacaacttcaagcatttttccagcgttaccatcaaactcacaaataggttgaaatcctttagttataactcagcctttaggaacaccggagaacccacaataatagaaatcttttcgtgttccccattgagaaatgctttagttagcatcttcatgcttggaaatctagacaagaagagaatccatggatggacatggtcgaggaattcggaaagcctgcagttgacattcagtcttcacttgaaactcaaaactgacactaggaacagcttcatgagttcagtagaagtaagctttatttgtagcttctgccttgtttgacggcgtatctattcagggaagcgcacagtaaaagaattccttagcatga

SEQ ID NO: 52329 - DNA, 1564 bp, Homo sapiens
  misc_feature (4)..(5): n is a, c, g, or t
ggcnngggctgtttgaatggctttgggatggagcaggggagagagtggctccgtttgcctccccgctttggtgatgctgtgcgagcggcttcgggggccctggagacgtccgagtcactgagggtgggctgggactcggggcccgcgtcccatctccccgccgattggtccgccccccgtgcgagtgtaacacagccagcctcgaagacttccctctgagttggaatgataatgaccgaatcccgagaagttatagacttagaccccccagctgagacttcccaggagcaggaagaccttttcatagtgaaggtggaagaagaagactgcacctggatgcaggagtacaacccgccaacgtttgagactttttaccagcgcttcaggcacttccagtaccatgaggcttcaggaccccgggaggctctcagccaactccgggtgctctgctgtgagtggctgaggcccgagctgcacacgaaggagcagatcctggagctgctggtgctggagcagttcctgaccatcctgcctgaagagttccagccctgggtgagggaacatcaccctgaaagtggagaagaggcggtggccgtgatagaaaatatacagcgagaacttgaggaacgcagacagcagattgttgcctgccctgatgtgcttcctcggaagatggcaacacctggagcagtgcaggagtcctgcagcccccatcccctgaccgtggacacccagcctgagcaagcgccacagaagcctcgtctcctggaggaaaatggttatgagtccagggacaatatggagctcatagtgaagcagatttctgatgactctgaatcacactgggtggcgccagaacacaccgaaaggagcgttcctcaggatccagactttgcagaagtcagtgaccttaaaggcatggtacaaaggtggcaggtcaaccccactgtggggaaatcaaggcagaatccttcccagaaaagggatctggatgcaatcacagacatcagccctaagcaaagcacacatggcgagagagggcacagatgcagcgattgtggcaaattcttcctccaagcctcaaactttattcagcatcggcgcatccacactggagaaaaaccgtttaagtgcggagaatgtgggaagagctacaatcagcgggtgcacctcacccagcaccagcgcgtccacacaggggagaaaccctacaaatgtcaggtgtgcggaaaggctttccgggtgagttcccacctggttcagcaccacagtgtccacagcggagagaggccctatggctgcaatgagtgtgggaagaacttcggtcgccattcgcatctgatcgaacacctaaaacgccacttcagggagaaatcccagagatgcagtgacaaaagaagtaagaacacaaaattaagtgttaagaagaaggtgatggtgaggaagaggatggagatgaagatgaggaagctgagtcagctacgggcaagcgggcagctgaagatgatgaggatgacgatgtcgataccaagaagcagaagaccgacgaggatgactagacagc

SEQ ID NO: 52330 - DNA, 3736 bp, Homo sapiens
  misc_feature (4)..(5): n is a, c, g, or t
ggcnngggctgtttgaatggctttgggatggagcaggggagagagtggctccgtttgcctccccgctttggtgatgctgtgcgagcggcttcgggggccctggagacgtccgagtcactgagggtgggctgggactcggggcccgcgtcccatctccccgccgattggtccgccccccgtgcgagtgtaacacagccagcctcgaagacttccctctgagttggaatgataatgaccgaatcccgagaagttatagacttagaccccccagctgagacttcccaggagcaggaagaccttttcatagtgaaggtggaagaagaagactgcacctggatgcaggagtacaacccgccaacgtttgagactttttaccagcgcttcaggcacttccagtaccatgaggcttcaggaccccgggaggctctcagccaactccgggtgctctgctgtgagtggctgaggcccgagctgcacacgaaggagcagatcctggagctgctggtgctggagcagttcctgaccatcctgcctgaagagttccagccctgggtgagggaacatcaccctgaaagtggagaagaggcggtggccgtgatagaaaatatacagcgagaacttgaggaacgcagacagcagattgttgcctgccctgatgtgcttcctcggaagatggcaacacctggagcagtgcaggagtcctgcagcccccatcccctgaccgtggacacccagcctgagcaagcgccacagaagcctcgtctcctggaggaaaatggttatgagtccagggacaatatggagctcatagtgaagcagatttctgatgactctgaatcacactgggtggcgccagaacacaccgaaaggagcgttcctcaggatccagactttgcagaagtcagtgaccttaaaggcatggtacaaaggtggcaggtcaaccccactgtggggaaatcaaggcagaatccttcccagaaaagggatctggatgcaatcacagacatcagccctaagcaaagcacacatggcgagagagggcacagatgcagcgattgtggcaaattcttcctccaagcctcaaactttattcagcatcggcgcatccacactggagaaaaaccgtttaagtgcggagaatgtgggaagagctacaatcagcgggtgcacctcacccagcaccagcgcgtccacacaggggagaaaccctacaaatgtcaggtgtgcggaaaggctttccgggtgagttcccacctggttcagcaccacagtgtccacagcggagagaggccctatggctgcaatgagtgtgggaagaacttcggtcgccattcgcatctgatcgaacacctaaaacgccacttcagggagaaatcccagagatgcagtgacaaaagaagtaagaacacaaaattaagtgttaagaagaaaatttcagaatattcagaagcagacatggaactatctggaaaaacccaaagaaatgtttctcaagttcaagattttggagaaggctgtgagtttcaaggcaagctggatagaaagcagggaattcccatgaaagagatactaggacaaccatcttcaaagaggatgaactacagtgaagtcccatatgtccacaaaaaatcctccactggagagagaccacataaatgtaacgagtgtgggaaaagcttcattcagagtgcacatcttattcaacatcaaagaatacacactggggagaaaccattcaggtgtgaggaatgtgggaaaagctacaaccaacgcgtgcacctaactcagcatcagcgcgtccacacaggtgagaagccctacacctgtcccttatgtgggaaagccttcagagtgaggtcccaccttgttcagcatcagagcgtgcacagtggggagagacccttcaagtgtaacgaatgtgggaaaggctttgggaggcgttcccacctggctggacatcttcgactccactcccgagagaaatcccatcagtgtcgtgaatgtggggaaatcttttttcagtacgttagcctaattgaacatcaggtgctccacatgggtcagaaaaatgaaaaaaatggcatctgtgaggaagcatatagttggaacttgacagtgattgaagacaagaagattgagttacaagagcagccttatcagtgtgatatctgtggaaaagcctttggttatagctcagacctcattcagcattacagaactcatacagcagagaagccctatcaatgtgatatatgtagagaaaatgttggccagtgttcccacaccaaacaacatcaaaaaatctactccagcacaaaatcccatcaatgtcatgaatgtggcagaggcttcactctgaagtcacatcttaatcaacatcagagaatccatactggtgagaaaccttttcaatgtaaagaatgtggaatgaatttcagctggagttgtagcctctttaaacacctgagaagccatgagaggacagatcccataaataccttaagtgtagaggggtctctgttgtagaatagctcttaattttagagaaaccttcctggagggaaaccatactcctataatgagcaaagtaacaacttcaagcatttttccagcgttaccatcaaactcacaaataggttgaaatcctttagttataactcagcctttaggaacaccggagaacccacaataatagaaatcttttcgtgttccccattgagaaatgctttagttagcatcttcatgcttggaaatctagacaagaagagaatccatggatggacatggtcgaggaattcggaaagcctgcagttgacattcagtcttcacttgaaactcaaaactgacactaggaacagcttcatgagttcagtagaagtaagctttatttgtagcttctgccttgtttgacggcgtatctattcagggaagcgcacagtaaaagaattccttagcatgatgtctgttttggtacctcagcaatgaaccttttctagaaattattattccaaccactagaataccctagtcactattcccactttgagcattaacccctttgaaaagaaatggacttaaagtatctctgttttggcaaaattcaggttcaggggctggatggtatgtgtttctgctgccttattcaatccaccacttctctgtgaaacactctaccttgtttttggtttgattctactgatgtcagggtttagccggtagaaggagtagttcagtttgtcaattcaggagaaactgtactggtcagtcacatcttacggcgaagggagagggaccttaggggagcagagaagacaggcaaagttgtggactgtttgatcttgtattacccacaggaatgagggcagctaaacccatagaaggagttggaccaaggcgaattacgagtcctggtcccagcagtatgtgtgctgacttctgggtgccccagaaatagacctctcctgtagagtggtgatatacagaatgagtttcagtttgcattgcagctgggattgaaagtaatcagtcgtgagcaggcaggcaggaggtcctgttagccctgccttccaggaaggttggggtgggagttttgagtgggaaagaggatgacatgtgtgagagagttctgagcctgtttgctagggagagtgagtgagtgctcttgggcactgctcaggccgtttctgctgacttgcctggcttacaataaatgcccaataaatatttgttgaccata

SEQ ID NO: 52331 - DNA, 3896 bp, Homo sapiens
cccggcgactcgcgggtgtgacgttgaagatgtcggccttctgagccgactgcggtggtcaagaggttgcatgctactgaaagtgtccttcagaagatattaaagagcagaaaaacaattgtttcatgtaacacagccagcctcgaagacttccctctgagttggaatgataatgaccgaatcccgagaagttatagacttagaccccccagctgagacttcccaggagcaggaagaccttttcatagtgaaggtggaagaagaagactgcacctggatgcaggagtacaacccgccaacgtttgagactttttaccagcgcttcaggcacttccagtaccatgaggcttcaggaccccgggaggctctcagccaactccgggtgctctgctgtgagtggctgaggcccgagctgcacacgaaggagcagatcctggagctgctggtgctggagcagttcctgaccatcctgcctgaagagttccagccctgggtgagggaacatcaccctgaaagtggagaagaggcggtggccgtgatagaaaatatacagcgagaacttgaggaacgcagacagcagattgttgcctgccctgatgtgcttcctcggaagatggcaacacctggagcagtgcaggagtcctgcagcccccatcccctgaccgtggacacccagcctgagcaagcgccacagaagcctcgtctcctggaggaaaatgcccttcctgttctccaagttccttcccttcccctgaaggacagccaggagctgacagcttcacttctctcaactgggtcccagaagttggtgaaaattgaagaggtggctgatgtggctgtatccttcatcctggaggaatgggggcatttggaccagtcccagaagtccctttatagggatgacaggaaggagaactatgggagtattacttccatgggttatgagtccagggacaatatggagctcatagtgaagcagatttctgatgactctgaatcacactgggtggcgccagaacacaccgaaaggagcgttcctcaggatccagactttgcagaagtcagtgaccttaaaggcatggtacaaaggtggcaggtcaaccccactgtggggaaatcaaggcagaatccttcccagaaaagggatctggatgcaatcacagacatcagccctaagcaaagcacacatggcgagagagggcacagatgcagcgattgtggcaaattcttcctccaagcctcaaactttattcagcatcggcgcatccacactggagaaaaaccgtttaagtgcggagaatgtgggaagagctacaatcagcgggtgcacctcacccagcaccagcgcgtccacacaggggagaaaccctacaaatgtcaggtgtgcggaaaggctttccgggtgagttcccacctggttcagcaccacagtgtccacagcggagagaggccctatggctgcaatgagtgtgggaagaacttcggtcgccattcgcatctgatcgaacacctaaaacgccacttcagggagaaatcccagagatgcagtgacaaaagaagtaagaacacaaaattaagtgttaagaagaaaatttcagaatattcagaagcagacatggaactatctggaaaaacccaaagaaatgtttctcaagttcaagattttggagaaggctgtgagtttcaaggcaagctggatagaaagcagggaattcccatgaaagagatactaggacaaccatcttcaaagaggatgaactacagtgaagtcccatatgtccacaaaaaatcctccactggagagagaccacataaatgtaacgagtgtgggaaaagcttcattcagagtgcacatcttattcaacatcaaagaatacacactggggagaaaccattcaggtgtgaggaatgtgggaaaagctacaaccaacgcgtgcacctaactcagcatcagcgcgtccacacaggtgagaagccctacacctgtcccttatgtgggaaagccttcagagtgaggtcccaccttgttcagcatcagagcgtgcacagtggggagagacccttcaagtgtaacgaatgtgggaaaggctttgggaggcgttcccacctggctggacatcttcgactccactcccgagagaaatcccatcagtgtcgtgaatgtggggaaatcttttttcagtacgttagcctaattgaacatcaggtgctccacatgggtcagaaaaatgaaaaaaatggcatctgtgaggaagcatatagttggaacttgacagtgattgaagacaagaagattgagttacaagagcagccttatcagtgtgatatctgtggaaaagcctttggttatagctcagacctcattcagcattacagaactcatacagcagagaagccctatcaatgtgatatatgtagagaaaatgttggccagtgttcccacaccaaacaacatcaaaaaatctactccagcacaaaatcccatcaatgtcatgaatgtggcagaggcttcactctgaagtcacatcttaatcaacatcagagaatccatactggtgagaaaccttttcaatgtaaagaatgtggaatgaatttcagctggagttgtagcctctttaaacacctgagaagccatgagaggacagatcccataaataccttaagtgtagaggggtctctgttgtagaatagctcttaattttagagaaaccttcctggagggaaaccatactcctataatgagcaaagtaacaacttcaagcatttttccagcgttaccatcaaactcacaaataggttgaaatcctttagttataactcagcctttaggaacaccggagaacccacaataatagaaatcttttcgtgttccccattgagaaatgctttagttagcatcttcatgcttggaaatctagacaagaagagaatccatggatggacatggtcgaggaattcggaaagcctgcagttgacattcagtcttcacttgaaactcaaaactgacactaggaacagcttcatgagttcagtagaagtaagctttatttgtagcttctgccttgtttgacggcgtatctattcagggaagcgcacagtaaaagaattccttagcatgatgtctgttttggtacctcagcaatgaaccttttctagaaattattattccaaccactagaataccctagtcactattcccactttgagcattaacccctttgaaaagaaatggacttaaagtatctctgttttggcaaaattcaggttcaggggctggatggtatgtgtttctgctgccttattcaatccaccacttctctgtgaaacactctaccttgtttttggtttgattctactgatgtcagggtttagccggtagaaggagtagttcagtttgtcaattcaggagaaactgtactggtcagtcacatcttacggcgaagggagagggaccttaggggagcagagaagacaggcaaagttgtggactgtttgatcttgtattacccacaggaatgagggcagctaaacccatagaaggagttggaccaaggcgaattacgagtcctggtcccagcagtatgtgtgctgacttctgggtgccccagaaatagacctctcctgtagagtggtgatatacagaatgagtttcagtttgcattgcagctgggattgaaagtaatcagtcgtgagcaggcaggcaggaggtcctgttagccctgccttccaggaaggttggggtgggagttttgagtgggaaagaggatgacatgtgtgagagagttctgagcctgtttgctagggagagtgagtgagtgctcttgggcactgctcaggccgtttctgctgacttgcctggcttacaataaatgcccaataaatatttgttgaccata

SEQ ID NO: 52332 - DNA, 3733 bp, Homo sapiens
  misc_feature (4)..(5): n is a, c, g, or t
ggcnngggctgtttgaatggctttgggatggagcaggggagagagtggctccgtttgcctccccgctttggtgatgctgtgcgagcggcttcgggggccctggagacgtccgagtcactgagggtgggctgggactcggggcccgcgtcccatctccccgccgattggtccgccccccgtgcgagtgtaacacagccagcctcgaagacttccctctgagttggaatgataatgaccgaatcccgagaagttatagacttagaccccccagctgagacttcccaggagcaggaagaccttttcatagtgaaggtggaagaagaagactgcacctggatgcaggagtacaacccgccaacgtttgagactttttaccagcgcttcaggcacttccagtaccatgaggcttcaggaccccgggaggctctcagccaactccgggtgctctgctgtgagtggctgaggcccgagctgcacacgaaggagcagatcctggagctgctggtgctggagcagttcctgaccatcctgcctgaagagttccagccctgggtgagggaacatcaccctgaaagtggagaagaggcggtggccgtgatagaaaatatacagcgagaacttgaggaacgcagacagcagattgttgcctgccctgatgtgcttcctcggaagatggcaacacctggagcagtgcaggagtcctgcagcccccatcccctgaccgtggacacccagcctgagcaagcgccacagaagcctcgtctcctggaggaaaatggttatgagtccagggacaatatggagctcatagtgaagcagatttctgatgactctgaatcacactgggtggcgccagaacacaccgaaaggagcgttcctcaggatccagactttgcagaagtcagtgaccttaaaggcatggtacaaaggtggcaggtcaaccccactgtggggaaatcaaggcagaatccttcccagaaaagggatctggatgcaatcacagacatcagccctaagcaaagcacacatggcgagagagggcacagatgcagcgattgtggcaaattcttcctccaagcctcaaactttattcagcatcggcgcatccacactggagaaaaaccgtttaagtgcggagaatgtgggaagagctacaatcagcgggtgcacctcacccagcaccagcgcgtccacacaggggagaaaccctacaaatgtcaggtgtgcggaaaggctttccgggtgagttcccacctggttcagcaccacagtgtccacagcggagagaggccctatggctgcaatgagtgtgggaagaacttcggtcgccattcgcatctgatcgaacacctaaaacgccacttcagggagaaatcccagagatgcagtgacaaaagaagtaagaacacaaaattaagtgttaagaagaaaatttcagaatattcagaagcagacatggaactatctggaaaaacccaaagaaatgtttctcaagttcaagattttggagaaggctgtgagtttcaaggcaagctggatagaaagcagggaattcccatgaaagagatactaggacaaccatcttcaaagaggatgaactacagtgaagtcccatatgtccacaaaaaatcctccactggagagagaccacataaatgtaacgagtgtgggaaaagcttcattcagagtgcacatcttattcaacatcaaagaatacacactggggagaaaccattcaggtgtgaggaatgtgggaaaagctacaaccaacgcgtgcacctaactcagcatcagcgcgtccacacaggtgagaagccctacacctgtcccttatgtgggaaagccttcagagtgaggtcccaccttgttcagcatcagagcgtgcacagtggggagagacccttcaagtgtaacgaatgtgggaaaggctttgggaggcgttcccacctggctggacatcttcgactccactcccgagagaaatcccatcagtgtcgtgaatgtggggaaatcttttttcagtacgttagcctaattgaacatcaggtgctccacatgggtcagaaaaatgaaaaaaatggcatctgtgaggaagcatatagttggaacttgacagtgattgaagacaagaagattgagttacaagagcagccttatcagtgtgatatctgtggaaaagcctttggttatagctcagacctcattcagcattacagaactcatacagcagagaagccctatcaatgtgatatatgtagagaaaatgttggccagtgttcccacaccaaacaacatcaaaaaatctactccagcacaaaatcccatcaatgtcatgaatgtggcagaggcttcactctgaagtcacatcttaatcaacatcagagaatccatactggtgagaaaccttttcaatgtaaagaatgtggaatgaatttcagctggagttgtagcctctttaaacacctgagaagccatgagaggacagatcccataaataccttaagtgtagaggggtctctgttgtagaatagctcttaattttagagaaaccttcctggagggaaaccatactcctataatgagcaaagtaacaacttcaagcatttttccagcgttaccatcaaactcacaaataggttgaaatcctttagttataactcagcctttaggaacaccggagaacccacaataatagaaatcttttcgtgttccccattgagaaatgctttagttagcatcttcatgcttggaaatctagacaagaagagaatccatggatggacatggtcgaggaattcggaaagcctgcagttgacattcagtcttcacttgaaactcaaaactgacactaggaacagcttcatgagttcagtagaagtaagctttatttgtagcttctgccttgtttgacggcgtatctattcagggaagcgcacagtaaaagaattccttagcatgatgtctgttttggtacctcagcaatgaaccttttctagaaattattattccaaccactagaataccctagtcactattcccactttgagcattaacccctttgaaaagaaatggacttaaagtatctctgttttggcaaaattcaggttcaggggctggatggtatgtgtttctgctgccttattcaatccaccacttctctgtgaaacactctaccttgtttttggtttgattctactgatgtcagggtttagccggtagaaggagtagttcagtttgtcaattcaggagaaactgtactggtcagtcacatcttacggcgaagggagagggaccttaggggagcagagaagacaggcaaagttgtggactgtttgatcttgtattacccacaggaatgagggcagctaaacccatagaaggagttggaccaaggcgaattacgagtcctggtcccagcagtatgtgtgctgacttctgggtgccccagaaatagacctctcctgtagagtggtgatatacagaatgagtttcagtttgcattgcagctgggattgaaagtaatcagtcgtgagcaggcaggcaggaggtcctgttagccctgccttccaggaaggttggggtgggagttttgagtgggaagcctgcgtgacaaaagtccgagcccgttggaaaggaaatgagtgaccgccgggcccaggccagacgagatggaacagccgggtcaaaaagggcacaaaattgtggcccaaacaaagaaccgggggggggcgcc

SEQ ID NO: 52333 - DNA, 627 bp, Homo sapiens
cccggcgactcgcgggtgtgacgttgaagatgtcggccttctgagccgactgcggtggtcaagaggttgcatgctactgaaagtgtccttcagaagatattaaagagcagaaaaacaattgtttcagtgaaacactctaccttgtttttggtttgattctactgatgtcagggtttagccggtagaaggagtagttcagtttgtcaattcaggagaaacttgtttgatcttgtattacccacaggaatgagggcagctaaacccatagaaggagttggaccaaggcgaattacgagtcctggtcccagcagtatgtgtgctgacttctgggtgccccagaaatagacctctcctgtagagtggtgatatacagaatgagtttcagtttgcattgcagctgggattgaaagtaatcagtcgtgagcaggcaggcaggaggtcctgttagccctgccttccaggaaggttggggtgggagttttgagtgggaaagaggatgacatgtgtgagagagttctgagcctgtttgctagggagagtgagtgagtgctcttgggcactgctcaggccgtttctgctgacttgcctggcttacaataaatgcccaataaatatttgttgaccata

SEQ ID NO: 52334 - DNA, 4984 bp, Homo sapiens
cccggcgactcgcgggtgtgacgttgaagatgtcggccttctgagccgactgcggtggtcaagagtgtaacacagccagcctcgaagacttccctctgagttggaatgataatgaccgaatcccgagaagttatagacttagaccccccagctgagacttcccaggagcaggaagaccttttcatagtgaaggtggaagaagaagactgcacctggatgcaggagtacaacccgccaacgtttgagactttttaccagcgcttcaggcacttccagtaccatgaggcttcaggaccccgggaggctctcagccaactccgggtgctctgctgtgagtggctgaggcccgagctgcacacgaaggagcagatcctggagctgctggtgctggagcagttcctgaccatcctgcctgaagagttccagccctgggtgagggaacatcaccctgaaagtggagaagaggcggtggccgtgatagaaaatatacagcgagaacttgaggaacgcagacagcagattgttgcctgccctgatgtgcttcctcggaagatggcaacacctggagcagtgcaggagtcctgcagcccccatcccctgaccgtggacacccagcctgagcaagcgccacagaagcctcgtctcctggaggaaaatgcccttcctgttctccaagttccttcccttcccctgaaggacagccaggagctgacagcttcacttctctcaactgggtcccagaagttggtgaaaattgaagaggtggctgatgtggctgtatccttcatcctggaggaatgggggcatttggaccagtcccagaagtccctttatagggatgacaggaaggagaactatgggagtattacttccatgggttatgagtccagggacaatatggagctcatagtgaagcagatttctgatgactctgaatcacactgggtggcgccagaacacaccgaaaggagcgttcctcaggatccagactttgcagaagtcagtgaccttaaaggcatggtacaaaggtggcaggtcaaccccactgtggggaaatcaaggcagaatccttcccagaaaagggatctggatgcaatcacagacatcagccctaagcaaagcacacatggcgagagagggcacagatgcagcgattgtggcaaattcttcctccaagcctcaaactttattcagcatcggcgcatccacactggagaaaaaccgtttaagtgcggagaatgtgggaagagctacaatcagcgggtgcacctcacccagcaccagcgcgtccacacaggggagaaaccctacaaatgtcaggtgtgcggaaaggctttccgggtgagttcccacctggttcagcaccacagtgtccacagcggagagaggccctatggctgcaatgagtgtgggaagaacttcggtcgccattcgcatctgatcgaacacctaaaacgccacttcagggagaaatcccagagatgcagtgacaaaagaagtaagaacacaaaattaagtgttaagaagaaaatttcagaatattcagaagcagacatggaactatctggaaaaacccaaagaaatgtttctcaagttcaagattttggagaaggctgtgagtttcaaggcaagctggatagaaagcagggaattcccatgaaagagatactaggacaaccatcttcaaagaggatgaactacagtgaagtcccatatgtccacaaaaaatcctccactggagagagaccacataaatgtaacgagtgtgggaaaagcttcattcagagtgcacatcttattcaacatcaaagaatacacactggggagaaaccattcaggtgtgaggaatgtgggaaaagctacaaccaacgcgtgcacctaactcagcatcagcgcgtccacacaggtgagaagccctacacctgtcccttatgtgggaaagccttcagagtgaggtcccaccttgttcagcatcagagcgtgcacagtggggagagacccttcaagtgtaacgaatgtgggaaaggctttgggaggcgttcccacctggctggacatcttcgactccactcccgagagaaatcccatcagtgtcgtgaatgtggggaaatcttttttcagtacgttagcctaattgaacatcaggtgctccacatgggtcagaaaaatgaaaaaaatggcatctgtgaggaagcatatagttggaacttgacagtgattgaagacaagaagattgagttacaagagcagccttatcagtgtgatatctgtggaaaagcctttggttatagctcagacctcattcagcattacagaactcatacagcagagaagccctatcaatgtgatatatgtagagaaaatgttggccagtgttcccacaccaaacaacatcaaaaaatctactccagcacaaaatcccatcaatgtcatgaatgtggcagaggcttcactctgaagtcacatcttaatcaacatcagagaatccatactggtgagaaaccttttcaatgtaaagaatgtggaatgaatttcagctggagttgtagcctctttaaacacctgagaagccatgagaggacagatcccataaataccttaagtgtagaggggtctctgttgtagaatagctcttaattttagagaaaccttcctggagggaaaccatactcctataatgagcaaagtaacaacttcaagcatttttccagcgttaccatcaaactcacaaataggttgaaatcctttagttataactcagcctttaggaacaccggagaacccacaataatagaaatcttttcgtgttccccattgagaaatgctttagttagcatcttcatgcttggaaatctagacaagaagagaatccatggatggacatggtcgaggaattcggaaagcctgcagttgacattcagtcttcacttgaaactcaaaactgacactaggaacagcttcatgagttcagtagaagtaagctttatttgtagcttctgccttgtttgacggcgtatctattcagggaagcgcacagtaaaagaattccttagcatgatgtctgttttggtacctcagcaatgaaccttttctagaaattattattccaaccactagaataccctagtcactattcccactttgagcattaacccctttgaaaagaaatggacttaaagtatctctgttttggcaaaattcaggttcaggggctggatggtatgtgtttctgctgccttattcaatccaccacttctctgtgaaacactctaccttgtttttggtttgattctactgatgtcagggtttagccggtagaaggagtagttcagtttgtcaattcaggagaaactgtactggtcagtcacatcttacggcgaagggagagggaccttaggggagcagagaagacaggcaaagttgtggactgtttgatcttgtattacccacaggaatgagggcagctaaacccatagaaggagttggaccaaggcgaattacgagtcctggtcccagcagtatgtgtgctgacttctgggtgccccagaaatagacctctcctgtagagtggtgatatacagaatgagtttcagtttgcattgcagctgggattgaaagtaatcagtcgtgagcaggcaggcaggaggtcctgttagccctgccttccaggaaggttggggtgggagttttgagtgggaaagaggatgacatgtgtgagagagttctgagcctgtttgctagggagagtgagtgagtgctcttgggcactgctcaggccgtttctgctgacttgcctggcttacaataaatgcccaataaatatttgttgaccatatgtgttgtacactgtggtgccctgtccagtcccctctaccaagctgagacccccatccccagctgctctgagtttgggctgcaagtgctcacagctcttgttctccagaaactggagaattgccctcaggagatgagagccatctcacctcacccaggagtcacttcctctctacaccccaacacctggttcatttgattaaagcggagaaaactccagggtgctatgactgctctggcacccttggatcaggccaagctagactttttctgagccttcatccgtgctaagctctctcccttctctatcctgtttcattccctccctcaaaggcgtttcccaaataaatcacactgtcaatcacatggttctgaatccctgtctcaggctctgctttagagaacctgatctaagacatttggtgccacaagtggtcataggaagctgctgtgagagtggattgtggagttggtcactcgccaggagggagtgaagacccgcatcactgttaatagtcctggcatgtggtacctgtccagtcactaagtcattcacttgtggggaactgggatgagatacaggtggaaagcgatctattgacttgtagaggtttgggacaaacaggaaaataaagattatggaattgggtggctcttgctgaaagtcactgaatccttgaagagaagaaaatgacagggcaaataaccaccaatttaatgccaagtgtgtgtcagaggaccttcttggtagctttttaatttttttatagacagggtcttgctctgctgcccaggctagagtgcagtggtgcaatcacagctcactgcagccttgacctcccgggctcaagtggtctagccacctcagcctcctgaatagctgggactacaggcacatgccaccatgagtggctaatttttaaaaaacatactttagctgggcgcggtggctcatgcctataaacccagcactttgggaggctgaggcgggcagatcacgaggtcaagagatcgaaaccatcctggccaaccaacatggtgaaacccggtctctacttaaaatacaaaaattagctgggcatagtggcgcatgcctatagtcccagctactccagaggctgaggcaggagaatcgcttgaacccgggagg

SEQ ID NO: 52335 - DNA, 3624 bp, Homo sapiens
agcgaggatgcgggtgaagaaaacctaagggccccaaattcaacataagcgaggtttgcgggctgtcagcaagtgtaacacagccagcctcgaagacttccctctgagttggaatgataatgaccgaatcccgagaagttatagacttagaccccccagctgagacttcccaggagcaggaagaccttttcatagtgaaggtggaagaagaagactgcacctggatgcaggagtacaacccgccaacgtttgagactttttaccagcgcttcaggcacttccagtaccatgaggcttcaggaccccgggaggctctcagccaactccgggtgctctgctgtgagtggctgaggcccgagctgcacacgaaggagcagatcctggagctgctggtgctggagcagttcctgaccatcctgcctgaagagttccagccctgggtgagggaacatcaccctgaaagtggagaagaggcggtggccgtgatagaaaatatacagcgagaacttgaggaacgcagacagcagattgttgcctgccctgatgtgcttcctcggaagatggcaacacctggagcagtgcaggagtcctgcagcccccatcccctgaccgtggacacccagcctgagcaagcgccacagaagcctcgtctcctggaggaaaatggttatgagtccagggacaatatggagctcatagtgaagcagatttctgatgactctgaatcacactgggtggcgccagaacacaccgaaaggagcgttcctcaggatccagactttgcagaagtcagtgaccttaaaggcatggtacaaaggtggcaggtcaaccccactgtggggaaatcaaggcagaatccttcccagaaaagggatctggatgcaatcacagacatcagccctaagcaaagcacacatggcgagagagggcacagatgcagcgattgtggcaaattcttcctccaagcctcaaactttattcagcatcggcgcatccacactggagaaaaaccgtttaagtgcggagaatgtgggaagagctacaatcagcgggtgcacctcacccagcaccagcgcgtccacacaggggagaaaccctacaaatgtcaggtgtgcggaaaggctttccgggtgagttcccacctggttcagcaccacagtgtccacagcggagagaggccctatggctgcaatgagtgtgggaagaacttcggtcgccattcgcatctgatcgaacacctaaaacgccacttcagggagaaatcccagagatgcagtgacaaaagaagtaagaacacaaaattaagtgttaagaagaaaatttcagaatattcagaagcagacatggaactatctggaaaaacccaaagaaatgtttctcaagttcaagattttggagaaggctgtgagtttcaaggcaagctggatagaaagcagggaattcccatgaaagagatactaggacaaccatcttcaaagaggatgaactacagtgaagtcccatatgtccacaaaaaatcctccactggagagagaccacataaatgtaacgagtgtgggaaaagcttcattcagagtgcacatcttattcaacatcaaagaatacacactggggagaaaccattcaggtgtgaggaatgtgggaaaagctacaaccaacgcgtgcacctaactcagcatcagcgcgtccacacaggtgagaagccctacacctgtcccttatgtgggaaagccttcagagtgaggtcccaccttgttcagcatcagagcgtgcacagtggggagagacccttcaagtgtaacgaatgtgggaaaggctttgggaggcgttcccacctggctggacatcttcgactccactcccgagagaaatcccatcagtgtcgtgaatgtggggaaatcttttttcagtacgttagcctaattgaacatcaggtgctccacatgggtcagaaaaatgaaaaaaatggcatctgtgaggaagcatatagttggaacttgacagtgattgaagacaagaagattgagttacaagagcagccttatcagtgtgatatctgtggaaaagcctttggttatagctcagacctcattcagcattacagaactcatacagcagagaagccctatcaatgtgatatatgtagagaaaatgttggccagtgttcccacaccaaacaacatcaaaaaatctactccagcacaaaatcccatcaatgtcatgaatgtggcagaggcttcactctgaagtcacatcttaatcaacatcagagaatccatactggtgagaaaccttttcaatgtaaagaatgtggaatgaatttcagctggagttgtagcctctttaaacacctgagaagccatgagaggacagatcccataaataccttaagtgtagaggggtctctgttgtagaatagctcttaattttagagaaaccttcctggagggaaaccatactcctataatgagcaaagtaacaacttcaagcatttttccagcgttaccatcaaactcacaaataggttgaaatcctttagttataactcagcctttaggaacaccggagaacccacaataatagaaatcttttcgtgttccccattgagaaatgctttagttagcatcttcatgcttggaaatctagacaagaagagaatccatggatggacatggtcgaggaattcggaaagcctgcagttgacattcagtcttcacttgaaactcaaaactgacactaggaacagcttcatgagttcagtagaagtaagctttatttgtagcttctgccttgtttgacggcgtatctattcagggaagcgcacagtaaaagaattccttagcatgatgtctgttttggtacctcagcaatgaaccttttctagaaattattattccaaccactagaataccctagtcactattcccactttgagcattaacccctttgaaaagaaatggacttaaagtatctctgttttggcaaaattcaggttcaggggctggatggtatgtgtttctgctgccttattcaatccaccacttctctgtgaaacactctaccttgtttttggtttgattctactgatgtcagggtttagccggtagaaggagtagttcagtttgtcaattcaggagaaactgtactggtcagtcacatcttacggcgaagggagagggaccttaggggagcagagaagacaggcaaagttgtggactgtttgatcttgtattacccacaggaatgagggcagctaaacccatagaaggagttggaccaaggcgaattacgagtcctggtcccagcagtatgtgtgctgacttctgggtgccccagaaatagacctctcctgtagagtggtgatatacagaatgagtttcagtttgcattgcagctgggattgaaagtaatcagtcgtgagcaggcaggcaggaggtcctgttagccctgccttccaggaaggttggggtgggagttttgagtgggaaagaggatgacatgtgtgagagagttctgagcctgtttgctagggagagtgagtgagtgctcttgggcactgctcaggccgtttctgctgacttgcctggcttacaataaatgcccaataaatatttgttgaccata

SEQ ID NO: 52336 - DNA, 3730 bp, Homo sapiens
  misc_feature (4)..(5): n is a, c, g, or t
ggcnngggctgtttgaatggctttgggatggagcaggggagagagtggctccgtttgcctccccgctttggtgatgctgtgcgagcggcttcgggggccctggagacgtccgagtcactgagggtgggctgggactcggggcccgcgtcccatctccccgccgattggtccgccccccgtgcgagtgtaacacagccagcctcgaagacttccctctgagttggaatgataatgaccgaatcccgagaagttatagacttagaccccccagctgagacttcccaggagcaggaagaccttttcatagtgaaggtggaagaagaagactgcacctggatgcaggagtacaacccgccaacgtttgagactttttaccagcgcttcaggcacttccagtaccatgaggcttcaggaccccgggaggctctcagccaactccgggtgctctgctgtgagtggctgaggcccgagctgcacacgaaggagcagatcctggagctgctggtgctggagcagttcctgaccatcctgcctgaagagttccagccctgggtgagggaacatcaccctgaaagtggagaagaggcggtggccgtgatagaaaatatacagcgagaacttgaggaacgcagacagcagattgttgcctgccctgatgtgcttcctcggaagatggcaacacctggagcagtgcaggagtcctgcagcccccatcccctgaccgtggacacccagcctgagcaagcgccacagaagcctcgtctcctggaggaaaatggttatgagtccagggacaatatggagctcatagtgaagcagatttctgatgactctgaatcacactgggtggcgccagaacacaccgaaaggagcgttcctcaggatccagactttgcagaagtcagtgaccttaaaggcatggtacaaaggtggcaggtcaaccccactgtggggaaatcaaggcagaatccttcccagaaaagggatctggatgcaatcacagacatcagccctaagcaaagcacacatggcgagagagggcacagatgcagcgattgtggcaaattcttcctccaagcctcaaactttattcagcatcggcgcatccacactggagaaaaaccgtttaagtgcggagaatgtgggaagagctacaatcagcgggtgcacctcacccagcaccagcgcgtccacacaggggagaaaccctacaaatgtcaggtgtgcggaaaggctttccgggtgagttcccacctggttcagcaccacagtgtccacagcggagagaggccctatggctgcaatgagtgtgggaagaacttcggtcgccattcgcatctgatcgaacacctaaaacgccacttcagggagaaatcccagagatgcagtgacaaaagaagtaagaacacaaaattaagtgttaagaagaaaatttcagaatattcagaagcagacatggaactatctggaaaaacccaaagaaatgtttctcaagttcaagattttggagaaggctgtgagtttcaaggcaagctggatagaaagcagggaattcccatgaaagagatactaggacaaccatcttcaaagaggatgaactacagtgaagtcccatatgtccacaaaaaatcctccactggagagagaccacataaatgtaacgagtgtgggaaaagcttcattcagagtgcacatcttattcaacatcaaagaatacacactggggagaaaccattcaggtgtgaggaatgtgggaaaagctacaaccaacgcgtgcacctaactcagcatcagcgcgtccacacaggtgagaagccctacacctgtcccttatgtgggaaagccttcagagtgaggtcccaccttgttcagcatcagagcgtgcacagtggggagagacccttcaagtgtaacgaatgtgggaaaggctttgggaggcgttcccacctggctggacatcttcgactccactcccgagagaaatcccatcagtgtcgtgaatgtggggaaatcttttttcagtacgttagcctaattgaacatcaggtgctccacatgggtcagaaaaatgaaaaaaatggcatctgtgaggaagcatatagttggaacttgacagtgattgaagacaagaagattgagttacaagagcagccttatcagtgtgatatctgtggaaaagcctttggttatagctcagacctcattcagcattacagaactcatacagcagagaagccctatcaatgtgatatatgtagagaaaatgttggccagtgttcccacaccaaacaacatcaaaaaatctactccagcacaaaatcccatcaatgtcatgaatgtggcagaggcttcactctgaagtcacatcttaatcaacatcagagaatccatactggtgagaaaccttttcaatgtaaagaatgtggaatgaatttcagctggagttgtagcctctttaaacacctgagaagccatgagaggacagatcccataaataccttaagtgtagaggggtctctgttgtagaatagctcttaattttagagaaaccttcctggagggaaaccatactcctataatgagcaaagtaacaacttcaagcatttttccagcgttaccatcaaactcacaaataggttgaaatcctttagttataactcagcctttaggaacaccggagaacccacaataatagaaatcttttcgtgttccccattgagaaatgctttagttagcatcttcatgcttggaaatctagacaagaagagaatccatggatggacatggtcgaggaattcggaaagcctgcagttgacattcagtcttcacttgaaactcaaaactgacactaggaacagcttcatgagttcagtagaagtaagctttatttgtagcttctgccttgtttgacggcgtatctattcagggaagcgcacagtaaaagaattccttagcatgatgtctgttttggtacctcagcaatgaaccttttctagaaattattattccaaccactagaataccctagtcactattcccactttgagcattaacccctttgaaaagaaatggacttaaagtatctctgttttggcaaaattcaggttcaggggctggatggtatgtgtttctgctgccttattcaatccaccacttctctgtgaaacactctaccttgtttttggtttgattctactgatgtcagggtttagccggtagaaggagtagttcagtttgtcaattcaggagaaactgtactggtcagtcacatcttacggcgaagggagagggaccttaggggagcagagaagacaggcaaagttgtggactgtttgatcttgtattacccacaggaatgagggcagctaaacccatagaaggagttggaccaaggcgaattacgagtcctggtcccagcagtatgtgtgctgacttctgggtgccccagaaatagacctctcctgtagagtggtgatatacagaatgagtttcagtttgcattgcagctgggattgaaagtaatcagtcgtgagcaggcaggcaggaggtcctgttagccctgccttccaggaaggttggggtgggagttttgagtgggaaaggttgacttactaacttgggccctttcaatagcttcacagttttaccaactcttcttttccaacaaaaaccgggggtttttagaatgttaaaggaattggggggatggcgattattaatacgtggcttt

SEQ ID NO: 52337 - DNA, 1596 bp, Homo sapiens
aaagactaggggattttcttctgtttgtttgtttgtttgtttgagatggagtttgctctgttgctcaggctggagtacagtggtgcgatctcggctcactgcaacctctgcctcccaggttcaagtcattctcctgcctcagcctctggagtagccaggactacgcactgcgccaccacacccagctaattttgtatttttggtgcagacagggtttccccatgttggccaggctggtcttgaactcctggcctcaagtgatccgcccacctcggcccaaagtgctggccaccgcgcccagtcagacttgttttttagtgaaataaattgttttcctttaggaccttattctttatgataacagattccaagaatatgcagtcttgtcaatggctgtttcatcctcagtttctttaaaaataaaatacaattagaacatttttagatatgctatatctatccaatctattttcctgtcacccagtaaggttttctatcatcagcacaggtctatgaaaggacagtaaagggtctcctgttacataccctagcactaatgtttgtaatagaatgttaagataagttgtttcatgtaatcggactacattcagtctttctctaccctctgtcctctatttacccacctatgcatgtggcctactaattatattgactgtacatgaccagcaagttgtaagttcttttaaaagcaggagctcaaccatatttgtattcacatttccttctgcttaaaacagggctcttgtttcttcagtaaatattcattcggtatccactaggtgtcagataatatacaaggtaggttctagggattccaagataaataaacacagatatgccaatatgagtctgacagttttggcggggagaggtggaaaatagatctgcaagccaaaaaagctacagtagaataatataaatattgtaatggcaataaaataccagaactattaattttacatttagtaatcattcagtatcaattaaatgggtaaaatggatatgttggcatgaatgacatataactgaaaaaacactaagaactgtatagaaactgaattagacatatgagtaatattagtaggaaggggagagaatatttgattccaggtaggctaccaagcaggatgttttttcagcacagccttggaataaaatctgtaacctttgaaaacaatcacatttttgttcttatgcaatctttgtttttaaatgtatttattgttttggctctagtccctgaatgttaaaattttagtgtcagtgttaattctcacttatcttctccagaccttactccctaattttctcattttcatttgccccaataagtgccaaccttaccttgaatagaatagtggatttatcagcttacaaggactaaaaagtcgtcatttccaaaaacatctgtccaataagtctgcctcagtgactacatttctagcattacaatgtcattcttagtacactgatttgatctttacaaattacataaatgtataaaattgtcgcatgtaccctaaattatatacatctattatgtatgtatcaataaaaaaataattttctgtgatt

SEQ ID NO: 52338 - DNA, 1214 bp, Homo sapiens
attctccagccaagcttggcgctaacagagtaggcgatttcacttcgtcgtcacctcacaaaaggcttccaaattcactgcggcagacaccgcaaaataaaaatgttaaatacatcctagctgggaggggattgaagcctccaggctcaatcaaaggtttgcaataataggattcatttaaaaaaaaaaaaaaaaaaaaggacagatgggtttagaaaatgttgcagtgaagactggaacgagatgagctcatagcaccagcctgtcttttgtggacccgcacaatgatccctgagccagactggattaggatgcctcgcgactaggggtccagagacagaggcctccagttcccaggcacttcgggaagaggaggctgaaatgatgcatcagatttacagctgcagtgacgagaacatagaagttttcaccaccgtgattccttccaaggtatccagtccagccagaagaagagccaaaagctctcagcacctcttgaccaagaatgtggtgatcgagtcggacctgtacacgcaccagcccctggagctgctgccccaccgcggagaccgcagggaccctggcgaccgccgcaggtttgggcggctccagaccgcgcggccgcccacagcccacccggccaaagcctctgccagacccgtggggatttctgaacccaaaacatcaaatctgtgtgggaatcgagcatatggaaaatctctgataccgccagtgccccggatctcagtgaaaacttcagcctctgcctcattggaggcgacagccatgggcacagagaagggagctgttctgatgagaggatccagacatctcaagaagatgactgaagagtatccagcccttccccaaggagcagaagcctctctaccactgacaggcagtgcttcctgcggcgtccccggcatcctccggaaaatgtggacaaggcacaagaagaagtctgaatatgtggggagccaccaacagcgcctttgaggccgactaaaggtgaccctcttcaagtgccctgtgttggccaaggttccccggacaagaggaaaaaccttcaggattgaaactgagccacacgcacctctgctagtagctggtccaaacccattatcctccctcactcattgattacccctggatggggccaagggaatgttcttctaaggcaattctgccttcttagcatggttaagctctgtctg

SEQ ID NO: 52339 - DNA, 1072 bp, Homo sapiens
  misc_feature (1015)..(1015): n is a, c, g, or t
  misc_feature (1035)..(1035): n is a, c, g, or t
  misc_feature (1053)..(1053): n is a, c, g, or t
aaaaaaacggagtcacttgttgcacatagcatgaacattaatgttctactgaagtccttttgaatatgccttaagtccaagttgcaaaatacatggtcttagacttcggggacgacccagttctctctcagagctctgtgtgtacagagaacctggcagaggtggttgactgacctagttttgtcatgataagggtgttttccccaagattggtttcggcagaaggctgttgccagggcgtaaggcaaggggcagtggctttcgaaagctctgtggggaaagaggtatgatgtgataaacctctgagatggggatcaactcatatgaagtatacaagaaataccgtttttaaagatatggcgtttatcaagtcattgattcttatgaccaagttaatttccataactttgtagcttttacaaactgccttttcaaagccctgggtaacttctttcatttactgtttcaggaaagggtcaccaagcttgcaccccgtccccagtcagaagaggatctggctgctctgtttgaagcttcaatgaaactgtattaattgtcattttaactgaaagaattaccgctggccattgtagtgctgagagcaagagctgatctagctagggctttgtcttttcatctttgtgcataacttacctgttaccagtataggtgggatatacatttatcttgcaggaaattccccaaagctcagagtccagttccttccataaaacaggctggacaaatgaccactatgttagacccccaggctcgacttcaggggtcagtgttcctgtcccaaaccccacacagaatactctgcctctgcttcatgtagcaaatgagcaaaaactcagtatctatcaaaagtgtaaattatatttcctatgcctagtaattcacttcatgtctaaaaatttatctgatagaaacactagcaccagtacatacagaagcatggcaaggatgtttctggcagcacttttctaataataaaagatttgaaacaagttgnaccaaaaaaaaaaaaaaaanccgggggggggccggganccaatcgcccaaagggggg

SEQ ID NO: 52340 - DNA, 1059 bp, Homo sapiens
agtcaaaccagaactgattaacatagcctgtcaggctagaataatcatttctgactggactctgtgagtatgtaacatttgaagggatctgtcagttactggtgggacagatcactgatgggtcaagcttgcacgtcatcaaatacagcacatcctgactcacaaaattcccccgacatcatctgggagcacactgccaaggaactgccagggaaaaacagaaaacacatgcccagagcttattacagaaacttcgaagtgaattaccgagtctttgagatcgtaatgttaactaatgggttcagggagctacttctgggatcaatactttttaatgtccatacaattctatgagcatttgaatttgagcattttcagaggttttgttaatgaatgcactacatgtccctagacatcataatatatccttatatccaagaaaacagaacatatcactttttcaggtaatgatactgtctagaggccgtgacaggcatccccataagagtatctttctattgttgacttgaattttgataactgtgtatgaacataaggattttctttcttttctagccatggaatgtcttacccaatttcaggtttagtgaagatgtataaagcaaaggattacaatgtggatcacccactggtggtaaaatcataagaataaattatttaattaaatattataatcatcccaatttccataaatatatttgccaattctcgcctgcttagagtatggggtaaagtaacttaacatctagaatatgcagggaagaacagctttgtcatctgccggtcaccgcatttcgtttctccccagccccatggcctttctgtggtggctcacgtccccagcggtgttcactttcacggcccagatgtttccagagcgacacctggagatggcagaaatactgggtatgaaccattactcaaaattctgtgaccggccaggcacggtggctcccatctgtaatcccagcattttgggaggctaagttgggtgcatcacttgagcccaggagttcaagaccagcctgggcaacatgg

SEQ ID NO: 52341 - DNA, 650 bp, Homo sapiens
taaagacccactttgatgctaacttttacatttctagcccctggactttcaccttctgggaaaacaacagattatgcctttgaggtatattcactcaatccattatttcttttatgaatgactagaaaaaaataaaactagaatattttgctaatgaattattattttattttaaatctgttattaattcacattccataatctctatttgatcagaccatatttagcaaagtacctggttggtataatggaatataaaccttctgagatcatggctaatgtctagagtgctgtctttgtagagtcactaaaataggataaattcccaattctacaaattctccagtacatatatgttatgtgttaaatctttagttttttaattataacaatcccaaaagaggtcaaagtaaagtaacaattctggtgtatttttatcacactgtaattacataattacttataattatttgtttaagtccctgtctcctcctagtccaggaattttttttttttttttttttttggagacagcctcactctgtcacccagactggagtgcagtggtgtgatctcagctcactacaacctccgcctcctgagttcaagcgattctcctgcctcagccttctgagtagctgggattacag

SEQ ID NO: 52342 - DNA, 449 bp, Homo sapiens
ggtggagcgacccgaggagggaagaggactccaagcgccatggccgctgccgcccgagcccgggtcgcgtacttgctgaggcaactgcaacgcgcagcgtgccagtgcccaactcattctcatacttactcccaagcccctggactttcaccttctgggaaaacaacagattatgcctttgagatggctgtttcaaatattagatatggagcagcagttacaaaggaagtaggaatggacctaaaaaacatgggtgctaaaaatgtgtgcttgatgacagacaagaacctctccaagctccctcctgtgcaagtagctatggattccctagtgaagaatggcatcccctttacggtttatgataatgtgagagtggaaccaacggattcaaggtattcttgtattgttgttattgtttctttactttaagcagaagctaactgttgatt

SEQ ID NO: 52343 - DNA, 2250 bp, Homo sapiens
ggtggagcgacccgaggagggaagaggactccaagcgccatggccgctgccgcccgagcccgggtcgcgtacttgctgaggcaactgcaacgcgcagcgtgccagtgcccaactcattctcatacttactcccaagcccctggactttcaccttctgggaaaacaacagattatgcctttgagatggctgtttcaaatattagatatggagcagcagttacaaaggaagtaggaatggacctaaaaaacatgggtgctaaaaatgtgtgcttgatgacagacaagaacctctccaagctccctcctgtgcaagtagctatggattccctagtgaagaatggcatcccctttacggtttatgataatgtgagagtggaaccaacggattcaagcttcatggaagctattgagtttgcccaaaagggagcttttgatgcctatgttgctgtcggtggtggctctaccatggacacctgtaaggctgctaatctgtatgcatccagccctcattctgatttcctagattatgtcagtgcccccattggcaagggaaagcctgtgtctgtgcctcttaagcctctgattgcagtgccaactacctcaggaaccgggagtgaaactactggggttgccatttttgactatgaacacttgaaagtaaaaattggcatcacttcgagagccatcaaacccacactgggactgattgatcctctgcacaccctccacatgcctgcccgagtggtcgccaacagtggctttgatgtgctttgccatgccctggagtcatacaccaccctgccctaccacctgcggagcccctgcccttcaaatcccatcacacggcctgcgtaccagggcagcaacccaatcagtgacatttgggctatccacgcgctgcggatcgtggctaagtatctgaagagggccgtcaacagcactgacaaatgaagaagaagaatgagtctcagggcaccttcctggagtggccctcgccatccagggaccagcgcgttgcctcccccggcgcttttacatcacatgagcagctgacagcgtatttattatgcctttgctgaaacagttgatgagaaatatgtttcccttcagttttcatttagaagacaaggcgtcgtttgaataacttgcctgatttttcttcctaccgagtagcatttctttttttttcaccatatctttccctaaggcagctccttattctgtaggaattgccaatgttgatgtgttattgttaggtatttatatcattcacagggctgtcagaaatcccgatgatcttgaagcaaggtctcatatgcacttggcaagtgcttttgctggcatcggctttggaaatgctggtgttcatctgtgccatggaatgtcttacccaatttcaggtttagtgaagatgtataaagcaaaggattacaatgtggatcacccactggtgccccatggcctttctgtggtggctcacgtccccagcggtgttcactttcacggcccagatgtttccagagcgacacctggagatggcagaaatactgggagccgacacccgcactgccaggatccaagatgcagggctggtgttggcagacacgctccggaaattcttattcgatctggatgttgatgatggcctagcagctgttggttactccaaagctgatatccccgcactagtgaaaggaacgctgccccaggaaagggtcaccaagcttgcaccccgtccccagtcagaagaggatctggctgctctgtttgaagcttcaatgaaactgtattaattgtcattttaactgaaagaattaccgctggccattgtagtgctgagagcaagagctgatctagctagggctttgtcttttcatctttgtgcataacttacctgttaccagtataggtgggatatacatttatcttgcaggaaattccccaaagctcagagtccagttccttccataaaacaggctggacaaatgaccactatgttagacccccaggctcgacttcaggggtcagtgttcctgtcccaaaccccacacagaatactctgcctctgcttcatgtagcaaatgagcaaaaactcagtatctatcaaaagtgtaaattatatttcctatgcctagtaattcacttcatgtctaaaaatttatctgatagaaacactagcaccagtacatacagaagcatggcaaggatgtttctggcagcacttttctaataataaaagatttgaaacaa

SEQ ID NO: 52344 - DNA, 1901 bp, Homo sapiens
ggtggagcgacccgaggagggaagaggactccaagcgccatggccgctgccgcccgagcccgggtcgcgtacttgctgaggcaactgcaacgcgcagcgtgccagtgcccaactcattctcatacttactcccaagcccctggactttcaccttctgggaaaacaacagattatgcctttgagatggctgtttcaaatattagatatggagcagcagttacaaaggaagtaggaatggacctaaaaaacatgggtgctaaaaatgtgtgcttgatgacagacaagaacctctccaagctccctcctgtgcaagtagctatggattccctagtgaagaatggcatcccctttacggtttatgataatgtgagagtggaaccaacggattcaagcttcatggaagctattgagtttgcccaaaagggagcttttgatgcctatgttgctgtcggtggtggctctaccatggacacctgtaaggctgctaatctgtatgcatccagccctcattctgatttcctagattatgtcagtgcccccattggcaagggaaagcctgtgtctgtgcctcttaagcctctgattgcagtgccaactacctcaggaaccgggagtgaaactactggggttgccatttttgactatgaacacttgaaagtaaaaattggcatcacttcgagagccatcaaacccacactgggactgattgatcctctgcacaccctccacatgcctgcccgagtggtcgccaacagtggctttgatgtgctttgccatgccctggagtcatacaccaccctgccctaccacctgcggagcccctgcccttcaaatcccatcacacggcctgcgtaccagggcagcaacccaatcagtgacatttgggctatccacgcgctgcggatcgtggctaagtatctgaagagggctgtcagaaatcccgatgatcttgaagcaaggtctcatatgcacttggcaagtgcttttgctggcatcggctttggaaatgctggtgttcatctgtgccatggaatgtcttacccaatttcaggtttagtgaagatgtataaagcaaaggattacaatgtggatcacccactggtgccccatggcctttctgtggtggctcacgtccccagcggtgttcactttcacggcccagatgtttccagagcgacacctggagatggcagaaatactgggagccgacacccgcactgccaggatccaagatgcagggctggtgttggcagacacgctccggaaattcttattcgatctggatgttgatgatggcctagcagctgttggttactccaaagctgatatccccgcactagtgaaaggaacgctgccccaggaaagggtcaccaagcttgcaccccgtccccagtcagaagaggatctggctgctctgtttgaagcttcaatgaaactgtattaattgtcattttaactgaaagaattaccgctggccattgtagtgctgagagcaagagctgatctagctagggctttgtcttttcatctttgtgcataacttacctgttaccagtataggtgggatatacatttatcttgcaggaaattccccaaagctcagagtccagttccttccataaaacaggctggacaaatgaccactatgttagacccccaggctcgacttcaggggtcagtgttcctgtcccaaaccccacacagaatactctgcctctgcttcatgtagcaaatgagcaaaaactcagtatctatcaaaagtgtaaattatatttcctatgcctagtaattcacttcatgtctaaaaatttatctgatagaaacactagcaccagtacatacagaagcatggcaaggatgtttctggcagcacttttctaataataaaagatttgaaacaa

SEQ ID NO: 52345 - DNA, 2212 bp, Homo sapiens
ggtggagcgacccgaggagggaagaggactccaagcgccatggccgctgccgcccgagcccgggtcgcgtacttgctgaggcaactgcaacgcgcagccccctggactttcaccttctgggaaaacaacagattatgcctttgagatggctgtttcaaatattagatatggagcagcagttacaaaggaagtaggaatggacctaaaaaacatgggtgctaaaaatgtgtgcttgatgacagacaagaacctctccaagctccctcctgtgcaagtagctatggattccctagtgaagaatggcatcccctttacggtttatgataatgtgagagtggaaccaacggattcaagcttcatggaagctattgagtttgcccaaaagggagcttttgatgcctatgttgctgtcggtggtggctctaccatggacacctgtaaggctgctaatctgtatgcatccagccctcattctgatttcctagattatgtcagtgcccccattggcaagggaaagcctgtgtctgtgcctcttaagcctctgattgcagtgccaactacctcaggaaccgggagtgaaactactggggttgccatttttgactatgaacacttgaaagtaaaaattggcatcacttcgagagccatcaaacccacactgggactgattgatcctctgcacaccctccacatgcctgcccgagtggtcgccaacagtggctttgatgtgctttgccatgccctggagtcatacaccaccctgccctaccacctgcggagcccctgcccttcaaatcccatcacacggcctgcgtaccagggcagcaacccaatcagtgacatttgggctatccacgcgctgcggatcgtggctaagtatctgaagagggccgtcaacagcactgacaaatgaagaagaagaatgagtctcagggcaccttcctggagtggccctcgccatccagggaccagcgcgttgcctcccccggcgcttttacatcacatgagcagctgacagcgtatttattatgcctttgctgaaacagttgatgagaaatatgtttcccttcagttttcatttagaagacaaggcgtcgtttgaataacttgcctgatttttcttcctaccgagtagcatttctttttttttcaccatatctttccctaaggcagctccttattctgtaggaattgccaatgttgatgtgttattgttaggtatttatatcattcacagggctgtcagaaatcccgatgatcttgaagcaaggtctcatatgcacttggcaagtgcttttgctggcatcggctttggaaatgctggtgttcatctgtgccatggaatgtcttacccaatttcaggtttagtgaagatgtataaagcaaaggattacaatgtggatcacccactggtgccccatggcctttctgtggtggctcacgtccccagcggtgttcactttcacggcccagatgtttccagagcgacacctggagatggcagaaatactgggagccgacacccgcactgccaggatccaagatgcagggctggtgttggcagacacgctccggaaattcttattcgatctggatgttgatgatggcctagcagctgttggttactccaaagctgatatccccgcactagtgaaaggaacgctgccccaggaaagggtcaccaagcttgcaccccgtccccagtcagaagaggatctggctgctctgtttgaagcttcaatgaaactgtattaattgtcattttaactgaaagaattaccgctggccattgtagtgctgagagcaagagctgatctagctagggctttgtcttttcatctttgtgcataacttacctgttaccagtataggtgggatatacatttatcttgcaggaaattccccaaagctcagagtccagttccttccataaaacaggctggacaaatgaccactatgttagacccccaggctcgacttcaggggtcagtgttcctgtcccaaaccccacacagaatactctgcctctgcttcatgtagcaaatgagcaaaaactcagtatctatcaaaagtgtaaattatatttcctatgcctagtaattcacttcatgtctaaaaatttatctgatagaaacactagcaccagtacatacagaagcatggcaaggatgtttctggcagcacttttctaataataaaagatttgaaacaa

SEQ ID NO: 52346 - DNA, 2423 bp, Homo sapiens
ggtggagcgacccgaggagggaagaggactccaagcgccatggccgctgccgcccgagcccgggtcgcgtacttgctgaggcaactgcaacgcgcagcgtgccagtgcccaactcattctcatacttactcccaagcccctggactttcaccttctgggaaaacaacagattatgcctttgagatggctgtttcaaatattagatatggagcagcagttacaaaggaagtaggaatggcaagtattcgagatgtctacggtctcctactgtaaatgttacatatctcacaagaccatgctaaatgacaacaatcacatcctctatttttaaaaatgtacaacgtgagtttgccagaagagtctattgcagttctagtggagttgaacctaacttataggttttcttgtaggacctaaaaaacatgggtgctaaaaatgtgtgcttgatgacagacaagaacctctccaagctccctcctgtgcaagtagctatggattccctagtgaagaatggcatcccctttacggtttatgataatgtgagagtggaaccaacggattcaagcttcatggaagctattgagtttgcccaaaagggagcttttgatgcctatgttgctgtcggtggtggctctaccatggacacctgtaaggctgctaatctgtatgcatccagccctcattctgatttcctagattatgtcagtgcccccattggcaagggaaagcctgtgtctgtgcctcttaagcctctgattgcagtgccaactacctcaggaaccgggagtgaaactactggggttgccatttttgactatgaacacttgaaagtaaaaattggcatcacttcgagagccatcaaacccacactgggactgattgatcctctgcacaccctccacatgcctgcccgagtggtcgccaacagtggctttgatgtgctttgccatgccctggagtcatacaccaccctgccctaccacctgcggagcccctgcccttcaaatcccatcacacggcctgcgtaccagggcagcaacccaatcagtgacatttgggctatccacgcgctgcggatcgtggctaagtatctgaagagggccgtcaacagcactgacaaatgaagaagaagaatgagtctcagggcaccttcctggagtggccctcgccatccagggaccagcgcgttgcctcccccggcgcttttacatcacatgagcagctgacagcgtatttattatgcctttgctgaaacagttgatgagaaatatgtttcccttcagttttcatttagaagacaaggcgtcgtttgaataacttgcctgatttttcttcctaccgagtagcatttctttttttttcaccatatctttccctaaggcagctccttattctgtaggaattgccaatgttgatgtgttattgttaggtatttatatcattcacagggctgtcagaaatcccgatgatcttgaagcaaggtctcatatgcacttggcaagtgcttttgctggcatcggctttggaaatgctggtgttcatctgtgccatggaatgtcttacccaatttcaggtttagtgaagatgtataaagcaaaggattacaatgtggatcacccactggtgccccatggcctttctgtggtggctcacgtccccagcggtgttcactttcacggcccagatgtttccagagcgacacctggagatggcagaaatactgggagccgacacccgcactgccaggatccaagatgcagggctggtgttggcagacacgctccggaaattcttattcgatctggatgttgatgatggcctagcagctgttggttactccaaagctgatatccccgcactagtgaaaggaacgctgccccaggaaagggtcaccaagcttgcaccccgtccccagtcagaagaggatctggctgctctgtttgaagcttcaatgaaactgtattaattgtcattttaactgaaagaattaccgctggccattgtagtgctgagagcaagagctgatctagctagggctttgtcttttcatctttgtgcataacttacctgttaccagtataggtgggatatacatttatcttgcaggaaattccccaaagctcagagtccagttccttccataaaacaggctggacaaatgaccactatgttagacccccaggctcgacttcaggggtcagtgttcctgtcccaaaccccacacagaatactctgcctctgcttcatgtagcaaatgagcaaaaactcagtatctatcaaaagtgtaaattatatttcctatgcctagtaattcacttcatgtctaaaaatttatctgatagaaacactagcaccagtacatacagaagcatggcaaggatgtttctggcagcacttttctaataataaaagatttgaaacaa

SEQ ID NO: 52347 - DNA, 2015 bp, Homo sapiens
ggtggagcgacccgaggagggaagaggactccaagcgccatggccgctgccgcccgagcccgggtcgcgtacttgctgaggcaactgcaacgcgcagccccctggactttcaccttctgggaaaacaacagattatgcctttgagatggctgtttcaaatattagatatggagcagcagttacaaaggaagtaggaatggacctaaaaaacatgggtgctaaaaatgtgtgcttgatgacagacaagaacctctccaagctccctcctgtgcaagtagctatggattccctagtgaagaatggcatcccctttacggtttatgataatgtgagagtggaaccaacggattcaagtgccaactacctcaggaaccgggagtgaaactactggggttgccatttttgactatgaacacttgaaagtaaaaattggcatcacttcgagagccatcaaacccacactgggactgattgatcctctgcacaccctccacatgcctgcccgagtggtcgccaacagtggctttgatgtgctttgccatgccctggagtcatacaccaccctgccctaccacctgcggagcccctgcccttcaaatcccatcacacggcctgcgtaccagggcagcaacccaatcagtgacatttgggctatccacgcgctgcggatcgtggctaagtatctgaagagggccgtcaacagcactgacaaatgaagaagaagaatgagtctcagggcaccttcctggagtggccctcgccatccagggaccagcgcgttgcctcccccggcgcttttacatcacatgagcagctgacagcgtatttattatgcctttgctgaaacagttgatgagaaatatgtttcccttcagttttcatttagaagacaaggcgtcgtttgaataacttgcctgatttttcttcctaccgagtagcatttctttttttttcaccatatctttccctaaggcagctccttattctgtaggaattgccaatgttgatgtgttattgttaggtatttatatcattcacagggctgtcagaaatcccgatgatcttgaagcaaggtctcatatgcacttggcaagtgcttttgctggcatcggctttggaaatgctggtgttcatctgtgccatggaatgtcttacccaatttcaggtttagtgaagatgtataaagcaaaggattacaatgtggatcacccactggtgccccatggcctttctgtggtggctcacgtccccagcggtgttcactttcacggcccagatgtttccagagcgacacctggagatggcagaaatactgggagccgacacccgcactgccaggatccaagatgcagggctggtgttggcagacacgctccggaaattcttattcgatctggatgttgatgatggcctagcagctgttggttactccaaagctgatatccccgcactagtgaaaggaacgctgccccaggaaagggtcaccaagcttgcaccccgtccccagtcagaagaggatctggctgctctgtttgaagcttcaatgaaactgtattaattgtcattttaactgaaagaattaccgctggccattgtagtgctgagagcaagagctgatctagctagggctttgtcttttcatctttgtgcataacttacctgttaccagtataggtgggatatacatttatcttgcaggaaattccccaaagctcagagtccagttccttccataaaacaggctggacaaatgaccactatgttagacccccaggctcgacttcaggggtcagtgttcctgtcccaaaccccacacagaatactctgcctctgcttcatgtagcaaatgagcaaaaactcagtatctatcaaaagtgtaaattatatttcctatgcctagtaattcacttcatgtctaaaaatttatctgatagaaacactagcaccagtacatacagaagcatggcaaggatgtttctggcagcacttttctaataataaaagatttgaaacaa

SEQ ID NO: 52348 - DNA, 2149 bp, Homo sapiens
ggtggagcgacccgaggagggaagaggactccaagcgccatggccgctgccgcccgagcccgggtcgcgtacttgctgaggcaactgcaacgcgcagcgtgccagtgcccaactcattctcatacttactcccaagatggctgtttcaaatattagatatggagcagcagttacaaaggaagtaggaatggacctaaaaaacatgggtgctaaaaatgtgtgcttgatgacagacaagaacctctccaagctccctcctgtgcaagtagctatggattccctagtgaagaatggcatcccctttacggtttatgataatgtgagagtggaaccaacggattcaagcttcatggaagctattgagtttgccccctgtaaggctgctaatctgtatgcatccagccctcattctgatttcctagattatgtcagtgcccccattggcaagggaaagcctgtgtctgtgcctcttaagcctctgattgcagtgccaactacctcaggaaccgggagtgaaactactggggttgccatttttgactatgaacacttgaaagtaaaaattggcatcacttcgagagccatcaaacccacactgggactgattgatcctctgcacaccctccacatgcctgcccgagtggtcgccaacagtggctttgatgtgctttgccatgccctggagtcatacaccaccctgccctaccacctgcggagcccctgcccttcaaatcccatcacacggcctgcgtaccagggcagcaacccaatcagtgacatttgggctatccacgcgctgcggatcgtggctaagtatctgaagagggccgtcaacagcactgacaaatgaagaagaagaatgagtctcagggcaccttcctggagtggccctcgccatccagggaccagcgcgttgcctcccccggcgcttttacatcacatgagcagctgacagcgtatttattatgcctttgctgaaacagttgatgagaaatatgtttcccttcagttttcatttagaagacaaggcgtcgtttgaataacttgcctgatttttcttcctaccgagtagcatttctttttttttcaccatatctttccctaaggcagctccttattctgtaggaattgccaatgttgatgtgttattgttaggtatttatatcattcacagggctgtcagaaatcccgatgatcttgaagcaaggtctcatatgcacttggcaagtgcttttgctggcatcggctttggaaatgctggtgttcatctgtgccatggaatgtcttacccaatttcaggtttagtgaagatgtataaagcaaaggattacaatgtggatcacccactggtgccccatggcctttctgtggtggctcacgtccccagcggtgttcactttcacggcccagatgtttccagagcgacacctggagatggcagaaatactgggagccgacacccgcactgccaggatccaagatgcagggctggtgttggcagacacgctccggaaattcttattcgatctggatgttgatgatggcctagcagctgttggttactccaaagctgatatccccgcactagtgaaaggaacgctgccccaggaaagggtcaccaagcttgcaccccgtccccagtcagaagaggatctggctgctctgtttgaagcttcaatgaaactgtattaattgtcattttaactgaaagaattaccgctggccattgtagtgctgagagcaagagctgatctagctagggctttgtcttttcatctttgtgcataacttacctgttaccagtataggtgggatatacatttatcttgcaggaaattccccaaagctcagagtccagttccttccataaaacaggctggacaaatgaccactatgttagacccccaggctcgacttcaggggtcagtgttcctgtcccaaaccccacacagaatactctgcctctgcttcatgtagcaaatgagcaaaaactcagtatctatcaaaagtgtaaattatatttcctatgcctagtaattcacttcatgtctaaaaatttatctgatagaaacactagcaccagtacatacagaagcatggcaaggatgtttctggcagcacttttctaataataaaagatttgaaacaa

SEQ ID NO: 52349 - DNA, 2362 bp, Homo sapiens
ggtggagcgacccgaggagggaagaggactccaagcgccatggccgctgccgcccgagcccgggtcgcgtacttgctgaggcaactgcaacgcgcagcgtgccagtgcccaactcattctcatacttactcccaagcccctggactttcaccttctgggaaaacaacagattatgcctttgagatggctgtttcaaatattagatatggagcagcagttacaaaggaagtaggaatggacctaaaaaacatgggtgctaaaaatgtgtgcttgatgacagacaagaacctctccaagctccctcctgtgcaagtagctatggattccctagtgaagaatggcatcccctttacggtttatgataatgtgagagtggaaccaacggattcaagcttcatggaagctattgagtttgcccaaaagggagcttttgatgcctatgttgctgtcggtggtggctctaccatggacacctgtaaggctgctaatctgtatgcatccagccctcattctgatttcctagattatgtcagtgcccccattggcaagggaaagcctgtgtctgtgcctcttaagcctctgattgcagtgccaactacctcaggaaccgggagtgaaactactggggttgccatttttgactatgaacacttgaaagtaaaaattggcatcacttcgagagccatcaaacccacactgggactgattgatcctctgcacaccctccacatgcctgcccgagtggtcgccaacagtggctttgatgtgctttgccatgccctggagtcatacaccaccctgccctaccacctgcggagcccctgcccttcaaatcccatcacacggcctgcgtaccagggcagcaacccaatcagtgacatttgggctatccacgcgctgcggatcgtggctaagtatctgaagagggccgtcaacagcactgacaaatgaagaagaagaatgagtctcagggcaccttcctggagtggccctcgccatccagggaccagcgcgttgcctcccccggcgcttttacatcacatgagcagctgacagcgtatttattatgcctttgctgaaacagttgatgagaaatatgtttcccttcagttttcatttagaagacaaggcgtcgtttgaataacttgcctgatttttcttcctaccgagtagcatttctttttttttcaccatatctttccctaaggcagctccttattctgtaggaattgccaatgttgatgtgttattgttaggtatttatatcattcacagggctgtcagaaatcccgatgatcttgaagcaaggtctcatatgcacttggcaagtgcttttgctggcatcggctttggaaatgctggtgttcatctgtgccatggaatgtcttacccaatttcaggtttagtgaagatgtataaagcaaaggattacaatgtggatcacccactggtgccccatggcctttctgtggtggctcacgtccccagcggtgttcactttcacggcccagatgtttccagagcgacacctggagatggcagaaatactgggagccgacacccgcactgccaggatccaagatgcagggctggtgttggcagacacgctccggaaattcttattcgatctggatgttgatgatggcctagcagctgttggttactccaaagctgatatccccgcactagtgaaaggaacgctgccccaggaaagggtcaccaagcttgcaccccgtccccagtcagaagaggatctggctgctctgtttgaagcttcaatgaaactgtattaattgtcattttaactgaaagaattaccgctggccattgtagtgctgagagcaagagctgatctagctagggctttgtcttttcatctttgtgcataacttacctgttaccagtataggtgggatatacatttatcttgcaggaaattccccaaagctcagagtccagttccttccataaaacaggctggacaaatgaccactatgttagacccccaggctcgacttcaggggtcagtgttcctgtcccaaaccccacacagaatactctgcctctgcttcatgtagcaaatgagcaaaaactcagtatctatcaaaagtgtaaattatatttcctatgcctagtaattcacttcatgtctaaaaatttatctgatagaaacactagcaccagtacatacagaagcatggcaaggatgtttctggcagcacttttctaataataaaagatttgaaacaaaaacaaccttaagtattcattattggtatatagatcacttatagtatactagacagtggaatactatggtactgttaataaagatgaagtaaatctcttggaaaaaaatcca

SEQ ID NO: 52350 - DNA, 1346 bp, Homo sapiens
  misc_feature (13)..(13): n is a, c, g, or t
ctcgtgccgaatncggcacgagggccgtcaacagcactgacaaatgaagaagaagaatgagtctcagggcaccttcctggagtggccctcgccatccagggaccagcgcgttgcctcccccggcgcttttacatcacatgagcagctgacagcgtatttattatgcctttgctgaaacagttgatgagaaatatgtttcccttcagttttcatttagaagacaaggcgtcgtttgaataacttgcctgatttttcttcctaccgagtagcatttctttttttttcaccatatctttccctaaggcagctccttattctgtaggaattgccaatgttgatgtgttattgttaggtatttatatcattcacagggctgtcagaaatcccgatgatcttgaagcaaggtctcatatgcacttggcaagtgcttttgctggcatcggctttggaaatgctggtgttcatctgtgccatggaatgtcttacccaatttcaggtttagtgaagatgtataaagcaaaggattacaatgtggatcacccactggtgccccatggcctttctgtggtggctcacgtccccagcggtgttcactttcacggcccagatgtttccagagcgacacctggagatggcagaaatactgggagccgacacccgcactgccaggatccaagatgcagggctggtgttggcagacacgctccggaaattcttattcgatctggatgttgatgatggcctagcagctgttggttactccaaagctgatatccccgcactagtgaaaggaacgctgccccaggaaagggtcaccaagcttgcaccccgtccccagtcagaagaggatctggctgctctgtttgaagcttcaatgaaactgtattaattgtcattttaactgaaagaattaccgctggccattgtagtgctgagagcaagagctgatctagctagggctttgtcttttcatctttgtgcataacttacctgttaccagtataggtgggatatacatttatcttgcaggaaattccccaaagctcagagtccagttccttccataaaacaggctggacaaatgaccactatgttagacccccaggctcgacttcaggggtcagtgttcctgtcccaaaccccacacagaatactctgcctctgcttcatgtagcaaatgagcaaaaactcagtatctatcaaaagtgtaaattatatttcctatgcctagtaattcacttcatgtctaaaaatttatctgatagaaacactagcaccagtacatacagaagcatggcaaggatgtttctggcagcacttttctaataataaaagatttgaaacaa

SEQ ID NO: 52351 - DNA, 1626 bp, Homo sapiens
agtcaaaccagaactgattaacatagcctgtcaggctagaataatcatttctgactggactctgtgagtatgtaacatttgaagggatctgtcagttactggtgggacagatcactgatgggtcaagcttgcacgtcatcaaatacagcacatcctgactcacaaaattcccccgacatcatctgggagcacactgccaaggaactgccagggaaaaacagaaaacacatgcccagagcttattacagaaacttcgaagtgaattaccgagtctttgagatcgtaatgttaactaatgggttcagggagctacttctgggatcaatactttttaatgtccatacaattctatgagcatttgaatttgagcattttcagaggttttgttaatgaatgcactacatgtccctagacatcataatatatccttatatccaagaaaacagaacatatcactttttcaggtaatgatactgtctagaggccgtgacaggcatccccataagagtatctttctattgttgacttgaattttgataactgtgtatgaacataaggattttctttcttttctagccatggaatgtcttacccaatttcaggtttagtgaagatgtataaagcaaaggattacaatgtggatcacccactggtggtaaaatcataagaataaattatttaattaaatattataatcatcccaatttccataaatatatttgccaattctcgcctgcttagagtatggggtaaagtaacttaacatctagaatatgcagggaagaacagctttgtcatctgccggtcaccgcatttcgtttctccccagccccatggcctttctgtggtggctcacgtccccagcggtgttcactttcacggcccagatgtttccagagcgacacctggagatggcagaaatactgggagccgacacccgcactgccaggatccaagatgcagggctggtgttggcagacacgctccggaaattcttattcgatctggatgttgatgatggcctagcagctgttggttactccaaagctgatatccccgcactagtgaaaggaacgctgccccaggaaagggtcaccaagcttgcaccccgtccccagtcagaagaggatctggctgctctgtttgaagcttcaatgaaactgtattaattgtcattttaactgaaagaattaccgctggccattgtagtgctgagagcaagagctgatctagctagggctttgtcttttcatctttgtgcataacttacctgttaccagtataggtgggatatacatttatcttgcaggaaattccccaaagctcagagtccagttccttccataaaacaggctggacaaatgaccactatgttagacccccaggctcgacttcaggggtcagtgttcctgtcccaaaccccacacagaatactctgcctctgcttcatgtagcaaatgagcaaaaactcagtatctatcaaaagtgtaaattatatttcctatgcctagtaattcacttcatgtctaaaaatttatctgatagaaacactagcaccagtacatacagaagcatggcaaggatgtttctggcagcacttttctaataataaaagatttgaaacaa

SEQ ID NO: 52352 - DNA, 754 bp, Homo sapiens
agtgctgggattacagatgtgagccaccaggcccggcctcttaattactaatcatgagccgacacccgcactgccaggatccaagatgcagggctggtgttggcagacacgctccggaaattcttattcgatctggatgttgatgatggcctagcagctgttggttactccaaagctgatatccccgcactagtgaaaggaacgctgccccaggaaagggtcaccaagcttgcaccccgtccccagtcagaagaggatctggctgctctgtttgaagcttcaatgaaactgtattaattgtcattttaactgaaagaattaccgctggccattgtagtgctgagagcaagagctgatctagctagggctttgtcttttcatctttgtgcataacttacctgttaccagtataggtgggatatacatttatcttgcaggaaattccccaaagctcagagtccagttccttccataaaacaggctggacaaatgaccactatgttagacccccaggctcgacttcaggggtcagtgttcctgtcccaaaccccacacagaatactctgcctctgcttcatgtagcaaatgagcaaaaactcagtatctatcaaaagtgtaaattatatttcctatgcctagtaattcacttcatgtctaaaaatttatctgatagaaacactagcaccagtacatacagaagcatggcaaggatgtttctggcagcacttttctaataataaaagatttgaaacaa

SEQ ID NO: 52353 - DNA, 1010 bp, Homo sapiens
aaaaaaacggagtcacttgttgcacatagcatgaacattaatgttctactgaagtccttttgaatatgccttaagtccaagttgcaaaatacatggtcttagacttcggggacgacccagttctctctcagagctctgtgtgtacagagaacctggcagaggtggttgactgacctagttttgtcatgataagggtgttttccccaagattggtttcggcagaaggctgttgccagggcgtaaggcaaggggcagtggctttcgaaagctctgtggggaaagaggtatgatgtgataaacctctgagatggggatcaactcatatgaagtatacaagaaataccgtttttaaagatatggcgtttatcaagtcattgattcttatgaccaagttaatttccataactttgtagcttttacaaactgccttttcaaagccctgggtaacttctttcatttactgtttcaggaaagggtcaccaagcttgcaccccgtccccagtcagaagaggatctggctgctctgtttgaagcttcaatgaaactgtattaattgtcattttaactgaaagaattaccgctggccattgtagtgctgagagcaagagctgatctagctagggctttgtcttttcatctttgtgcataacttacctgttaccagtataggtgggatatacatttatcttgcaggaaattccccaaagctcagagtccagttccttccataaaacaggctggacaaatgaccactatgttagacccccaggctcgacttcaggggtcagtgttcctgtcccaaaccccacacagaatactctgcctctgcttcatgtagcaaatgagcaaaaactcagtatctatcaaaagtgtaaattatatttcctatgcctagtaattcacttcatgtctaaaaatttatctgatagaaacactagcaccagtacatacagaagcatggcaaggatgtttctggcagcacttttctaataataaaagatttgaaacaa

SEQ ID NO: 52354 - DNA, 938 bp, Homo sapiens
acaattagagattatggaaaagagccctctgtggccccctaagcctgtaggtctgtgtttttcagttttgctggccgagaaaaaagacccaagggagtaacatattattttctacaaggatgttctaaaactgctcaggcctgtgagtgaaatgatttgctgcactgcaagggagtatccagtccagccagaagaagagccaaaagctctcagcacctcttgaccaagaatgtggtgatcgagtcggacctgtacacgcaccagcccctggagctgctgccccaccgcggagaccgcagggaccctggcgaccgccgcaggtttgggcggctccagaccgcgcggccgcccacagcccacccggccaaagcctctgccagacccgtggggatttctgaacccaaaacatcaaatctgtgtgggaatcgagcatatggaaaatctctgataccgccagtgccccggatctcagtgaaaacttcagcctctgcctcattggaggcgacagccatgggcacagagaagggagctgttctgatgagaggatccagacatctcaagaagatgactgaagagtatccagcccttccccaaggagcagaagcctctctaccactgacaggcagtgcttcctgcggcgtccccggcatcctccggaaaatgtggacaaggcacaagaagaagtctgaatatgtggggagccaccaacagcgcctttgaggccgactaaaggtgaccctcttcaagtgccctgtgttggccaaggttccccggacaagaggaaaaaccttcaggattgaaactgagccacacgcacctctgctagtagctggtccaaacccattatcctccctcactcattgattacccctggatggggccaagggaatgttcttctaaggcaattctgccttcttagcatggttaagctctgtctg

SEQ ID NO: 52355 - DNA, 503 bp, Homo sapiens
acaattagagattatggaaaagagccctctgtggccccctaagcctgtaggtctgtgtttttcagttttgctggccgagaaaaaagacccaagggagtaacatattattttctacaaggatgttctaaaactgctcaggcctgtgagtgaaatgatttgctgcactgcaagggagggtctttcacagacgaaaggttcttaatttgatgaagttcagtttatcaccttttcctttttattcatcatgcatttgatgtcaagtcaaagaactctgcctacccataaatctctaaggttttctcccgagtgttttcctaaaaattttagtttcacatgtaagtctgtgatctactttgagttaatttttgtataaggtgtgagacttaggggggtgtgtgtgtatgcatgcacacatgagcacacctaggctatctctagtatcatgtgttcatttgttgaaaagatactctttcctccattaaattgtttttatgcctttgtca

SEQ ID NO: 52356 - DNA, 335 bp, Homo sapiens
cccagcaccagccgactttcttgccttgttctgcacctctcttcttgtctttgttcctcttcttcctaccacacaaggggcaagtatgtaggacttggcagcccctccgaaatgtcagagctaagtgagctcccccagccaacttgggccctcctggggaggcacacgatggccccgtgctgggcgttagggagaccccgtgggtgtgcatggtgtattcactgatcttgtgactgaactccacccagagcccgtttcttcctctctccctacagtcagcactttatgtcttctaggagccgacacccgcactgccaggatccaagatgcagggc

SEQ ID NO: 52357 - DNA, 447 bp, Homo sapiens
atttttaaatagactttatttttagagcagttttaggtatacagcaaaattgagctgaaggtacagaggtttcccatatacctcctgccccctcatacaagcacagcctccccccatcaacatcccccaccagagggatatgtttgtgatagtcaatgaacctacatagacacactgatcttatttaggccttagttccagctcccctagaagagtgacagttgccttgtggcctgaccctcctgcctggttttgctgcttggtacaaaggcctttagaaattccctggcgtggttgattggctaacaaggtaattgatgcagggccagtgggaggcagaacacagagtaccactgagtaatatctcctctgttcaacattgcagtggggatttctgaacccaaaacatcaaatctgtgtgggaatcgagcatatggaaaatctctg

SEQ ID NO: 52358 - DNA, 421 bp, Homo sapiens
gccattgtagtgctgagagcaagagctgatctagctagggctttgtcttttcatctttgtgcataacttacctgttaccagtataggtgggatatacatttatcttgcaggaaattccccaaagctcagagtccagttccttccataaaacaggctggacaaatgaccactatgttagacccccaggctcgacttcaggggtcagtgttcctgtcccaaaccccacacagaatactctgcctctgcttcatgtagcaaatgagcaaaaactcagtatctatcaaaagtgtaaattatatttcctatgcctagtaattcacttcatgtctaaaaatttatctgatagaaacactagcaccagtacatacagaagcatggcaaggatgtttctggcagcacttttctaataataaaagatttg

SEQ ID NO: 52359 - DNA, 2370 bp, Homo sapiens
ggtggagcgacccgaggagggaagaggactccaagcgccatggccgctgccgcccgagcccgggtcgcgtacttgctgaggcaactgcaacgcgcagcgtgccagtgcccaactcattctcatacttactcccaagcccctggactttcaccttctgggaaaacaacagattatgcctttgagatggctgtttcaaatattagatatggagcagcagttacaaaggaagtaggaatggacctaaaaaacatgggtgctaaaaatgtgtgcttgatgacagacaagaacctctccaagctccctcctgtgcaagtagctatggattccctagtgaagaatggcatcccctttacggtttatgataatgtgagagtggaaccaacggattcaagcttcatggaagctattgagtttgcccaaaagggagcttttgatgcctatgttgctgtcggtggtggctctaccatggacacctgtaaggctgctaatctgtatgcatccagccctcattctgatttcctagattatgtcagtgcccccattggcaagggaaagcctgtgtctgtgcctcttaagcctctgattgcagtgccaactacctcaggaaccgggagtgaaactactggggttgccatttttgactatgaacacttgaaagtaaaaattggcatcacttcgagagccatcaaacccacactgggactgattgatcctctgcacaccctccacatgcctgcccgagtggtcgccaacagtggctttgatgtgctttgccatgccctggagtcatacaccaccctgccctaccacctgcggagcccctgcccttcaaatcccatcacacggcctgcgtaccagggcagcaacccaatcagtgacatttgggctatccacgcgctgcggatcgtggctaagtatctgaagagggccgtcaacagcactgacaaatgaagaagaagaatgagtctcagggcaccttcctggagtggccctcgccatccagggaccagcgcgttgcctcccccggcgcttttacatcacatgagcagctgacagcgtatttattatgcctttgctgaaacagttgatgagaaatatgtttcccttcagttttcatttagaagacaaggcgtcgtttgaataacttgcctgatttttcttcctaccgagtagcatttctttttttttcaccatatctttccctaaggcagctccttattctgtaggaattgccaatgttgatgtgttattgttaggtatttatatcattcacagggctgtcagaaatcccgatgatcttgaagcaaggtctcatatgcacttggcaagtgcttttgctggcatcggctttggaaatgctggtgttcatctgtgccatggaatgtcttacccaatttcaggtttagtgaagatgtataaagcaaaggattacaatgtggatcacccactggtgataaatatatttgccaattctcgcctgcttagagtatggggtaaagtaacttaacatctagaatatgcagggaagaacagctttgtcatctgccggtcaccgcatttcgtttctccccagccccatggcctttctgtggtggctcacgtccccagcggtgttcactttcacggcccagatgtttccagagcgacacctggagatggcagaaatactgggagccgacacccgcactgccaggatccaagatgcagggctggtgttggcagacacgctccggaaattcttattcgatctggatgttgatgatggcctagcagctgttggttactccaaagctgatatccccgcactagtgaaaggaacgctgccccaggaaagggtcaccaagcttgcaccccgtccccagtcagaagaggatctggctgctctgtttgaagcttcaatgaaactgtattaattgtcattttaactgaaagaattaccgctggccattgtagtgctgagagcaagagctgatctagctagggctttgtcttttcatctttgtgcataacttacctgttaccagtataggtgggatatacatttatcttgcaggaaattccccaaagctcagagtccagttccttccataaaacaggctggacaaatgaccactatgttagacccccaggctcgacttcaggggtcagtgttcctgtcccaaaccccacacagaatactctgcctctgcttcatgtagcaaatgagcaaaaactcagtatctatcaaaagtgtaaattatatttcctatgcctagtaattcacttcatgtctaaaaatttatctgatagaaacactagcaccagtacatacagaagcatggcaaggatgtttctggcagcacttttctaataataaaagatttgaaacaa

SEQ ID NO: 52360 - DNA, 2073 bp, Homo sapiens
ggtggagcgacccgaggagggaagaggactccaagcgccatggccgctgccgcccgagcccgggtcgcgtacttgctgaggcaactgcaacgcgcagcgtgccagtgcccaactcattctcatacttactcccaagcccctggactttcaccttctgggaaaacaacagattatgcctttgagatggctgtttcaaatattagatatggagcagcagttacaaaggaagtaggaatggacctaaaaaacatgggtgctaaaaatgtgtgcttgatgacagacaagaacctctccaagctccctcctgtgcaagtagctatggattccctagtgaagaatggcatcccctttacggtttatgataatgtgagagtggaaccaacggattcaagcttcatggaagctattgagtttgcccaaaagggagcttttgatgcctatgttgctgtcggtggtggctctaccatggacacctgtaaggctgctaatctgtatgcatccagccctcattctgatttcctagattatgtcagtgcccccattggcaagggaaagcctgtgtctgtgcctcttaagcctctgattgcagtgccaactacctcaggaaccgggagtgaaactactggggttgccatttttgactatgaacacttgaaagtaaaaattggcatcacttcgagagccatcaaacccacactgggactgattgatcctctgcacaccctccacatgcctgcccgagtggtcgccaacagtggctttgatgtgctttgccatgccctggagtcatacaccaccctgccctaccacctgcggagcccctgcccttcaaatcccatcacacggcctgcgtaccagggcagcaacccaatcagtgacatttgggctatccacgcgctgcggatcgtggctaagtatctgaagagggccgtcaacagcactgacaaatgaagaagaagaatgagtctcagggcaccttcctggagtggccctcgccatccagggaccagcgcgttgcctcccccggcgcttttacatcacatgagcagctgacagcgtatttattatgcctttgctgaaacagttgatgagaaatatgtttcccttcagttttcatttagaagacaaggcgtcgtttgaataacttgcctgatttttcttcctaccgagtagcatttctttttttttcaccatatctttccctaaggcagctccttattctgtaggaattgccaatgttgatgtgttattgttaggtatttatatcattcacagggctgtcagaaatcccgatgatcttgaagcaaggtctcatatgcacttggcaagtgcttttgctggcatcggctttggaaatgctggtgttcatctgtggagccgacacccgcactgccaggatccaagatgcagggctggtgttggcagacacgctccggaaattcttattcgatctggatgttgatgatggcctagcagctgttggttactccaaagctgatatccccgcactagtgaaaggaacgctgccccaggaaagggtcaccaagcttgcaccccgtccccagtcagaagaggatctggctgctctgtttgaagcttcaatgaaactgtattaattgtcattttaactgaaagaattaccgctggccattgtagtgctgagagcaagagctgatctagctagggctttgtcttttcatctttgtgcataacttacctgttaccagtataggtgggatatacatttatcttgcaggaaattccccaaagctcagagtccagttccttccataaaacaggctggacaaatgaccactatgttagacccccaggctcgacttcaggggtcagtgttcctgtcccaaaccccacacagaatactctgcctctgcttcatgtagcaaatgagcaaaaactcagtatctatcaaaagtgtaaattatatttcctatgcctagtaattcacttcatgtctaaaaatttatctgatagaaacactagcaccagtacatacagaagcatggcaaggatgtttctggcagcacttttctaataataaaagatttgaaacaa

SEQ ID NO: 52361 - DNA, 2327 bp, Homo sapiens
ggtggagcgacccgaggagggaagaggactccaagcgccatggccgctgccgcccgagcccgggtcgcgtacttgctgaggcaactgcaacgcgcagcgtgccagtgcccaactcattctcatacttactcccaagcccctggactttcaccttctgggaaaacaacagattatgcctttgagatggctgtttcaaatattagatatggagcagcagttacaaaggaagtaggaatggacctaaaaaacatgggtgctaaaaatgtgtgcttgatgacagacaagaacctctccaagctccctcctgtgcaagtagctatggattccctagtgaagaatggcatcccctttacggtttatgataatgtgagagtggaaccaacggattcaagcttcatggaagctattgagtttgcccaaaagggagcttttgatgcctatgttgctgtcggtggtggctctaccatggacacctgtaaggctgctaatctgtatgcatccagccctcattctgatttcctagattatgtcagtgcccccattggcaagggaaagcctgtgtctgtgcctcttaagcctctgattgcagtgccaactacctcaggaaccgggagtgaaactactggggttgccatttttgactatgaacacttgaaagtaaaaattggcatcacttcgagagccatcaaacccacactgggactgattgatcctctgcacaccctccacatgcctgcccgagtggtcgccaacagtggctttgatgtgctttgccatgccctggagtcatacaccaccctgccctaccacctgcggagcccctgcccttcaaatcccatcacacggcctgcgtaccagggcagcaacccaatcagtgacatttgggctatccacgcgctgcggatcgtggctaagtatctgaagagggccgtcaacagcactgacaaatgaagaagaagaatgagtctcagggcaccttcctggagtggccctcgccatccagggaccagcgcgttgcctcccccggcgcttttacatcacatgagcagctgacagcgtatttattatgcctttgctgaaacagttgatgagaaatatgtttcccttcagttttcatttagaagacaaggcgtcgtttgaataacttgcctgatttttcttcctaccgagtagcatttctttttttttcaccatatctttccctaaggcagctccttattctgtaggaattgccaatgttgatgtgttattgttaggtatttatatcattcacagggctgtcagaaatcccgatgatcttgaagcaaggtctcatatgcacttggcaagtgcttttgctggcatcggctttggaaatgctggtgttcatctgtgccatggaatgtcttacccaatttcaggtttagtgaagatgtataaagcaaaggattacaatgtggatcacccactggtgccccatggcctttctgtggtggctcacgtccccagcggtgttcactttcacggcccagatgtttccagagcgacacctggagatggcagaaatactgggagccgacacccgcactgccaggatccaagatgcagggctggtgttggcagacacgctccggaaattcttattcgatctggatgttgatgatggcctagcagctgttggttactccaaagctgatatccccgcactagtgaaaggaacgctgccccaggaaagggtcaccaagcttgcaccccgtccccagtcagaagaggatctggctgctctgtttgaagcttcaatgaaactgtattaattgtcattttaactgaaagaattaccgctggccattgtagtgctgagagcaagagctgatctagctagggctttgtcttttcatctttgtgcataacttacctgttaccagtataggtgggatatacatttatcttgcaggaaattccccaaagctcagagtccagttccttccataaaacaggctggacaaatgaccactatgttagacccccaggctcgacttcaggggtcagtgttcctgtcccaaaccccacacagaatactctgcctctgcttcatgtagcaaatgagcaaaaactcagtatctatcaaaagtgtaaattatatttcctatgcctagtaattcacttcatgtctaaaaatttatctgatagaaacactagcaccagtacatacagaagcatggcaaggatgtttctggcagcacttttctaataataaaagatttgaaacaaaaaaaaacaacaaacacaagacgaaaaaaaaacattagggggcacgcacctgggcccttgaaaaaggttaagaaaca

SEQ ID NO: 52362 - DNA, 2006 bp, Homo sapiens
ggtggagcgacccgaggagggaagaggactccaagcgccatggccgctgccgcccgagcccgggtcgcgtacttgctgaggcaactgcaacgcgcagcgtgccagtgcccaactcattctcatacttactcccaagatggctgtttcaaatattagatatggagcagcagttacaaaggaagtaggaatggacctaaaaaacatgggtgctaaaaatgtgtgcttgatgacagacaagaacctctccaagctccctcctgtgcaagtagctatggattccctagtgaagaatggcatcccctttacggtttatgataatgtgagagtggaaccaacggattcaagtgccaactacctcaggaaccgggagtgaaactactggggttgccatttttgactatgaacacttgaaagtaaaaattggcatcacttcgagagccatcaaacccacactgggactgattgatcctctgcacaccctccacatgcctgcccgagtggtcgccaacagtggctttgatgtgctttgccatgccctggagtcatacaccaccctgccctaccacctgcggagcccctgcccttcaaatcccatcacacggcctgcgtaccagggcagcaacccaatcagtgacatttgggctatccacgcgctgcggatcgtggctaagtatctgaagagggccgtcaacagcactgacaaatgaagaagaagaatgagtctcagggcaccttcctggagtggccctcgccatccagggaccagcgcgttgcctcccccggcgcttttacatcacatgagcagctgacagcgtatttattatgcctttgctgaaacagttgatgagaaatatgtttcccttcagttttcatttagaagacaaggcgtcgtttgaataacttgcctgatttttcttcctaccgagtagcatttctttttttttcaccatatctttccctaaggcagctccttattctgtaggaattgccaatgttgatgtgttattgttaggtatttatatcattcacagggctgtcagaaatcccgatgatcttgaagcaaggtctcatatgcacttggcaagtgcttttgctggcatcggctttggaaatgctggtgttcatctgtgccatggaatgtcttacccaatttcaggtttagtgaagatgtataaagcaaaggattacaatgtggatcacccactggtgccccatggcctttctgtggtggctcacgtccccagcggtgttcactttcacggcccagatgtttccagagcgacacctggagatggcagaaatactgggagccgacacccgcactgccaggatccaagatgcagggctggtgttggcagacacgctccggaaattcttattcgatctggatgttgatgatggcctagcagctgttggttactccaaagctgatatccccgcactagtgaaaggaacgctgccccaggaaagggtcaccaagcttgcaccccgtccccagtcagaagaggatctggctgctctgtttgaagcttcaatgaaactgtattaattgtcattttaactgaaagaattaccgctggccattgtagtgctgagagcaagagctgatctagctagggctttgtcttttcatctttgtgcataacttacctgttaccagtataggtgggatatacatttatcttgcaggaaattccccaaagctcagagtccagttccttccataaaacaggctggacaaatgaccactatgttagacccccaggctcgacttcaggggtcagtgttcctgtcccaaaccccacacagaatactctgcctctgcttcatgtagcaaatgagcaaaaactcagtatctatcaaaagtgtaaattatatttcctatgcctagtaattcacttcatgtctaaaaatttatctgatagaaacactagcaccagtacatacagaagcatggcaaggatgtttctggcagcacttttctaataataaaagatttgaaacaa

SEQ ID NO: 52363 - DNA, 1572 bp, Homo sapiens
agtcaaaccagaactgattaacatagcctgtcaggctagaataatcatttctgactggactctgtgagtatgtaacatttgaagggatctgtcagttactggtgggacagatcactgatgggtcaagcttgcacgtcatcaaatacagcacatcctgactcacaaaattcccccgacatcatctgggagcacactgccaaggaactgccagggaaaaacagaaaacacatgcccagagcttattacagaaacttcgaagtgaattaccgagtctttgagatcgtaatgttaactaatgggttcagggagctacttctgggatcaatactttttaatgtccatacaattctatgagcatttgaatttgagcattttcagaggttttgttaatgaatgcactacatgtccctagacatcataatatatccttatatccaagaaaacagaacatatcactttttcaggtaatgatactgtctagaggccgtgacaggcatccccataagagtatctttctattgttgacttgaattttgataactgtgtatgaacataaggattttctttcttttctagccatggaatgtcttacccaatttcaggtttagtgaagatgtataaagcaaaggattacaatgtggatcacccactggtgataaatatatttgccaattctcgcctgcttagagtatggggtaaagtaacttaacatctagaatatgcagggaagaacagctttgtcatctgccggtcaccgcatttcgtttctccccagccccatggcctttctgtggtggctcacgtccccagcggtgttcactttcacggcccagatgtttccagagcgacacctggagatggcagaaatactgggagccgacacccgcactgccaggatccaagatgcagggctggtgttggcagacacgctccggaaattcttattcgatctggatgttgatgatggcctagcagctgttggttactccaaagctgatatccccgcactagtgaaaggaacgctgccccaggaaagggtcaccaagcttgcaccccgtccccagtcagaagaggatctggctgctctgtttgaagcttcaatgaaactgtattaattgtcattttaactgaaagaattaccgctggccattgtagtgctgagagcaagagctgatctagctagggctttgtcttttcatctttgtgcataacttacctgttaccagtataggtgggatatacatttatcttgcaggaaattccccaaagctcagagtccagttccttccataaaacaggctggacaaatgaccactatgttagacccccaggctcgacttcaggggtcagtgttcctgtcccaaaccccacacagaatactctgcctctgcttcatgtagcaaatgagcaaaaactcagtatctatcaaaagtgtaaattatatttcctatgcctagtaattcacttcatgtctaaaaatttatctgatagaaacactagcaccagtacatacagaagcatggcaaggatgtttctggcagcacttttctaataataaaagatttgaaacaa

SEQ ID NO: 52364 - DNA, 2472 bp, Homo sapiens
ggtggagcgacccgaggagggaagaggactccaagcgccatggccgctgccgcccgagcccgggtcgcgtacttgctgaggcaactgcaacgcgcagcgtgccagtgcccaactcattctcatacttactcccaagcccctggactttcaccttctgggaaaacaacagattatgcctttgagatggctgtttcaaatattagatatggagcagcagttacaaaggaagtaggaatggacctaaaaaacatgggtgctaaaaatgtgtgcttgatgacagacaagaacctctccaagctccctcctgtgcaagtagctatggattccctagtgaagaatggcatcccctttacggtttatgataatgtgagagtggaaccaacggattcaagcttcatggaagctattgagtttgcccaaaagggagcttttgatgcctatgttgctgtcggtggtggctctaccatggacacctgtaaggctgctaatctgtatgcatccagccctcattctgatttcctagattatgtcagtgcccccattggcaagggaaagcctgtgtctgtgcctcttaagcctctgattgcagtgccaactacctcaggaaccgggagtgaaactactggggttgccatttttgactatgaacacttgaaagtaaaaattggcatcacttcgagagccatcaaacccacactgggactgattgatcctctgcacaccctccacatgcctgcccgagtggtcgccaacagtggctttgatgtgctttgccatgccctggagtcatacaccaccctgccctaccacctgcggagcccctgcccttcaaatcccatcacacggcctgcgtaccagggcagcaacccaatcagtgacatttgggctatccacgcgctgcggatcgtggctaagtatctgaagagggccgtcaacagcactgacaaatgaagaagaagaatgagtctcagggcaccttcctggagtggccctcgccatccagggaccagcgcgttgcctcccccggcgcttttacatcacatgagcagctgacagcgtatttattatgcctttgctgaaacagttgatgagaaatatgtttcccttcagttttcatttagaagacaaggcgtcgtttgaataacttgcctgatttttcttcctaccgagtagcatttctttttttttcaccatatctttccctaaggcagctccttattctgtaggaattgccaatgttgatgtgttattgttaggtatttatatcattcacagggctgtcagaaatcccgatgatcttgaagcaaggtctcatatgcacttggcaagtgcttttgctggcatcggctttggaaatgctggtgttcatctgtgccatggaatgtcttacccaatttcaggtttagtgaagatgtataaagcaaaggattacaatgtggatcacccactggtgccccatggcctttctgtggtggctcacgtccccagcggtgttcactttcacggcccagatgtttccagagcgacacctggagatggcagaaatactgggagccgacacccgcactgccaggatccaagatgcagggctggtgttggcagacacgctccggaaattcttattcgatctggatgttgatgatggcctagcagctgttggttactccaaagctgatatccccgcactagtgaaaggaacgctgccccagtatccagtccagccagaagaagagccaaaagctctcagcacctcttgaccaagaatgtggtgatcgagtcggacctgtacacgcaccagcccctggagctgctgccccaccgcggagaccgcagggaccctggcgaccgccgcaggtttgggcggctccagaccgcgcggccgcccacagcccacccggccaaagcctctgccagacccgtggggatttctgaacccaaaacatcaaatctgtgtgggaatcgagcatatggaaaatctctgataccgccagtgccccggatctcagtgaaaacttcagcctctgcctcattggaggcgacagccatgggcacagagaagggagctgttctgatgagaggatccagacatctcaagaagatgactgaagagtatccagcccttccccaaggagcagaagcctctctaccactgacaggcagtgcttcctgcggcgtccccggcatcctccggaaaatgtggacaaggcacaagaagaagtctgaatatgtggggagccaccaacagcgcctttgaggccgactaaaggtgaccctcttcaagtgccctgtgttggccaaggttccccggacaagaggaaaaaccttcaggattgaaactgagccacacgcacctctgctagtagctggtccaaacccattatcctccctcactcattgattacccctggatggggccaagggaatgttcttctaaggcaattctgccttcttagcatggttaagctctgtctg

SEQ ID NO: 52365 - DNA, 1718 bp, Homo sapiens
ggtggagcgacccgaggagggaagaggactccaagcgccatggccgctgccgcccgagcccgggtcgcgtacttgctgaggcaactgcaacgcgcagcgtgccagtgcccaactcattctcatacttactcccaagcccctggactttcaccttctgggaaaacaacagattatgcctttgagatggctgtttcaaatattagatatggagcagcagttacaaaggaagtaggaatggacctaaaaaacatgggtgctaaaaatgtgtgcttgatgacagacaagaacctctccaagctccctcctgtgcaagtagctatggattccctagtgaagaatggcatcccctttacggtttatgataatgtgagagtggaaccaacggattcaagcttcatggaagctattgagtttgcccaaaagggagcttttgatgcctatgttgctgtcggtggtggctctaccatggacacctgtaaggctgctaatctgtatgcatccagccctcattctgatttcctagattatgtcagtgcccccattggcaagggaaagcctgtgtctgtgcctcttaagcctctgattgcagtgccaactacctcaggaaccgggagtgaaactactggggttgccatttttgactatgaacacttgaaagtaaaaattggcatcacttcgagagccatcaaacccacactgggactgattgatcctctgcacaccctccacatgcctgcccgagtggtcgccaacagtggctttgatgtgctttgccatgccctggagtcatacaccaccctgccctaccacctgcggagcccctgcccttcaaatcccatcacacggcctgcgtaccagggcagcaacccaatcagtgacatttgggctatccacgcgctgcggatcgtggctaagtatctgaagagggccgtcaacagcactgacaaatgaagaagaagaatgagtctcagggcaccttcctggagtggccctcgccatccagggaccagcgcgttgcctcccccggcgcttttacatcacatgagcagctgacagcgtatttattatgcctttgctgaaacagttgatgagaaatatgtttcccttcagttttcatttagaagacaaggcgtcgtttgaataacttgcctgatttttcttcctaccgagtagcatttctttttttttcaccatatctttccctaaggcagctccttattctgtaggaattgccaatgttgatgtgttattgttaggtatttatatcattcacagggctgtcagaaatcccgatgatcttgaagcaaggtctcatatgcacttggcaagtgcttttgctggcatcggctttggaaatgctggtgttcatctgtggtgagcaagtctgagatttcatttctttactcaagctattgctttaaaaaatttttaatgtttataattcaggacaggtggtaaaatttaaatatgctatagaaggaagaaatttaactttatgttcctaaatgtattcttctttttctttttttccttttttcaccaccagctaaagtagaaacctaaatgtattcttaaattgaatgtggttcctaaatgtattcttttgtgttcctaaatgtattctttttctttttttcttttttccaccatcagctataaagtagaaacctaaatgtattcttaaattgaatgtggtttactgggttttttaataacat

SEQ ID NO: 52366 - DNA, 1654 bp, Homo sapiens
tcttcctactcccaggtaaaaatgctatagtatttgtgaatgttggcagcaaatgactgttccttacagagggttctctgtctccccaagtacccgaatgtggtgacctggtggcatcaggacagtgtggctcagcccaggaagccgggggagaagccgctgtcactgatgctgtggttgcctttggaggttgccctcacttccaggccagctgaccttgcctcccctgcttcagagaagtgcctgcaatcctgatggggaatgtaggcatctgcaccctcgaagtccagctctgacctcagtcccttctgacacgggacagtaagtgaagaagagtgggtggctcctgcctgtgctgtggaaggttttatttatcggttaccacttcattctccagcctgtagtgcccgactttgggttggaagctggactacgcccaagcaaggtttgatgcctatttccaccagaagaggaagcttggggtgtgactgtggggaggactccatccacctcatcactggactgcatggggaggcagcagagcggggtcccctctgtgcttcgactactgctcctgtggcaggaggctttgggtggctcactactgaacacatgtgtatgatactaaagacggtattaaaatggagcgacgtttatttcatctcttgtttacgatttcactaggactcagaaacgagatcgggaagcagaaatatagtgcaatagtgcaacatctctgaatccttttaatctagagaaggcatttcatatttgggggctaaggtttccagtcagatgaggcaaacagcaagagtaagcagtgttacttgcaggtactttggttaatgttgatttaaattttcatgaatgtgctggtgaacactgtgaccaggcttttgtagatggcgatgtgttatagacggtgctcactcccaagggacagcaagtgagcagagatgtactgcaaagtcgccagtcactgctgcaaggtggcctctgcctggggcctccagaagctgctcctttaccctcttggtcccatggctgaagctggagcagcggattgctctggagcagccaaggccgccagcgtgtggagcagagctctcccctcctgctgggcgtgtgtgacactgatgagtttcactgtactgcatgtgacttctcccctgcccttcctcctgatggagtgtgcagacagccatgcgtggccacgggggcagtgtgaggacctccctgtctcccggctcccctcccaggggagccagctgcttgacctagctctttgggcctctcctgccctctgctctgcctggagtgtcggatcctgtgagtaggctgggcctcccctgggcagggttctccaagggcccggtttcccggcccttacctttcctgatgcccctgacatcatcattcttgtgggagacagcagcctgtatgtggtgtggggcgtggatcgagtgtagctgtgaaatccatatatatgaaatgtcctgcgggatacagtcttagctgacttttttttactctgaactcttatttgaattgttttttgtgcatatatttctgctaccacagagattgtactatacaaataaaaaaattaaaacccaacctcaagctgtcacccttggatgtgtcctgaatctca

SEQ ID NO: 52367 - DNA, 1547 bp, Homo sapiens
tcttcctactcccaggtaaaaatgctatagtatttgtgaatgttggcagcaaatgactgttccttacagagggttctctgtctccccaagtacccgaatgtggtgacctggtggcatcaggacagtgtggctcagcccaggaagccgggggagaagccgctgtcactgatgctgtggttgcctttggaggttgccctcacttccaggccagctgaccttgcctcccctgcttcagagaagtgcctgcaatcctgatggggaatgtaggcatctgcaccctcgaagtccagctctgacctcagtcccttctgacacgggacagactacgcccaagcaaggtttgatgcctatttccaccagaagaggaagcttggggtgtgactgtggggaggactccatccacctcatcactggactgcatggggaggcagcagagcggggtcccctctgtgcttcgactactgctcctgtggcaggaggctttgggtggctcactactgaacacatgtgtatgatactaaagacggtattaaaatggagcgacgtttatttcatctcttgtttacgatttcactaggactcagaaacgagatcgggaagcagaaatatagtgcaatagtgcaacatctctgaatccttttaatctagagaaggcatttcatatttgggggctaaggtttccagtcagatgaggcaaacagcaagagtaagcagtgttacttgcaggtactttggttaatgttgatttaaattttcatgaatgtgctggtgaacactgtgaccaggcttttgtagatggcgatgtgttatagacggtgctcactcccaagggacagcaagtgagcagagatgtactgcaaagtcgccagtcactgctgcaaggtggcctctgcctggggcctccagaagctgctcctttaccctcttggtcccatggctgaagctggagcagcggattgctctggagcagccaaggccgccagcgtgtggagcagagctctcccctcctgctgggcgtgtgtgacactgatgagtttcactgtactgcatgtgacttctcccctgcccttcctcctgatggagtgtgcagacagccatgcgtggccacgggggcagtgtgaggacctccctgtctcccggctcccctcccaggggagccagctgcttgacctagctctttgggcctctcctgccctctgctctgcctggagtgtcggatcctgtgagtaggctgggcctcccctgggcagggttctccaagggcccggtttcccggcccttacctttcctgatgcccctgacatcatcattcttgtgggagacagcagcctgtatgtggtgtggggcgtggatcgagtgtagctgtgaaatccatatatatgaaatgtcctgcgggatacagtcttagctgacttttttttactctgaactcttatttgaattgttttttgtgcatatatttctgctaccacagagattgtactatacaaataaaaaaattaaaacccaacctcaagctgtcacccttggatgtgtcctgaatctca

SEQ ID NO: 52368 - DNA, 993 bp, Homo sapiens
tcctgggctcaagtgatcctcctgcctcagcctcccaaactgctgggattacagttgtgagccaccatgcctggcctacatcttcatttttaagagaaggcatttcatatttgggggctaaggtttccagtcagatgaggcaaacagcaagagtaagcagtgttacttgcaggtactttggttaatgttgatttaaattttcatgaatgtgctggtgaacactgtgaccaggcttttgtagatggcgatgtgttatagacggtgctcactcccaagggacagcaagtgagcagagatgtactgcaaagtcgccagtcactgctgcaaggtggcctctgcctggggcctccagaagctgctcctttaccctcttggtcccatggctgaagctggagcagcggattgctctggagcagccaaggccgccagcgtgtggagcagagctctcccctcctgctgggcgtgtgtgacactgatgagtttcactgtactgcatgtgacttctcccctgcccttcctcctgatggagtgtgcagacagccatgcgtggccacgggggcagtgtgaggacctccctgtctcccggctcccctcccaggggagccagctgcttgacctagctctttgggcctctcctgccctctgctctgcctggagtgtcggatcctgtgagtaggctgggcctcccctgggcagggttctccaagggcccggtttcccggcccttacctttcctgatgcccctgacatcatcattcttgtgggagacagcagcctgtatgtggtgtggggcgtggatcgagtgtagctgtgaaatccatatatatgaaatgtcctgcgggatacagtcttagctgacttttttttactctgaactcttatttgaattgttttttgtgcatatatttctgctaccacagagattgtactatacaaataaaaaaattaaaacccaacctcaagctgtcacccttggatgtgtcctgaatctca

SEQ ID NO: 52369 - DNA, 2479 bp, Homo sapiens
agcggggcgagggggcgcccggccggactctgagcctagtcctctcgcgctgcggccgcccgcgcctcctcggccgcctgtcgggcatgaaaaccaaattctgcaccgggggcgaggcggagccctcgccgctcgggctgccgctgccccagcccccgccgccgcagccgcccgcagacgagcagccggagccccggacgcggcgcagggcctatctgtggtgcaaggagttcctgcccggcgcctggcggggcctccgcgaggacgagttccacatcagtgtcatcagaggcggccttagcaacatgctgttccagtgctccctacctgacaccacagccacccttggtgatgagcctcggaaagtgctcctgcggctgtatggagcgattttgcagatgaggtcctgtaataaagagggatccgaacaagctcagaaagaaaatgaatttcaaggggctgaggccatggttctggagagcgttatgtttgccattctcgcagagaggtcacttgggccaaaactctatggcatctttccccaaggccgactggagcagttcatcccgagccggcgattagatactgaagaattaagtttgccagatatttctgcagaaatcgccgagaaaatggctacatttcatggtatgaaaatgccattcaataaggaaccaaaatggctttttggcacaatggaaaagtatctaaaggaagtgctgagaattaaatttactgaggaatccagaattaaaaagctccacaaattgctcagttacaatctgcccttggaactggaaaacctgagatcattgcttgaatctactccatctccagttgtattttgtcataatgactgtcaagaaggtaatatcttgttgctggaaggccgagagaattctgaaaaacagaaactgatgctcattgatttcgaatacagcagttacaattacaggggattcgacattggaaatcacttctgtgagtggatgtatgattatagctatgaaaaatacccttttttcagagcaaacatccggaagtatcccaccaagaaacaacagctccattttatttccagttacttgcctgcattccaaaatgactttgaaaacctcagtactgaagaaaaatccattataaaagaagaaatgttgcttgaagttaataggtttgcccttgcatctcatttcctctggggactgtggtccattgtacaagccaagatttcatctattgaatttgggtacatggactacgcccaagcaaggtttgatgcctatttccaccagaagaggaagcttggggtgtgactgtggggaggactccatccacctcatcactggactgcatggggaggcagcagagcggggtcccctctgtgcttcgactactgctcctgtggcaggaggctttgggtggctcactactgaacacatgtgtatgatactaaagacggtattaaaatggagcgacgtttatttcatctcttgtttacgatttcactaggactcagaaacgagatcgggaagcagaaatatagtgcaatagtgcaacatctctgaatccttttaatctagagaaggcatttcatatttgggggctaaggtttccagtcagatgaggcaaacagcaagagtaagcagtgttacttgcaggtactttggttaatgttgatttaaattttcatgaatgtgctggtgaacactgtgaccaggcttttgtagatggcgatgtgttatagacggtgctcactcccaagggacagcaagtgagcagagatgtactgcaaagtcgccagtcactgctgcaaggtggcctctgcctggggcctccagaagctgctcctttaccctcttggtcccatggctgaagctggagcagcggattgctctggagcagccaaggccgccagcgtgtggagcagagctctcccctcctgctgggcgtgtgtgacactgatgagtttcactgtactgcatgtgacttctcccctgcccttcctcctgatggagtgtgcagacagccatgcgtggccacgggggcagtgtgaggacctccctgtctcccggctcccctcccaggggagccagctgcttgacctagctctttgggcctctcctgccctctgctctgcctggagtgtcggatcctgtgagtaggctgggcctcccctgggcagggttctccaagggcccggtttcccggcccttacctttcctgatgcccctgacatcatcattcttgtgggagacagcagcctgtatgtggtgtggggcgtggatcgagtgtagctgtgaaatccatatatatgaaatgtcctgcgggatacagtcttagctgacttttttttactctgaactcttatttgaattgttttttgtgcatatatttctgctaccacagagattgtactatacaaataaaaaaattaaaacccaacctcaagctgtcacccttggatgtgtcctgaatctca

SEQ ID NO: 52370 - DNA, 2780 bp, Homo sapiens
atcctggttatcataaatttgcaatttcattgaggaaagtgatataagtatttcttaatatattaatatatgaaataattttagagactttattaaatacacacagtcctctttatggtagaggaacagttcagcttgagctggtgaccggctgaactagaggggttactctgggaaagtggcgagtcggcagggcatgtctgcacagattttgtgccaggtttcctgcctgcacagcgctttcttctctgtccaagttctgtgctgaccacagctgtccacaggcatgtttacactccctgttcttgcaggttgacttgagagaaccacgtagctaaattggtgagagactcagcctgaccgcttgtctttagaaggcctgattggaagagtgcactctattgactttcctctaacaatgaaattgtgaaaggtacatggggcggctgtgagacgtgcagctatcgggtctcaccggcacatcccttttctcgtaaagcaatgaagcactttctaaggtgttggtactagtgctggaggctgctggtgcattagatgctgcccgtcacatcggtgggctgagaaaccttccttaaagacctgtgatgttttgtaaaccctgactgttctggtggttgcaaagttagtgtctgtttagtgttccccatctcaccagaagtgtttcctttttctcattcatagaggtcctgtaataaagagggatccgaacaagctcagaaagaaaatgaatttcaaggggctgaggccatggttctggagagcgttatgtttgccattctcgcagagaggtcacttgggccaaaactctatggcatctttccccaaggccgactggagcagttcatcccgagccggcgattagatactgaagaattaagtttgccagatatttctgcagaaatcgccgagaaaatggctacatttcatggtatgaaaatgccattcaataaggaaccaaaatggctttttggcacaatggaaaagtatctaaaggaagtgctgagaattaaatttactgaggaatccagaattaaaaagctccacaaattgctcagttacaatctgcccttggaactggaaaacctgagatcattgcttgaatctactccatctccagttgtattttgtcataatgactgtcaagaaggtaatatcttgttgctggaaggccgagagaattctgaaaaacagaaactgatgctcattgatttcgaatacagcagttacaattacaggggattcgacattggaaatcacttctgtgagtggatgtatgattatagctatgaaaaatacccttttttcagagcaaacatccggaagtatcccaccaagaaacaacagctccattttatttccagttacttgcctgcattccaaaatgactttgaaaacctcagtactgaagaaaaatccattataaaagaagaaatgttgcttgaagttaataggtttgcccttgcatctcatttcctctggggactgtggtccattgtacaagccaagatttcatctattgaatttgggtacatggactacgcccaagcaaggtttgatgcctatttccaccagaagaggaagcttggggtgtgactgtggggaggactccatccacctcatcactggactgcatggggaggcagcagagcggggtcccctctgtgcttcgactactgctcctgtggcaggaggctttgggtggctcactactgaacacatgtgtatgatactaaagacggtattaaaatggagcgacgtttatttcatctcttgtttacgatttcactaggactcagaaacgagatcgggaagcagaaatatagtgcaatagtgcaacatctctgaatccttttaatctagagaaggcatttcatatttgggggctaaggtttccagtcagatgaggcaaacagcaagagtaagcagtgttacttgcaggtactttggttaatgttgatttaaattttcatgaatgtgctggtgaacactgtgaccaggcttttgtagatggcgatgtgttatagacggtgctcactcccaagggacagcaagtgagcagagatgtactgcaaagtcgccagtcactgctgcaaggtggcctctgcctggggcctccagaagctgctcctttaccctcttggtcccatggctgaagctggagcagcggattgctctggagcagccaaggccgccagcgtgtggagcagagctctcccctcctgctgggcgtgtgtgacactgatgagtttcactgtactgcatgtgacttctcccctgcccttcctcctgatggagtgtgcagacagccatgcgtggccacgggggcagtgtgaggacctccctgtctcccggctcccctcccaggggagccagctgcttgacctagctctttgggcctctcctgccctctgctctgcctggagtgtcggatcctgtgagtaggctgggcctcccctgggcagggttctccaagggcccggtttcccggcccttacctttcctgatgcccctgacatcatcattcttgtgggagacagcagcctgtatgtggtgtggggcgtggatcgagtgtagctgtgaaatccatatatatgaaatgtcctgcgggatacagtcttagctgacttttttttactctgaactcttatttgaattgttttttgtgcatatatttctgctaccacagagattgtactatacaaataaaaaaattaaaacccaacctcaagctgtcacccttggatgtgtcctgaatctca

SEQ ID NO: 52371 - DNA, 2511 bp, Homo sapiens
atcctggttatcataaatttgcaatttcattgaggaaagtgatataagtatttcttaatatattaatatatgaaataattttagagactttattaaatacacacagtcctctttatggtagaggaacagttcagcttgagctggtgaccggctgaactagaggggttactctgggaaagtggcgagtcggcagggcatgtctgcacagattttgtgccaggtttcctgcctgcacagcgctttcttctctgtccaagttctgtgctgaccacagctgtccacaggcatgtttacactccctgttcttgcaggttgacttgagagaaccacgtagctaaattggtgagagactcagcctgaccgcttgtctttagaaggcctgattggaagagtgcactctattgactttcctctaacaatgaaattgtgaaagaggtcctgtaataaagagggatccgaacaagctcagaaagaaaatgaatttcaaggggctgaggccatggttctggagagcgttatgtttgccattctcgcagagaggtcacttgggccaaaactctatggcatctttccccaaggccgactggagcagttcatcccgagccggcgattagatactgaagaattaagtttgccagatatttctgcagaaatcgccgagaaaatggctacatttcatggtatgaaaatgccattcaataaggaaccaaaatggctttttggcacaatggaaaagtatctaaaggaagtgctgagaattaaatttactgaggaatccagaattaaaaagctccacaaattgctcagttacaatctgcccttggaactggaaaacctgagatcattgcttgaatctactccatctccagttgtattttgtcataatgactgtcaagaaggtaatatcttgttgctggaaggccgagagaattctgaaaaacagaaactgatgctcattgatttcgaatacagcagttacaattacaggggattcgacattggaaatcacttctgtgagtggatgtatgattatagctatgaaaaatacccttttttcagagcaaacatccggaagtatcccaccaagaaacaacagctccattttatttccagttacttgcctgcattccaaaatgactttgaaaacctcagtactgaagaaaaatccattataaaagaagaaatgttgcttgaagttaataggtttgcccttgcatctcatttcctctggggactgtggtccattgtacaagccaagatttcatctattgaatttgggtacatggactacgcccaagcaaggtttgatgcctatttccaccagaagaggaagcttggggtgtgactgtggggaggactccatccacctcatcactggactgcatggggaggcagcagagcggggtcccctctgtgcttcgactactgctcctgtggcaggaggctttgggtggctcactactgaacacatgtgtatgatactaaagacggtattaaaatggagcgacgtttatttcatctcttgtttacgatttcactaggactcagaaacgagatcgggaagcagaaatatagtgcaatagtgcaacatctctgaatccttttaatctagagaaggcatttcatatttgggggctaaggtttccagtcagatgaggcaaacagcaagagtaagcagtgttacttgcaggtactttggttaatgttgatttaaattttcatgaatgtgctggtgaacactgtgaccaggcttttgtagatggcgatgtgttatagacggtgctcactcccaagggacagcaagtgagcagagatgtactgcaaagtcgccagtcactgctgcaaggtggcctctgcctggggcctccagaagctgctcctttaccctcttggtcccatggctgaagctggagcagcggattgctctggagcagccaaggccgccagcgtgtggagcagagctctcccctcctgctgggcgtgtgtgacactgatgagtttcactgtactgcatgtgacttctcccctgcccttcctcctgatggagtgtgcagacagccatgcgtggccacgggggcagtgtgaggacctccctgtctcccggctcccctcccaggggagccagctgcttgacctagctctttgggcctctcctgccctctgctctgcctggagtgtcggatcctgtgagtaggctgggcctcccctgggcagggttctccaagggcccggtttcccggcccttacctttcctgatgcccctgacatcatcattcttgtgggagacagcagcctgtatgtggtgtggggcgtggatcgagtgtagctgtgaaatccatatatatgaaatgtcctgcgggatacagtcttagctgacttttttttactctgaactcttatttgaattgttttttgtgcatatatttctgctaccacagagattgtactatacaaataaaaaaattaaaacccaacctcaagctgtcacccttggatgtgtcctgaatctca

SEQ ID NO: 52372 - DNA, 1860 bp, Homo sapiens
gcggccgcctactactactaaattcgcagccgctcgcacgccattcagtaaggaaccaaaatggcttggtggcacaatgcaaaagtatctaaaggaagtgctgagaattaaatttactgaggaatccagaattaaaaagctccacaaattgctcagttacaatctgcccttggaactggaaaacctgagatcattgcttgaatctactccatctccagttgtattttgtcataatgactgtcaagaaggtaatatcttgttgctggaaggccgagagaattctgaaaaacagaaactgatgctcattgatttcgaatacagcagttacaattacaggggattcgacattggaaatcacttctgtgagtggatgtatgattatagctatgaaaaatacccttttttcagagcaaacatccggaagtatcccaccaagaaacaacagctccattttatttccagttacttgcctgcattccaaaatgactttgaaaacctcagtactgaagaaaaatccattataaaagaagaaatgttgcttgaagttaataggtttgcccttgcatctcatttcctctggggactgtggtccattgtacaagccaagatttcatctattgaatttgggtacatggactacgcccaagcaaggtttgatgcctatttccaccagaagaggaagcttggggtgtgactgtggggaggactccatccacctcatcactggactgcatggggaggcagcagagcggggtcccctctgtgcttcgactactgctcctgtggcaggaggctttgggtggctcactactgaacacatgtgtatgatactaaagacggtattaaaatggagcgacgtttatttcatctcttgtttacgatttcactaggactcagaaacgagatcgggaagcagaaatatagtgcaatagtgcaacatctctgaatccttttaatctagagaaggcatttcatatttgggggctaaggtttccagtcagatgaggcaaacagcaagagtaagcagtgttacttgcaggtactttggttaatgttgatttaaattttcatgaatgtgctggtgaacactgtgaccaggcttttgtagatggcgatgtgttatagacggtgctcactcccaagggacagcaagtgagcagagatgtactgcaaagtcgccagtcactgctgcaaggtggcctctgcctggggcctccagaagctgctcctttaccctcttggtcccatggctgaagctggagcagcggattgctctggagcagccaaggccgccagcgtgtggagcagagctctcccctcctgctgggcgtgtgtgacactgatgagtttcactgtactgcatgtgacttctcccctgcccttcctcctgatggagtgtgcagacagccatgcgtggccacgggggcagtgtgaggacctccctgtctcccggctcccctcccaggggagccagctgcttgacctagctctttgggcctctcctgccctctgctctgcctggagtgtcggatcctgtgagtaggctgggcctcccctgggcagggttctccaagggcccggtttcccggcccttacctttcctgatgcccctgacatcatcattcttgtgggagacagcagcctgtatgtggtgtggggcgtggatcgagtgtagctgtgaaatccatatatatgaaatgtcctgcgggatacagtcttagctgacttttttttactctgaactcttatttgaattgttttttgtgcatatatttctgctaccacagagattgtactatacaaataaaaaaattaaaacccaacctcaagctgtcacccttggatgtgtcctgaatctca

SEQ ID NO: 52373 - DNA, 1894 bp, Homo sapiens
tgaggatccccaactctgccacccacagctcagttaatttttcaaaaaagttaattgtaatcttcctggcttctagaattgcagacttttagattaggagtgggtctttgagattgtgttgtcctcacacaacacaatcccagaaaaatagtggcagaaacagaacaccaagccgggttttctcccttgcctctcagtgtccttcttaaaagtcatgctgcaggagatcccgggaaataggcgatgggcatcctcttctccccttctgttctagactcgcctgtgtcccaggggtcttttgctctaaaaggtgtgttatgtcggtcagtcagtgcccacagcacccagggttagcaaggtgatgaatggtagcagtgctaagcatgtggatgagacgttcatcctgagaggcagggctgggctggcccatgcctataaaccaggcctcctgagaatgaaggtgtgtggggtgggctgggagcttgaggagcctgcacctgtagagcagcgaggcccccgagcagccctgctgcacaggccagtcctgtgcttttggtctcatgggtccgtgccctcagctcttgcctggggtggggattgggggacacatgggcagggttcaggccagcaggattccttgctgaggccttctctttgctgtctcctaggactacgcccaagcaaggtttgatgcctatttccaccagaagaggaagcttggggtgtgactgtggggaggactccatccacctcatcactggactgcatggggaggcagcagagcggggtcccctctgtgcttcgactactgctcctgtggcaggaggctttgggtggctcactactgaacacatgtgtatgatactaaagacggtattaaaatggagcgacgtttatttcatctcttgtttacgatttcactaggactcagaaacgagatcgggaagcagaaatatagtgcaatagtgcaacatctctgaatccttttaatctagagaaggcatttcatatttgggggctaaggtttccagtcagatgaggcaaacagcaagagtaagcagtgttacttgcaggtactttggttaatgttgatttaaattttcatgaatgtgctggtgaacactgtgaccaggcttttgtagatggcgatgtgttatagacggtgctcactcccaagggacagcaagtgagcagagatgtactgcaaagtcgccagtcactgctgcaaggtggcctctgcctggggcctccagaagctgctcctttaccctcttggtcccatggctgaagctggagcagcggattgctctggagcagccaaggccgccagcgtgtggagcagagctctcccctcctgctgggcgtgtgtgacactgatgagtttcactgtactgcatgtgacttctcccctgcccttcctcctgatggagtgtgcagacagccatgcgtggccacgggggcagtgtgaggacctccctgtctcccggctcccctcccaggggagccagctgcttgacctagctctttgggcctctcctgccctctgctctgcctggagtgtcggatcctgtgagtaggctgggcctcccctgggcagggttctccaagggcccggtttcccggcccttacctttcctgatgcccctgacatcatcattcttgtgggagacagcagcctgtatgtggtgtggggcgtggatcgagtgtagctgtgaaatccatatatatgaaatgtcctgcgggatacagtcttagctgacttttttttactctgaactcttatttgaattgttttttgtgcatatatttctgctaccacagagattgtactatacaaataaaaaaattaaaacccaacctcaagctgtcacccttggatgtgtcctgaatctca

SEQ ID NO: 52374 - DNA, 1393 bp, Homo sapiens
gccatggccaggccatctgtgtgtgttcacactcaccagtgcacctgtcactagcagatgaggcaagggtgtgggagtggtattcccattgttcttagttagtcccgtggaatatagacccatgatttgccaacactaactaggtttgcatccacacaagttaaaatgtccatctggcatgaaatcatttcatcagtcctgtaactgatactgtatgtctcttatatgtttcttgcttttatcattccaggtttgcccttgcatctcatttcctctggggactgtggtccattgtacaagccaagatttcatctattgaatttgggtacatggtggctcactactgaacacatgtgtatgatactaaagacggtattaaaatggagcgacgtttatttcatctcttgtttacgatttcactaggactcagaaacgagatcgggaagcagaaatatagtgcaatagtgcaacatctctgaatccttttaatctagagaaggcatttcatatttgggggctaaggtttccagtcagatgaggcaaacagcaagagtaagcagtgttacttgcaggtactttggttaatgttgatttaaattttcatgaatgtgctggtgaacactgtgaccaggcttttgtagatggcgatgtgttatagacggtgctcactcccaagggacagcaagtgagcagagatgtactgcaaagtcgccagtcactgctgcaaggtggcctctgcctggggcctccagaagctgctcctttaccctcttggtcccatggctgaagctggagcagcggattgctctggagcagccaaggccgccagcgtgtggagcagagctctcccctcctgctgggcgtgtgtgacactgatgagtttcactgtactgcatgtgacttctcccctgcccttcctcctgatggagtgtgcagacagccatgcgtggccacgggggcagtgtgaggacctccctgtctcccggctcccctcccaggggagccagctgcttgacctagctctttgggcctctcctgccctctgctctgcctggagtgtcggatcctgtgagtaggctgggcctcccctgggcagggttctccaagggcccggtttcccggcccttacctttcctgatgcccctgacatcatcattcttgtgggagacagcagcctgtatgtggtgtggggcgtggatcgagtgtagctgtgaaatccatatatatgaaatgtcctgcgggatacagtcttagctgacttttttttactctgaactcttatttgaattgttttttgtgcatatatttctgctaccacagagattgtactatacaaataaaaaaattaaaacccaacctcaagctgtcacccttggatgtgtcctgaatctca

SEQ ID NO: 52375 - DNA, 1840 bp, Homo sapiens
tgaggatccccaactctgccacccacagctcagttaatttttcaaaaaagttaattgtaatcttcctggcttctagaattgcagacttttagattaggagtgggtctttgagattgtgttgtcctcacacaacacaatcccagaaaaatagtggcagaaacagaacaccaagccgggttttctcccttgcctctcagtgtccttcttaaaagtcatgctgcaggagatcccgggaaataggcgatgggcatcctcttctccccttctgttctagactcgcctgtgtcccaggggtcttttgctctaaaaggtgtgttatgtcggtcagtcagtgcccacagcacccagggttagcaaggtgatgaatggtagcagtgctaagcatgtggatgagacgttcatcctgagaggcagggctgggctggcccatgcctataaaccaggcctcctgagaatgaaggtgtgtggggtgggctgggagcttgaggagcctgcacctgtagagcagcgaggcccccgagcagccctgctgcacaggccagtcctgtgcttttggtctcatgggtccgtgccctcagctcttgcctggggtggggattgggggacacatgggcagggttcaggccagcaggattccttgctgaggccttctctttgctgtctcctaggactacgcccaagcaaggtttgatgcctatttccaccagaagaggaagcttggggtgtgactgtggggaggactccatccacctcatcactggactgcatggggaggcagcagagcggggtcccctctgtgcttcgactactgctcctgtggcaggaggctttgggtggctcactactgaacacatgtgtatgatactaaagacggtattaacgagatcgggaagcagaaatatagtgcaatagtgcaacatctctgaatccttttaatctagagaaggcatttcatatttgggggctaaggtttccagtcagatgaggcaaacagcaagagtaagcagtgttacttgcaggtactttggttaatgttgatttaaattttcatgaatgtgctggtgaacactgtgaccaggcttttgtagatggcgatgtgttatagacggtgctcactcccaagggacagcaagtgagcagagatgtactgcaaagtcgccagtcactgctgcaaggtggcctctgcctggggcctccagaagctgctcctttaccctcttggtcccatggctgaagctggagcagcggattgctctggagcagccaaggccgccagcgtgtggagcagagctctcccctcctgctgggcgtgtgtgacactgatgagtttcactgtactgcatgtgacttctcccctgcccttcctcctgatggagtgtgcagacagccatgcgtggccacgggggcagtgtgaggacctccctgtctcccggctcccctcccaggggagccagctgcttgacctagctctttgggcctctcctgccctctgctctgcctggagtgtcggatcctgtgagtaggctgggcctcccctgggcagggttctccaagggcccggtttcccggcccttacctttcctgatgcccctgacatcatcattcttgtgggagacagcagcctgtatgtggtgtggggcgtggatcgagtgtagctgtgaaatccatatatatgaaatgtcctgcgggatacagtcttagctgacttttttttactctgaactcttatttgaattgttttttgtgcatatatttctgctaccacagagattgtactatacaaataaaaaaattaaaacccaacctcaagctgtcacccttggatgtgtcctgaatctca

SEQ ID NO: 52376 - DNA, 1755 bp, Homo sapiens
agcggggcgagggggcgcccggccggactctgagcctagtcctctcgcgctgcggccgcccgcgcctcctcggccgcctgtcgggcatgaaaaccaaattctgcaccgggggcgaggcggagccctcgccgctcgggctgccgctgccccagcccccgccgccgcagccgcccgcagacgagcagccggagccccggacgcggcgcagggcctatctgtggtgcaaggagttcctgcccggcgcctggcggggcctccgcgaggacgagttccacatcagtgtcatcagaggcggccttagcaacatgctgttccagtgctccctacctgacaccacagccacccttggtgatgagcctcggaaagtgctcctgcggctgtatggagcgattttgcagatgaggtcctgtaataaagagggatccgaacaagctcagaaagaaaatgaatttcaaggggctgaggccatggttctggagagcgttatgtttgccattctcgcagagaggtcacttgggccaaaactctatggcatctttccccaaggccgactggagcagttcatcccgagccggcgattagatactgaagaattaagtttgccagatatttctgcagaaatcgccgagaaaatggctacatttcatggtatgaaaatgccattcaataaggaaccaaaatggctttttggcacaatggaaaagtatctaaaggaagtgctgagaattaaatttactgaggaatccagaattaaaaagctccacaaattgctcagttacaatctgcccttggaactggaaaacctgagatcattgcttgaatctactccatctccagttgtattttgtcataatgactgtcaagaaggtaatatcttgttgctggaaggccgagagaattctgaaaaacagaaactgatgctcattgatttcgaatacagcagttacaattacaggggattcgacattggaaatcacttctgtgagtggatgtatgattatagctatgaaaaatacccttttttcagagcaaacatccggaagtatcccaccaagaaacaacagctccattttatttccagttacttgcctgcattccaaaatgactttgaaaacctcagtactgaagaaaaatccattataaaagaagaaatgttgcttgaagttaataggtttgcccttgcatctcatttcctctggggactgtggtccattgtacaagccaagatttcatctattgaatttgggtacatggactacgcccaagcaaggtttgatgcctatttccaccagaagaggaagcttggggtgtgactgtggggaggactccatccacctcatcactggactgcatggggaggcagcagagcggggtcccctctgtgcttcgactactgctcctgtggcaggaggctttgggtggctcactactgaacacatgtgtatgatactaaagacggtattaaaatggagcgacgtttatttcatctcttgtttacgatttcactaggactcagaaacgagatcgggaagcagaaatatagtgcaatagtgcaacatctctgaatccttttaatctagagaaggcatttcatatttgggggctaaggtttccagtcagatgaggcaaacagcaaaaaaccagtaatgatccacaccactgcattagtggaagctaccaacatggcggtttgaaaggtgcgtctacccttaaggatattgtctgcctcagtgatgagacgtaaaggatcagcta

SEQ ID NO: 52377 - DNA, 753 bp, Homo sapiens
tcttcctactcccaggtaaaaatgctatagtatttgtgaatgttggcagcaaatgactgttccttacagagggttctctgtctccccaagtacccgaatgtggtgacctggtggcatcaggacagtgtggctcagcccaggaagccgggggagaagccgctgtcactgatgctgtggttgcctttggaggttgccctcacttccaggccagctgaccttgcctcccctgcttcagagaagtgcctgcaatcctgatggggaatgtaggcatctgcaccctcgaagtccagctctgacctcagtcccttctgacacgggacagtaagtgaagaagagtgggtggctcctgcctgtgctgtggaaggttttatttatcggttaccacttcattctccagcctgtagtgcccgactttgggttggaagctggtaattattgaattagacctcctgtttttcataggcatgtttgtaaccaagctaggctgtcatttaattttaaccttaagaattgtcagccgggtacggtggctcacgcctgtaatcccagcacttcgggaggctgaggtgggcagatcacctgaggtcaggagttcgagaccatcctggccaacgtggggaaaccccatctctactaaaaataccaaaattagcatgcatggtggcgggcgcctgtaatcccagctactcaagaggctgaggcaggagaaccgcttgaacccaggaggtgacagaacaagattctgtctctaaa

SEQ ID NO: 52378 - DNA, 553 bp, Homo sapiens
aaatgccatagcaattgctgggtcactgtctgtagggacacagtgtccattcttaagggaatttggggcattgggtgagacttaaatgcactacaaaaacacttctcgttcctaagactgtgtgatctcactctttttagtttacttggtaaatgtcagtttttaactcccttttctttttcagagccggcgattagatactgaagaattaagtttgccagatatttctgcagaaatcgccgagaaaatggctacatttcatggtatgaaaatgccattcaataaggaaccaaaatggctttttggcacaatggaaaagtaagtggtcaaatcacttggtcctaacatagttttacagtggtggctcccagaagtaccataagtgagcatttgtttgccacagtagtcagaggtcttcctagttcactgaagtgcagggtgtcagctggtgatacttgtctcataagtaagtctttcttgtgtgtaaaagtcaattcctaaaccaggaaagaaggcttatgcaaaaatgctattgaacgggtgaagggacaga

SEQ ID NO: 52379 - DNA, 2623 bp, Homo sapiens
agcggggcgagggggcgcccggccggactctgagcctagtcctctcgcgctgcggccgcccgcgcctcctcggccgcctgtcgggcatgaaaaccaaattctgcaccgggggcgaggcggagccctcgccgctcgggctgctgctgagctgcggtagcggcagcgcggccccggcgcccggcgtggggcagcagcgcgacgccgccagcgacctcgagtccaagcagctggcgccaacagccgcgctcgcgctgccccctccgccgccgctgccgctgccgctgccgctgccccagcccccgccgccgcagccgcccgcagacgagcagccggagccccggacgcggcgcagggcctatctgtggtgcaaggagttcctgcccggcgcctggcggggcctccgcgaggacgagttccacatcagtgtcatcagaggcggccttagcaacatgctgttccagtgctccctacctgacaccacagccacccttggtgatgagcctcggaaagtgctcctgcggctgtatggagcgattttgcagatgaggtcctgtaataaagagggatccgaacaagctcagaaagaaaatgaatttcaaggggctgaggccatggttctggagagcgttatgtttgccattctcgcagagaggtcacttgggccaaaactctatggcatctttccccaaggccgactggagcagttcatcccgagccggcgattagatactgaagaattaagtttgccagatatttctgcagaaatcgccgagaaaatggctacatttcatggtatgaaaatgccattcaataaggaaccaaaatggctttttggcacaatggaaaagtatctaaaggaagtgctgagaattaaatttactgaggaatccagaattaaaaagctccacaaattgctcagttacaatctgcccttggaactggaaaacctgagatcattgcttgaatctactccatctccagttgtattttgtcataatgactgtcaagaaggtaatatcttgttgctggaaggccgagagaattctgaaaaacagaaactgatgctcattgatttcgaatacagcagttacaattacaggggattcgacattggaaatcacttctgtgagtggatgtatgattatagctatgaaaaatacccttttttcagagcaaacatccggaagtatcccaccaagaaacaacagctccattttatttccagttacttgcctgcattccaaaatgactttgaaaacctcagtactgaagaaaaatccattataaaagaagaaatgttgcttgaagttaataggtttgcccttgcatctcatttcctctggggactgtggtccattgtacaagccaagatttcatctattgaatttgggtacatggactacgcccaagcaaggtttgatgcctatttccaccagaagaggaagcttggggtgtgactgtggggaggactccatccacctcatcactggactgcatggggaggcagcagagcggggtcccctctgtgcttcgactactgctcctgtggcaggaggctttgggtggctcactactgaacacatgtgtatgatactaaagacggtattaaaatggagcgacgtttatttcatctcttgtttacgatttcactaggactcagaaacgagatcgggaagcagaaatatagtgcaatagtgcaacatctctgaatccttttaatctagagaaggcatttcatatttgggggctaaggtttccagtcagatgaggcaaacagcaagagtaagcagtgttacttgcaggtactttggttaatgttgatttaaattttcatgaatgtgctggtgaacactgtgaccaggcttttgtagatggcgatgtgttatagacggtgctcactcccaagggacagcaagtgagcagagatgtactgcaaagtcgccagtcactgctgcaaggtggcctctgcctggggcctccagaagctgctcctttaccctcttggtcccatggctgaagctggagcagcggattgctctggagcagccaaggccgccagcgtgtggagcagagctctcccctcctgctgggcgtgtgtgacactgatgagtttcactgtactgcatgtgacttctcccctgcccttcctcctgatggagtgtgcagacagccatgcgtggccacgggggcagtgtgaggacctccctgtctcccggctcccctcccaggggagccagctgcttgacctagctctttgggcctctcctgccctctgctctgcctggagtgtcggatcctgtgagtaggctgggcctcccctgggcagggttctccaagggcccggtttcccggcccttacctttcctgatgcccctgacatcatcattcttgtgggagacagcagcctgtatgtggtgtggggcgtggatcgagtgtagctgtgaaatccatatatatgaaatgtcctgcgggatacagtcttagctgacttttttttactctgaactcttatttgaattgttttttgtgcatatatttctgctaccacagagattgtactatacaaataaaaaaattaaaacccaacctcaagctgtcacccttggatgtgtcctgaatctca

SEQ ID NO: 52380 - DNA, 2425 bp, Homo sapiens
agcggggcgagggggcgcccggccggactctgagcctagtcctctcgcgctgcggccgcccgcgcctcctcggccgcctgtcgggcatgaaaaccaaattctgcaccgggggcgaggcggagccctcgccgctcgggctgccgctgccccagcccccgccgccgcagccgcccgcagacgagcagccggagccccggacgcggcgcagggcctatctgtggtgcaaggagttcctgcccggcgcctggcggggcctccgcgaggacgagttccacatcagtgtcatcagaggcggccttagcaacatgctgttccagtgctccctacctgacaccacagccacccttggtgatgagcctcggaaagtgctcctgcggctgtatggagcgattttgcagatgggggctgaggccatggttctggagagcgttatgtttgccattctcgcagagaggtcacttgggccaaaactctatggcatctttccccaaggccgactggagcagttcatcccgagccggcgattagatactgaagaattaagtttgccagatatttctgcagaaatcgccgagaaaatggctacatttcatggtatgaaaatgccattcaataaggaaccaaaatggctttttggcacaatggaaaagtatctaaaggaagtgctgagaattaaatttactgaggaatccagaattaaaaagctccacaaattgctcagttacaatctgcccttggaactggaaaacctgagatcattgcttgaatctactccatctccagttgtattttgtcataatgactgtcaagaaggtaatatcttgttgctggaaggccgagagaattctgaaaaacagaaactgatgctcattgatttcgaatacagcagttacaattacaggggattcgacattggaaatcacttctgtgagtggatgtatgattatagctatgaaaaatacccttttttcagagcaaacatccggaagtatcccaccaagaaacaacagctccattttatttccagttacttgcctgcattccaaaatgactttgaaaacctcagtactgaagaaaaatccattataaaagaagaaatgttgcttgaagttaataggtttgcccttgcatctcatttcctctggggactgtggtccattgtacaagccaagatttcatctattgaatttgggtacatggactacgcccaagcaaggtttgatgcctatttccaccagaagaggaagcttggggtgtgactgtggggaggactccatccacctcatcactggactgcatggggaggcagcagagcggggtcccctctgtgcttcgactactgctcctgtggcaggaggctttgggtggctcactactgaacacatgtgtatgatactaaagacggtattaaaatggagcgacgtttatttcatctcttgtttacgatttcactaggactcagaaacgagatcgggaagcagaaatatagtgcaatagtgcaacatctctgaatccttttaatctagagaaggcatttcatatttgggggctaaggtttccagtcagatgaggcaaacagcaagagtaagcagtgttacttgcaggtactttggttaatgttgatttaaattttcatgaatgtgctggtgaacactgtgaccaggcttttgtagatggcgatgtgttatagacggtgctcactcccaagggacagcaagtgagcagagatgtactgcaaagtcgccagtcactgctgcaaggtggcctctgcctggggcctccagaagctgctcctttaccctcttggtcccatggctgaagctggagcagcggattgctctggagcagccaaggccgccagcgtgtggagcagagctctcccctcctgctgggcgtgtgtgacactgatgagtttcactgtactgcatgtgacttctcccctgcccttcctcctgatggagtgtgcagacagccatgcgtggccacgggggcagtgtgaggacctccctgtctcccggctcccctcccaggggagccagctgcttgacctagctctttgggcctctcctgccctctgctctgcctggagtgtcggatcctgtgagtaggctgggcctcccctgggcagggttctccaagggcccggtttcccggcccttacctttcctgatgcccctgacatcatcattcttgtgggagacagcagcctgtatgtggtgtggggcgtggatcgagtgtagctgtgaaatccatatatatgaaatgtcctgcgggatacagtcttagctgacttttttttactctgaactcttatttgaattgttttttgtgcatatatttctgctaccacagagattgtactatacaaataaaaaaattaaaacccaacctcaagctgtcacccttggatgtgtcctgaatctca

SEQ ID NO: 52381 - DNA, 2320 bp, Homo sapiens
agcagcacatccccgctccacagtcgccgcagctgccgctgccccagcccccgccgccgcagccgcccgcagacgagcagccggagccccggacgcggcgcagggcctatctgtggtgcaaggagttcctgcccggcgcctggcggggcctccgcgaggacgagttccacatcagtgtcatcagaggcggccttagcaacatgctgttccagtgctccctacctgacaccacagccacccttggtgatgagcctcggaaagtgctcctgcggctgtatggagcgattttgcagatgggggctgaggccatggttctggagagcgttatgtttgccattctcgcagagaggtcacttgggccaaaactctatggcatctttccccaaggccgactggagcagttcatcccgagccggcgattagatactgaagaattaagtttgccagatatttctgcagaaatcgccgagaaaatggctacatttcatggtatgaaaatgccattcaataaggaaccaaaatggctttttggcacaatggaaaagtatctaaaggaagtgctgagaattaaatttactgaggaatccagaattaaaaagctccacaaattgctcagttacaatctgcccttggaactggaaaacctgagatcattgcttgaatctactccatctccagttgtattttgtcataatgactgtcaagaaggtaatatcttgttgctggaaggccgagagaattctgaaaaacagaaactgatgctcattgatttcgaatacagcagttacaattacaggggattcgacattggaaatcacttctgtgagtggatgtatgattatagctatgaaaaatacccttttttcagagcaaacatccggaagtatcccaccaagaaacaacagctccattttatttccagttacttgcctgcattccaaaatgactttgaaaacctcagtactgaagaaaaatccattataaaagaagaaatgttgcttgaagttaataggtttgcccttgcatctcatttcctctggggactgtggtccattgtacaagccaagatttcatctattgaatttgggtacatggactacgcccaagcaaggtttgatgcctatttccaccagaagaggaagcttggggtgtgactgtggggaggactccatccacctcatcactggactgcatggggaggcagcagagcggggtcccctctgtgcttcgactactgctcctgtggcaggaggctttgggtggctcactactgaacacatgtgtatgatactaaagacggtattaaaatggagcgacgtttatttcatctcttgtttacgatttcactaggactcagaaacgagatcgggaagcagaaatatagtgcaatagtgcaacatctctgaatccttttaatctagagaaggcatttcatatttgggggctaaggtttccagtcagatgaggcaaacagcaagagtaagcagtgttacttgcaggtactttggttaatgttgatttaaattttcatgaatgtgctggtgaacactgtgaccaggcttttgtagatggcgatgtgttatagacggtgctcactcccaagggacagcaagtgagcagagatgtactgcaaagtcgccagtcactgctgcaaggtggcctctgcctggggcctccagaagctgctcctttaccctcttggtcccatggctgaagctggagcagcggattgctctggagcagccaaggccgccagcgtgtggagcagagctctcccctcctgctgggcgtgtgtgacactgatgagtttcactgtactgcatgtgacttctcccctgcccttcctcctgatggagtgtgcagacagccatgcgtggccacgggggcagtgtgaggacctccctgtctcccggctcccctcccaggggagccagctgcttgacctagctctttgggcctctcctgccctctgctctgcctggagtgtcggatcctgtgagtaggctgggcctcccctgggcagggttctccaagggcccggtttcccggcccttacctttcctgatgcccctgacatcatcattcttgtgggagacagcagcctgtatgtggtgtggggcgtggatcgagtgtagctgtgaaatccatatatatgaaatgtcctgcgggatacagtcttagctgacttttttttactctgaactcttatttgaattgttttttgtgcatatatttctgctaccacagagattgtactatacaaataaaaaaattaaaacccaacctcaagctgtcacccttggatgtgtcctgaatctca

SEQ ID NO: 52382 - DNA, 2235 bp, Homo sapiens
agcggtggtcggtggcgccgggtctgggggccgcgggacagtcagaggcggccttagcaacatgctgttccagtgctccctacctgacaccacagccacccttggtgatgagcctcggaaagtgctcctgcggctgtatggagcgattttgcagatgaggtcctgtaataaagagggatccgaacaagctcagaaagaaaatgaatttcaaggggctgaggccatggttctggagagcgttatgtttgccattctcgcagagaggtcacttgggccaaaactctatggcatctttccccaaggccgactggagcagttcatcccgagccggcgattagatactgaagaattaagtttgccagatatttctgcagaaatcgccgagaaaatggctacatttcatggtatgaaaatgccattcaataaggaaccaaaatggctttttggcacaatggaaaagtatctaaaggaagtgctgagaattaaatttactgaggaatccagaattaaaaagctccacaaattgctcagttacaatctgcccttggaactggaaaacctgagatcattgcttgaatctactccatctccagttgtattttgtcataatgactgtcaagaaggtaatatcttgttgctggaaggccgagagaattctgaaaaacagaaactgatgctcattgatttcgaatacagcagttacaattacaggggattcgacattggaaatcacttctgtgagtggatgtatgattatagctatgaaaaatacccttttttcagagcaaacatccggaagtatcccaccaagaaacaacagctccattttatttccagttacttgcctgcattccaaaatgactttgaaaacctcagtactgaagaaaaatccattataaaagaagaaatgttgcttgaagttaataggtttgcccttgcatctcatttcctctggggactgtggtccattgtacaagccaagatttcatctattgaatttgggtacatggactacgcccaagcaaggtttgatgcctatttccaccagaagaggaagcttggggtgtgactgtggggaggactccatccacctcatcactggactgcatggggaggcagcagagcggggtcccctctgtgcttcgactactgctcctgtggcaggaggctttgggtggctcactactgaacacatgtgtatgatactaaagacggtattaaaatggagcgacgtttatttcatctcttgtttacgatttcactaggactcagaaacgagatcgggaagcagaaatatagtgcaatagtgcaacatctctgaatccttttaatctagagaaggcatttcatatttgggggctaaggtttccagtcagatgaggcaaacagcaagagtaagcagtgttacttgcaggtactttggttaatgttgatttaaattttcatgaatgtgctggtgaacactgtgaccaggcttttgtagatggcgatgtgttatagacggtgctcactcccaagggacagcaagtgagcagagatgtactgcaaagtcgccagtcactgctgcaaggtggcctctgcctggggcctccagaagctgctcctttaccctcttggtcccatggctgaagctggagcagcggattgctctggagcagccaaggccgccagcgtgtggagcagagctctcccctcctgctgggcgtgtgtgacactgatgagtttcactgtactgcatgtgacttctcccctgcccttcctcctgatggagtgtgcagacagccatgcgtggccacgggggcagtgtgaggacctccctgtctcccggctcccctcccaggggagccagctgcttgacctagctctttgggcctctcctgccctctgctctgcctggagtgtcggatcctgtgagtaggctgggcctcccctgggcagggttctccaagggcccggtttcccggcccttacctttcctgatgcccctgacatcatcattcttgtgggagacagcagcctgtatgtggtgtggggcgtggatcgagtgtagctgtgaaatccatatatatgaaatgtcctgcgggatacagtcttagctgacttttttttactctgaactcttatttgaattgttttttgtgcatatatttctgctaccacagagattgtactatacaaataaaaaaattaaaacccaacctcaagctgtcacccttggatgtgtcctgaatctca

SEQ ID NO: 52383 - DNA, 1741 bp, Homo sapiens
ccacgcgtcgcggacgcgtgggtcgacccacgcgtccgcggacgcgtgggttggaactggaaaacctgagatcattgcttgaatctactccatctccagttgtattttgtcataatgactgtcaagaaggtaatatcttgttgctggaaggccgagagaattctgaaaaacagaaactgatgctcattgatttcgaatacagcagttacaattacaggggattcgacattggaaatcacttctgtgagtggatgtatgattatagctatgaaaaatacccttttttcagagcaaacatccggaagtatcccaccaagaaacaacagctccattttatttccagttacttgcctgcattccaaaatgactttgaaaacctcagtactgaagaaaaatccattataaaagaagaaatgttgcttgaagttaataggtttgcccttgcatctcatttcctctggggactgtggtccattgtacaagccaagatttcatctattgaatttgggtacatggactacgcccaagcaaggtttgatgcctatttccaccagaagaggaagcttggggtgtgactgtggggaggactccatccacctcatcactggactgcatggggaggcagcagagcggggtcccctctgtgcttcgactactgctcctgtggcaggaggctttgggtggctcactactgaacacatgtgtatgatactaaagacggtattaaaatggagcgacgtttatttcatctcttgtttacgatttcactaggactcagaaacgagatcgggaagcagaaatatagtgcaatagtgcaacatctctgaatccttttaatctagagaaggcatttcatatttgggggctaaggtttccagtcagatgaggcaaacagcaagagtaagcagtgttacttgcaggtactttggttaatgttgatttaaattttcatgaatgtgctggtgaacactgtgaccaggcttttgtagatggcgatgtgttatagacggtgctcactcccaagggacagcaagtgagcagagatgtactgcaaagtcgccagtcactgctgcaaggtggcctctgcctggggcctccagaagctgctcctttaccctcttggtcccatggctgaagctggagcagcggattgctctggagcagccaaggccgccagcgtgtggagcagagctctcccctcctgctgggcgtgtgtgacactgatgagtttcactgtactgcatgtgacttctcccctgcccttcctcctgatggagtgtgcagacagccatgcgtggccacgggggcagtgtgaggacctccctgtctcccggctcccctcccaggggagccagctgcttgacctagctctttgggcctctcctgccctctgctctgcctggagtgtcggatcctgtgagtaggctgggcctcccctgggcagggttctccaagggcccggtttcccggcccttacctttcctgatgcccctgacatcatcattcttgtgggagacagcagcctgtatgtggtgtggggcgtggatcgagtgtagctgtgaaatccatatatatgaaatgtcctgcgggatacagtcttagctgacttttttttactctgaactcttatttgaattgttttttgtgcatatatttctgctaccacagagattgtactatacaaataaaaaaattaaaacccaacctcaagctgtcacccttggatgtgtcctgaatctca

SEQ ID NO: 52384 - DNA, 410 bp, Homo sapiens
cttttccccaccccacatccaatccatccccaagtcctgtcagctccaactctaaagatatcctcaatccaatcacttttttccaactccattatagccacgacattctaccccccatgatctctctcctggactagtataattgggccagatggattccctgtttctctcttgcctctcaccaacctattcttcaaacaggatccagtattactcaatataaatcagaccatgccattccctatcccaaaattttccaatggtcttccatcaggtttaaagcaaaatctgaacttctcaccatgagctaaaatgtcctgcacaatctggtccctgctaccctctccagcctcctctcctcctactccccccttactcatcctgcaccaaccctgctggcatccttggtc

SEQ ID NO: 52385 - DNA, 352 bp, Homo sapiens
cagcctggctggggggagccagcttgtgatgccaacaaatttgtgcctctattgttgactgggactgattctaatatctatgactatgcctgctttcagttgtcattctcagtttctcccacctgagtcacttgtctatcccaatccagttttccatcccttgggactgcctggcagtaaaaggattattctggtacatttctttcttctgagtctgtttcctgcttcactctctgatcttccagtatactcctgggagttcagtttcctttaaactttgttgagcacattgcattttctgtaccagaaatcattcattcgtttgtcactttctgagaacagactcggtgcc

SEQ ID NO: 52386 - DNA, 449 bp, Homo sapiens
tctatgctcttgaggttacttatgtctattgtatgtgtatagaagaaatactatgtatcagtgggctgtggtacatctctttccaattctacattcaatgacatcacattggtagattgaaatttgacttggtagcagtattgcagtgtggaaataagcaaacgctacaaatctgggcttgatttattgttttgtttattgtccagacgtgagaaagtgatggagaaaatgttaatgatgcagcttaaacttgagatgttttgactgtagctgtgacattgtgaatagcacaaataattgagcaaataatcttccagtatttgaaaactattatcagattcagcaataaagtcattcatatggttgataaatgagtgaagttctcgcatacattctgttgttttactttcgtcttacttattaaagcaaataaaaatatcaaacaatgt

SEQ ID NO: 52387 - DNA, 399 bp, Homo sapiens
agagcaagagatgtgttttatgcttcaatttcttgcacacagcaataagcacagggtttccacatagccagtactcaataaagatttggtgatttggttttcttgaataatatcccctatatagagctccacaatgcacatctgtgtgtcattctttaaaaaaggtaacaccttttgttttcttctgactccatgggcctaaagctatttgcagcaggtgcttaaaaatgatcgtgatataatgataatagcagaagaaaatcaatgcagatatttcaaaatagttgcagcctccaaattacttcttttagaaattggatgcagatgttgctcagttccttttgccagaaatctagcaccagtttcattcatttctctattcctctcatgtgtttttcc

SEQ ID NO: 52388 - DNA, 114 bp, Homo sapiens
tgccaggaggagcaggatgcgtataggaggatccacagccttacacatctggactcagtaaccaagatccataatggctcagatatccagaaccctgaccctgccgtgtaccag

SEQ ID NO: 52389 - DNA, 113 bp, Homo sapiens
gagtctgacgctttcctcgtttgtctcaaccacgctctgagcacagagaaggaggaagtaatggggctgtgcataggggagatatccagaaccctgaccctgccgtgtaccag

SEQ ID NO: 52390 - DNA, 257 bp, Homo sapiens
  misc_feature (2)..(2): n is a, c, g, or t
  misc_feature (5)..(6): n is a, c, g, or t
  misc_feature (8)..(9): n is a, c, g, or t
  misc_feature (13)..(13): n is a, c, g, or t
  misc_feature (242)..(242): n is a, c, g, or t
  misc_feature (244)..(244): n is a, c, g, or t
  misc_feature (248)..(248): n is a, c, g, or t
  misc_feature (252)..(252): n is a, c, g, or t
  misc_feature (256)..(256): n is a, c, g, or t
tnaannanntttnccccagaatgaagagtttcactggatggaacggcagagtcggaggagaattattcctttaatttttatttctgttgatgttgcaattgtttttatgcagtgcaagcaaacatacacacacacacacacacacacacacacacgcatgcaagctgtgaatgtttatgcatactcaggaggaagccttctcagggtcactgtttccggaaactgaccttgaaaacagaccngnattnaaanatcnc

SEQ ID NO: 52391 - DNA, 402 bp, Homo sapiens
ggtagaaaagactatgccaagaaatagagttttgggagcaagaagccccttctaatatatggtttaaaaataaaatatcgaatgattgtgtatgcagtgttgcaaaaattcagatgaacaaagtagataagttgagatatcctttataaccttaacaaaagcaacagtgatgtacctgtttctattaagcaaggaattgagaacctgctttgtctcaggcattctgtcagacaccttttacaggcattatataattcctttaccatgcttatcttttacaaaggagacagttgagtctcaggttatttaatttgcttgggattctggagccaaaagagtgatcattgttcccaggtcttctgactccaaatttcagtcccacccactgccaaggggcttcat

SEQ ID NO: 52392 - DNA, 234 bp, Homo sapiens
aaccaaatggcctccttacagctgttatcacttcttgaaactcttctctgatgaccattcccttggtttgtatcataaccctggggataacttcaccatctcctccttttcttcctgttctaaatgtagccactttgtccatgctctcttttctttatataatgcttccttaataaatcaactgccaccaaagaggaagataaaataaactaatatttatgcacattattatgt

SEQ ID NO: 52393 - DNA, 150 bp, Homo sapiens
gctcagcagctggtcaaaacaaaacatcaaagtcaccattgaaatggggcaaaaaaattaaaaactaatatgctgggacaatgccaaataaaaacgatagtctgataaacattcctcagacacattttgctcataacaactatttccttt

SEQ ID NO: 52394 - DNA, 412 bp, Homo sapiens
gttatttgtgttacagacacttctatgggtacaaaactttccctttggctatctctgataccacaaatgtcattgaaaaggacagatcctagcactaggccatatacattgataggaaccaaagacagatatctgatagattaataaatacaaccacttccaaaggtgatggtatgaagctagattcaaacaacacagtaggccagtgctgtcactcccagctcagaaccattgtggctagaagttagctttgtctttctcctcactgagccatgtgtctcagaccctggggtagagttgagggagggcagacaatggttagtttccaaactccctggacataggggccccttgctgccttctgccttcctccatagagtttagaaggtttgtttccaggaaggagctcctt

SEQ ID NO: 52395 - DNA, 358 bp, Homo sapiens
gttatttgtgttacagacacttctatgggtacaaaactttccctttggctatctctgataccacaaatgtcattgtatctgatagattaataaatacaaccacttccaaaggtgatggtatgaagctagattcaaacaacacagtaggccagtgctgtcactcccagctcagaaccattgtggctagaagttagctttgtctttctcctcactgagccatgtgtctcagaccctggggtagagttgagggagggcagacaatggttagtttccaaactccctggacataggggccccttgctgccttctgccttcctccatagagtttagaaggtttgtttccaggaaggagctcctt

SEQ ID NO: 52396 - DNA, 1551 bp, Homo sapiens
aggttaaaggggggggggctggaaaatgcagacaccaaagacccttcaatatgaggccaagaaaggaaggttcagaacagggaaaaggaaggcttccatgatcctggccacaatcctgtgaattaggttttagtattctcagtctgaagataaggaattattgatacaattcagaaaggtagagcaacttgctttaggtcacacagtgaatgagtagtgcagacaggattcaagtctgcccccttgattctgaagccaaagctctttttcctgcttggtgcaggtgagtgggaggcatggggtggatgagaagcctaggcagaggcttttcctgcatccctcctcagtttccctattcacagatgccggcctccctgtctacctgtatgaatttgagcaccacgctcgtggaataatcgtcaaaccccgcactgatggggcagaccatggggatgagatgtacttcctctttgggggccccttcgccacaggtgcaaaggtcccacctgataccccaactgggtgtccagtctcccacctctggatgcagacccacccctccattggctggccacagggagctcaccagttcctaatctgttatgctctcccaaatgaaagtcttctgctccggaagcagcagaagcagcaggagtagggtgggaggtcagtgtcccctgctctgtccgaaatcccacatcccattctgcccccaggcctttccatgggtaaggagaaggcacttagcctccagatgatgaaatactgggccaactttgcccgcacaggaaaccccaatgatgggaatctgccctgctggccacgctacaacaaggatgaaaagtacctgcagctggattttaccacaagagtgggcatgaagctcaaggagaagaagatggctttttggatgagtctgtaccagtctcaaagacctgagaagcagaggcaattctaagggtggctatgcaggaaggagccaaagaggggtttgcccccaccatccaggccctggggagactagccatggacatacctggggacaagagttctacccaccccagtttagaactgcaggagctccctgctgcctccaggccaaagctagagcttttgcctgttgtgtgggacctgcactgccctttccagcctgacatcccatgatgcccctctacttcactgttgacatccagttaggccaggccctgtcaacaccacactgtgctcagctctccagcctcaggacaacctctttttttcccttcttcaaatcctcccacccttcaatgtctccttgtgactccttcttatgggaggtcgacccagactgccactgcccctgtcactgcacccagcttggcatttaccatccatcctgctcaaccttgtgcctgtctgttcacattggcctggaggcctagggcaggttgtgacatggagcaaacttttggtagtttgggatcttctctcccacccacacttatctcccccagggccactccaaagtctatacacaggggtggtctcttcaataaagaagtgttgattaga

SEQ ID NO: 52397 - DNA, 1350 bp, Homo sapiens
cgctaaaccggcaggcgatgagaaaggaaaccatcactaagatgctctggagtacccgcaccctgttggtgagggacccagctggcaggggtgctcagttcggacagggttgacccccctgttttttttaacctagtagctgctctttgcaaaggggctcccagccagggtaaggatctttcttggagggtctggggtttgctgtgggatcagatgactgcttacaggtaaggtgctcagggtcacaggggcagttatgcagcaaaatcaggggttacaatcagcagagacagaaactttcccaggaagctccctttctccccctcccaggccaaaaactcctggggggctgagcatggatccaagtcactggtgggcccacctctggcccagctggcacccaggcctcaggtaagtgtggcctcctcactcagaatatcaccaaggagcaggtaccacttgtggtggaggagtacctggacaatgtcaatgagcatgactggaagatgctacgaaaccgtatgatggacatagttcaagatgccactttcgtgtatgccacactgcagactgctcactaccaccgagaaaccccaatgatgggaatctgccctgctggccacgctacaacaaggatgaaaagtacctgcagctggattttaccacaagagtgggcatgaagctcaaggagaagaagatggctttttggatgagtctgtaccagtctcaaagacctgagaagcagaggcaattctaagggtggctatgcaggaaggagccaaagaggggtttgcccccaccatccaggccctggggagactagccatggacatacctggggacaagagttctacccaccccagtttagaactgcaggagctccctgctgcctccaggccaaagctagagcttttgcctgttgtgtgggacctgcactgccctttccagcctgacatcccatgatgcccctctacttcactgttgacatccagttaggccaggccctgtcaacaccacactgtgctcagctctccagcctcaggacaacctctttttttcccttcttcaaatcctcccacccttcaatgtctccttgtgactccttcttatgggaggtcgacccagactgccactgcccctgtcactgcacccagcttggcatttaccatccatcctgctcaaccttgtgcctgtctgttcacattggcctggaggcctagggcaggttgtgacatggagcaaacttttggtagtttgggatcttctctcccacccacacttatctcccccagggccactccaaagtctatacacaggggtggtctcttcaataaagaagtgttgattaga

SEQ ID NO: 52398 - DNA, 1411 bp, Homo sapiens
cgctaaaccggcaggcgatgagaaaggaaaccatcactaagatgctctggagtacccgcaccctgttgaatatcaccaaggagcaggtaccacttgtggtggaggagtacctggacaatgtcaatgagcatgactggaagatgctacgaaaccgtatgatggacatagttcaagatgccactttcgtgtatgccacactgcagactgctcactaccaccgagatgccggcctccctgtctacctgtatgaatttgagcaccacgctcgtggaataatcgtcaaaccccgcactgatggggcagaccatggggatgagatgtacttcctctttgggggccccttcgccacaggtgcaaaggtcccacctgataccccaactgggtgtccagtctcccacctctggatgcagacccacccctccattggctggccacagggagctcaccagttcctaatctgttatgctctcccaaatgaaagtcttctgctccggaagcagcagaagcagcaggagtagggtgggaggtcagtgtcccctgctctgtccgaaatcccacatcccattctgcccccaggcctttccatgggtaaggagaaggcacttagcctccagatgatgaaatactgggccaactttgcccgcacaggaaaccccaatgatgggaatctgccctgctggccacgctacaacaaggatgaaaagtacctgcagctggattttaccacaagagtgggcatgaagctcaaggagaagaagatggctttttggatgagtctgtaccagtctcaaagacctgagaagcagaggcaattctaagggtggctatgcaggaaggagccaaagaggggtttgcccccaccatccaggccctggggagactagccatggacatacctggggacaagagttctacccaccccagtttagaactgcaggagctccctgctgcctccaggccaaagctagagcttttgcctgttgtgtgggacctgcactgccctttccagcctgacatcccatgatgcccctctacttcactgttgacatccagttaggccaggccctgtcaacaccacactgtgctcagctctccagcctcaggacaacctctttttttcccttcttcaaatcctcccacccttcaatgtctccttgtgactccttcttatgggaggtcgacccagactgccactgcccctgtcactgcacccagcttggcatttaccatccatcctgctcaaccttgtgcctgtctgttcacattggcctggaggcctagggcaggttgtgacatggagcaaacttttggtagtttgggatcttctctcccacccacacttatctcccccagggccactccaaagtctatacacaggggtggtctcttcaataaagaagtgttgattaga

SEQ ID NO: 52399 - DNA, 804 bp, Homo sapiens
agtgcttctccttacccatgaagatggctgtggcgaaggggaaaaccccaatgatgggaatctgccctgctggccacgctacaacaaggatgaaaagtacctgcagctggattttaccacaagagtgggcatgaagctcaaggagaagaagatggctttttggatgagtctgtaccagtctcaaagacctgagaagcagaggcaattctaagggtggctatgcaggaaggagccaaagaggggtttgcccccaccatccaggccctggggagactagccatggacatacctggggacaagagttctacccaccccagtttagaactgcaggagctccctgctgcctccaggccaaagctagagcttttgcctgttgtgtgggacctgcactgccctttccagcctgacatcccatgatgcccctctacttcactgttgacatccagttaggccaggccctgtcaacaccacactgtgctcagctctccagcctcaggacaacctctttttttcccttcttcaaatcctcccacccttcaatgtctccttgtgactccttcttatgggaggtcgacccagactgccactgcccctgtcactgcacccagcttggcatttaccatccatcctgctcaaccttgtgcctgtctgttcacattggcctggaggcctagggcaggttgtgacatggagcaaacttttggtagtttgggatcttctctcccacccacacttatctcccccagggccactccaaagtctatacacaggggtggtctcttcaataaagaagtgttgattaga

SEQ ID NO: 52400 - DNA, 1978 bp, Homo sapiens
aggttaaaggggggggggctggaaaatgcagacaccaaagacccttcaatatgaggccaagaaaggaaggttcagaacagggaaaaggaaggcttccatgatcctggccacaatcctgtgaattaggttttagtattctcagtctgaagataaggaattattgatacaattcagaaaggtagagcaacttgctttaggtcacacagtgaatgagtagtgcagacaggattcaagtctgcccccttgattctgaagccaaagctctttttcctgcttggtgcaggtgagtgggaggcatggggtggatgagaagcctaggcagaggcttttcctgcatccctcctcagtttccctattcacagatgccggcctccctgtctacctgtatgaatttgagcaccacgctcgtggaataatcgtcaaaccccgcactgatggggcagaccatggggatgagatgtacttcctctttgggggccccttcgccacaggtgcaaaggtcccacctgataccccaactgggtgtccagtctcccacctctggatgcagacccacccctccattggctggccacagggagctcaccagttcctaatctgttatgctctcccaaatgaaagtcttctgctccggaagcagcagaagcagcaggagtagggtgggaggtcagtgtcccctgctctgtccgaaatcccacatcccattctgcccccaggcctttccatgggtaaggagaaggcacttagcctccagatgatgaaatactgggccaactttgcccgcacaggaaaccccaatgatgggaatctgccctgctggccacgctacaacaaggatgaaaagtacctgcagctggattttaccacaagagtgggcatgaagctcaaggagaagaagatggctttttggatgagtctgtaccagtctcaaagacctgagaagcagaggcaattctaagggtggctatgcaggaaggagccaaagaggggtttgcccccaccatccaggccctggggagactagccatggacatacctggggacaagagttctacccaccccagtttagaactgcaggagctccctgctgcctccaggccaaagctagagcttttgcctgttgtgtgggacctgcactgccctttccagcctgacatcccatgatgcccctctacttcactgttgacatccagttaggccaggccctgtcaacaccacactgtgctcagctctccagcctcaggacaacctctttttttcccttcttcaaatcctcccacccttcaatgtctccttgtgactccttcttatgggaggtcgacccagactgccactgcccctgtcactgcacccagcttggcatttaccatccatcctgctcaaccttgtgcctgtctgttcacattggcctggaggcctagggcaggttgtgacatggagcaaacttttggtagtttgggatcttctctcccacccacacttatctcccccagggccactccaaagtctatacacaggggtggtctcttcaataaagaagtgttgattagacctgaatttctccacctataaaatgggtgtgtgaagtgaatgatgtctcaatttgagccctgagagaaaggaagtattgctgcctgttccttagtgggctgtgcctggatgctacactcagtcaaagggtgctactgcaaagttgcctggggtacaaaacacttgccttttgccttcatggtctcaagtgcacccctcaggacagccacaccccacgctcacttgtccatcagtttaggtcttagtgccacatctagattcctctggcctctcctgcagcccgtgtgtatcccagcctgggtgacagagtgagaccctctctaccgccttggcctccataagtgctggaattacaggcacaagctaactgctcggcccctatgcctatttcgatgctcctgaataaagtctgctttactgagcttta

SEQ ID NO: 52401 - DNA, 1585 bp, Homo sapiens
cgctaaaccggcaggcgatgagaaaggaaaccatcactaagatgctctggagtacccgcaccctgttggtgagggacccagctggcaggggtgctcagttcggacagggttgacccccctgttttttttaacctagtagctgctctttgcaaaggggctcccagccagggtaaggatctttcttggagggtctggggtttgctgtgggatcagatgactgcttacaggtaaggtgctcagggtcacaggggcagttatgcagcaaaatcaggggttacaatcagcagagacagaaactttcccaggaagctccctttctccccctcccaggccaaaaactcctggggggctgagcatggatccaagtcactggtgggcccacctctggcccagctggcacccaggcctcaggtaagtgtggcctcctcactcagaatatcaccaaggagcaggtaccacttgtggtggaggagtacctggacaatgtcaatgagcatgactggaagatgctacgaaaccgtatgatggacatagttcaagatgccactttcgtgtatgccacactgcagactgctcactaccaccgagatgccggcctccctgtctacctgtatgaatttgagcaccacgctcgtggaataatcgtcaaaccccgcactgatggggcagaccatggggatgagatgtacttcctctttgggggccccttcgccacaggtgcaaaggtcccacctgataccccaactgggtgtccagtctcccacctctggatgcagacccacccctccattggctggccacagggagctcaccagttcctaatctgttatgctctcccaaatgaaagtcttctgctccggaagcagcagaagcagcaggagtagggtgggagaaaccccaatgatgggaatctgccctgctggccacgctacaacaaggatgaaaagtacctgcagctggattttaccacaagagtgggcatgaagctcaaggagaagaagatggctttttggatgagtctgtaccagtctcaaagacctgagaagcagaggcaattctaagggtggctatgcaggaaggagccaaagaggggtttgcccccacactccaaagtctatacacaggggtggtctcttcaataaagaagtgttgattagacctgaatttctccacctataaaatgggtgtgtgaagtgaatgatgtctcaatttgagccctgagagaaaggaagtattgctgcctgttccttagtgggctgtgcctggatgctacactcagtcaaagggtgctactgcaaagttgcctggggtacaaaacacttgccttttgccttcatggtctcaagtgcacccctcaggacagccacaccccacgctcacttgtccatcagtttaggtcttagtgccacatctagattcctctggcctctcctgcagcccgtgtgtatcccagcctgggtgacagagtgagaccctctctaccgccttggcctccataagtgctggaattacaggcacaagctaactgctcggcccctatgcctatttcgatgctcctgaataaagtctgctttactgagcttta

SEQ ID NO: 52402 - DNA, 1265 bp, Homo sapiens
cgctaaaccggcaggcgatgagaaaggaaaccatcactaagatgctctggagtacccgcaccctgttggtgagggacccagctggcaggggtgctcagttcggacagggttgacccccctgttttttttaacctagtagctgctctttgcaaaggggctcccagccagggtaaggatctttcttggagggtctggggtttgctgtgggatcagatgactgcttacaggtaaggtgctcagggtcacaggggcagttatgcagcaaaatcaggggttacaatcagcagagacagaaactttcccaggaagctccctttctccccctcccaggccaaaaactcctggggggctgagcatggatccaagtcactggtgggcccacctctggcccagctggcacccaggcctcaggtaagtgtggcctcctcactcagaatatcaccaaggagcaggtaccacttgtggtggaggagtacctggacaatgtcaatgagcatgactggaagatgctacgaaaccgtatgatggacatagttcaagatgccactttcgtgtatgccacactgcagactgctcactaccaccgagatgccggcctccctgtctacctgtatgaatttgagcaccacgctcgtggaataatcgtcaaaccccgcactgatggggcagaccatggggatgagatgtacttcctctttgggggccccttcgccacaggtgcaaaggtcccacctgataccccaactgggtgtccagtctcccacctctggatgcagacccacccactccaaagtctatacacaggggtggtctcttcaataaagaagtgttgattagacctgaatttctccacctataaaatgggtgtgtgaagtgaatgatgtctcaatttgagccctgagagaaaggaagtattgctgcctgttccttagtgggctgtgcctggatgctacactcagtcaaagggtgctactgcaaagttgcctggggtacaaaacacttgccttttgccttcatggtctcaagtgcacccctcaggacagccacaccccacgctcacttgtccatcagtttaggtcttagtgccacatctagattcctctggcctctcctgcagcccgtgtgtatcccagcctgggtgacagagtgagaccctctctaccgccttggcctccataagtgctggaattacaggcacaagctaactgctcggcccctatgcctatttcgatgctcctgaataaagtctgctttactgagcttta

SEQ ID NO: 52403 - DNA, 491 bp, Homo sapiens
ggattccccgggctgcacgattcggcacgagaagctccctttctccccctcccaggccaaaaactcctggggggctgagcatggatccaagtcactggtgggcccacctctggcccagctggcacccaggcctcaggtaagtgtggcctcctcactcagaatatcaccaaggagcaggtaccacttgtggtggaggagtacctggacaatgtcaatgagcatgactggaagatgctacgaaaccgtatgatggacatagttcaagatgccactttcgtgtatgccacactgcagactgctcactaccaccgaggtatgcagggtccccaagagtggccacactggccccgtccactctccaggtgtgctgtttaccaactgggcttatcgactgctcccctaccctctctgtacttctgggctagtataggattctaagatatcacagaggaggcagcatgctatcaactacaagagaggaaggggccagg

SEQ ID NO: 52404 - DNA, 1552 bp, Homo sapiens
cgctaaaccggcaggcgatgagaaaggaaaccatcactaagatgctctggagtacccgcaccctgttggtgagggacccagctggcaggggtgctcagttcggacagggttgacccccctgttttttttaacctagtagctgctctttgcaaaggggctcccagccagggtaaggatctttcttggagggtctggggtttgctgtgggatcagatgactgcttacaggtaaggtgctcagggtcacaggggcagttatgcagcaaaatcaggggttacaatcagcagagacagaaactttcccaggaagctccctttctccccctcccaggccaaaaactcctggggggctgagcatggatccaagtcactggtgggcccacctctggcccagctggcacccaggcctcaggtaagtgtggcctcctcactcagaatatcaccaaggagcaggtaccacttgtggtggaggagtacctggacaatgtcaatgagcatgactggaagatgctacgaaaccgtatgatggacatagttcaagatgccactttcgtgtatgccacactgcagactgctcactaccaccgagatgccggcctccctgtctacctgtatgaatttgagcaccacgctcgtggaataatcgtcaaaccccgcactgatggggcagaccatggggatgagatgtacttcctctttgggggccccttcgccacaggcctttccatgggtaaggagaaggcacttagcctccagatgatgaaatactgggccaactttgcccgcacaggaaaccccaatgatgggaatctgccctgctggccacgctacaacaaggatgaaaagtacctgcagctggattttaccacaagagtgggcatgaagctcaaggagaagaagatggctttttggatgagtctgtaccagtctcaaagacctgagaagcagaggcaattctaagggtggctatgcaggaaggagccaaagaggggtttgcccccaccatccaggccctggggagactagccatggacatacctggggacaagagttctacccaccccagtttagaactgcaggagctccctgctgcctccaggccaaagctagagcttttgcctgttgtgtgggacctgcactgccctttccagcctgacatcccatgatgcccctctacttcactgttgacatccagttaggccaggccctgtcaacaccacactgtgctcagctctccagcctcaggacaacctctttttttcccttcttcaaatcctcccacccttcaatgtctccttgtgactccttcttatgggaggtcgacccagactgccactgcccctgtcactgcacccagcttggcatttaccatccatcctgctcaaccttgtgcctgtctgttcacattggcctggaggcctagggcaggttgtgacatggagcaaacttttggtagtttgggatcttctctcccacccacacttatctcccccagggccactccaaagtctatacacaggggtggtctcttcaataaagaagtgttgattaga

SEQ ID NO: 52405 - DNA, 465 bp, Homo sapiens
gatccaggcgtgcctcgtgcctgtcctggcctggtctttgctgtgactctttgcacacttgtatctccaccccctactgagagtttctctctggatccctaacaaaacccagcttacgcctcatacacagcaggggcataataagcaatgatggcatgagttggcaaggccttctcactactcattccctggacatggttcctgcttctgcctctctgtgcttcagagatagccccacacaatgcacccctttcctggagggcgtgggccacctgcacacccttctgagcctggaagatggcatgcgctttcaaagagccgaaactgagaggaggcatggggaggtgaccctggcatcctgcttccccactgcatcccaacacatatgaccttgatttggagaagcggtgagctggaccaggactgcctgtaggcctggctccagccctagatgtcagccacttc

SEQ ID NO: 52406 - DNA, 441 bp, Homo sapiens
acaataacatgtaatgatctatgatgatgcaaacactctatacttgtaaaatgatttaaaatttcccacttgttaactgaaggatgtacgcggtggtagagacatgtatgtctctattcttttaaatctgaaagcattatctaaaacccaatcatcatatacctgtagggaaaaagcctaacacagccatatccaaaagtcatagtccgtcagaagtatgttaaatgttataaaattacttgacctcagcatttctgagttttggtgttttcaatttataatataataggtggttggtttattttaaccaaacttaaaaagcaatgatgcctgcaaagcctctgattggaccaaaagtcaccatttatactctgacattgaggccaggcacgctaactcacacctgtaatcccaacaatttgggaggccaaggtgagagga

SEQ ID NO: 52407 - DNA, 200 bp, Homo sapiens
taaaatcattttttgtctaaatataatcttcacacatgattaaaatttttactaggtgaagaattactaattggaaacaatttcctctgagaatgttgaaagcattattccgatgtgttgttgcttctagtgttgctttagaaatgtctgatttctaattttctacatgtaacttttatctgcaaggttttctcttggcc

SEQ ID NO: 52408 - DNA, 358 bp, Homo sapiens
aaacacacacatccacagatttatatgcgggagagaagatgtggtccctggcctctaggctctctcagtctgtggcaagacagacagacatgtgcacgcggcactgtaaggttgagcacagtctaagtactcagcatggtctctggcacatagtaggtgcccaagaaatacatgtcgaatgaattgagggggtaaggccttctagggcaggtggcctctgacctcagccttcagtgttccgtaggtggaattatctgccagagacgtggcaaaagggagaggaaccaagactgaggcacagaggttcaaacgtacccggcacattcagagaatccttttcagaatcacgtccccaaga

SEQ ID NO: 52409 - DNA, 304 bp, Homo sapiens
ttgatatgtatgtgtatgtatatgtacatgtgcatatatttctgtttgtgtgtgtgtatatgtgcatgtgtgcatgcgtgtgtgtgtgtttccttattcaatttcctgcctcagcctctctggtagctgggattacaggactaccgtgaggatggattggacattacaccacactggaaaagtgaaacatctcattcagttggtgatcttcctgtcatgaaagttgcttgacagctctaattacgaattgaacacattaaacacctggtgaaattatcaattaaaaacatctagtcaccataaa

SEQ ID NO: 52410 - DNA, 299 bp, Homo sapiens
atcccagcactttgggaggctgaggtgggcagatcacctgaggtcgagagtttgagaccagcctgaccaacatggagaaaccccatctctactaaaaatagaaaatcagcctctctggtagctgggattacaggactaccgtgaggatggattggacattacaccacactggaaaagtgaaacatctcattcagttggtgatcttcctgtcatgaaagttgcttgacagctctaattacgaattgaacacattaaacacctggtgaaattatcaattaaaaacatctagtcaccataaa

SEQ ID NO: 52411 - DNA, 2103 bp, Homo sapiens
gggatgtctctcccaagattccaaagagtaaactttgggccatatgataattacattccagtcagtgaattaagcaaaaaatcatggaatcagcaacactttgccctgttatttcccaaaccacaacggccaggaaccaaaaggagatcaaaaccttctcaaatacgggacaacacggtttctataattgatgaagaacaattaagaggagatcgtagacaaccattatggatgtaccgttctttaatgagaatttctgagagaccatctgtttatttagctgccaggaggcagcctctcaaaccaactcgtactgtcgaggtggattctaaagcagcagaaattggtaagaaaggtgaagacaagacaacacagaaggacacaacagattcggaatcagaattaaaacaaggaaaaaaagattcaaagaaaggcaaggatatagagaaaggaaaagaagaaaagctagatgcaaagaaagatagcaaaaaaggtaaaaaggatgcagagaagggcaaagactcagcaacagaatctgaagatgaaaaaggaggtgcaaagaaagataacaaaaaagataaaaaggattcaaacaaaggcaaagactcggcaacagaatctgaaggtgaaaaaggaggtacagagaaagatagcaaaaaaggtaaaaaggattcaaagaagggcaaggattcagccatagaattacaagctgtaaaagcagatgaaaagaaggatgaggatggaaaaaaagatgcaaacaaaggtgatgaatcgaaggatgccaagaaagatgcaaaggagattaaaaaaggtaagaaagataagaagaagcccagtagtacagacagtgactcaaaggatgatgtcaagaaagagtctaagaaggacgccacgaaagatgccaagaaagttgccaagaaagatactgagaaagaatctgctgattcaaagaaggatgcaaagaaaaatgctaagaaggatgcaaagaaggatgcaaagaagaatgcaaagaaggatgaaaagaaggatgcaaagaagaagggcaagtaggccttggataagaatttgaaccgaaagaataattcaaaagcatatttgatgaaacaatagtggtagtctgcagctgaatttgtgagaaaacaagaggcctcaaagaattaaataatttttaaaaggtggtaaagaaggatacaaaggagaactcagcagagatttataaaaatatataagaaagatgttaagaaaaattaaggggggatccattgaaagacttgaagaatacatatacttatattcggggatatgaaggattcaatgaatgatctctagaaagatttaaagaagaatattcagataaggatgttgaagataatgacactaaatctatggacacacacacacacacacacacacacacacacacacacacacacacacacagtttaatgaaggcttaaagaatccaaggagacagatgttgtatctatagatttaaaataatctcaagctgcatccacagatacaaaaaaatataggagccatgaaatgaagttaaacaccttgtagaaagcctactttcaagtaaatatagcattcctttggcaaaaaaaaaaaaaaaagtaaaagaaaagaaaaaaaatgtattaccacccgatgagcctacatctttctttctgaagtttaaacaaccacagtcatgtttatggttgttggatgtgccacttccaatccaaaagaagcacacttgtctcgctctgttgccctggctggagttcagtgacatgatctcaggcttactacagcctccaccttcaggttcaagtgattctcctgcctcagcctctctggtagctgggattacagggaaggaaaatagctggcatttcttgctggagaaagttatcacaagtggaaaggttaccctagaaacaaaagatgactaccgtgaggatggattggacattacaccacactggaaaagtgaaacatctcattcagttggtgatcttcctgtcatgaaagttgcttgacagctctaattacgaattgaacacattaaacacctggtgaaattatcaattaaaaacatctagtcaccataaa

SEQ ID NO: 52412 - DNA, 262 bp, Homo sapiens
catctctacaaaaaataaaaaaattagctgggtgtcgtagtgtgcgtctcaggaggcagaagtgggaggactgcttgggcccgagaggttgaggctgcagtgagccaagatcatgccactgcactctagcctgggcaacagagtgagactctttttcaaaaatacaaaataaaaaagaaaaaaagaaagaaaagactatactccaggactgctaatttttaaaataaactgatatagaaaagtaaaaactcggaaggttaat

SEQ ID NO: 52413 - DNA, 190 bp, Homo sapiens
ttacagttgtgagccatcacgcccggccttttttgatatttctaaactatgtagttcattgtaatatttttcaaattgtctcagatctcaaaaaaactttagaatatatttattgaaaaaaatctgcacataagtggtactatgcagttcaaacccatgtcattcaacagtcaactgtattgtatactca

SEQ ID NO: 52414 - DNA, 221 bp, Homo sapiens
ttttaacttgttctttcaaatcaagcttggggaagagaaaaatacatccttgccattgtctctgagagatttaaaattgactccactagtagctcagggatggacatggcagcagggattggtgtaagattccactcttctgctagttaaattgggcctggaaccactacagaaattccatccactactttgagaacaacagtccccagcccaggctttct

SEQ ID NO: 52415 - DNA, 437 bp, Homo sapiens
aggtgatacccccgccttggccacccaaagttctgggattataggtgtgagccaccataccccaccacagatgccctattcttttacagaaaaagtctggagggagctcccatcccttctacttatgtcctatgagctggaatttagttgcatgtcttatctagctgctagggagaactgagaatttattactagtagtgtgccacagttcagttcagagctctgaaactgactaaaaatgaaaacatttttaataggggtttcattctcagtgccccagttttgctgtttatgtagtattatctcaaagctattggatgagttaatgcaggtaaaagtacttagtacctggcacaaagtaagccttcagtaagtgctctaaatatcactatcttcatctttgtgacctgatagcaacagtgacagcaatccatagt

SEQ ID NO: 52416 - DNA, 157 bp, Homo sapiens
atggttaaattttaaaggatagcaacaaattgggggcattttttaacaatattatttgggctattctattacttgccgcataaatacatttaccttatctacagagcttggaaagacactgatgctgaggataatttcaaacaggaagtagaataca

SEQ ID NO: 52417 - DNA, 289 bp, Homo sapiens
taataatatggggtttttgtttttgcattttttttttgtggtgattattacttcatagcaaacttctctctgctggtgttttgctgttttgcttatctccactggggctgggttataatagcttggagatgtttgtttcctgtttgtggaatgtctgactttccagctcactttgcccacaggtttgaggctgatagattccaggaaaataggaagaattccattcaaaataccataaaaatggagcaggctacaagacttttgagataacactactgttaaatttttt

SEQ ID NO: 52418 - DNA, 441 bp, Homo sapiens
gctatgaggccaacgaggccaatgatttattgattgagaaataaagggaattcctctctgtcttcttctaaatgatcggtttccaacttctaaacactcccagatgtggaatgcatgtttcttccttccattcctctctgcaggctgccctgacatttgttaaattggctcctgggtcctggtttgcaaatgttgccactttgagatccgtagatggtcatccctggctcccttggggaatgtcctggaatccaccagctccatctgctcgacaagagacttgagtttgttctgttacctctttcatcattagccaaagctccgggacttggttaaaactttaggcaattaaaaagactgacttatggagatagtagtgttttcactatatcgtccctgcttgaatttatgttcttgaattccattaacctgaaatatatc

SEQ ID NO: 52419 - DNA, 490 bp, Homo sapiens
gctatgaggccaacgaggccaatgatttattgattgagaaataaagggaattcctctctgtcttcttctaaatgatcggtttccaacttctaaacactcccagatgtggaatgcatgtttcttccttccattcctctctgcaggctgccctgacatttgttaaattggctcctgggtcctggtttgcaaatgttgccactttgagatccgtagatggtcatccctggctcccttggggaatgtcctggaatccaccagctccatctgctcgacaagagacttgagtttgttctgttacctctttcatcattagccaaagctccgggacttggttaaaactttaggcaattaaaaagactgacttatggagatagtagtgttttcactatatcgtccctgcttgaatttatgttcttgaattggtctttcacacgtaaaccccgcggggcggggcgtgctacgtgtgggtgtgagattgattacactgtcc

SEQ ID NO: 52420 - DNA, 872 bp, Homo sapiens
agcactggaattccaggcataagccaccgtgcctggccaagaacgtttttttttttaacaagtttctaaatgatgctggtctattggtcctgggaccacactttgaaattggtgggataggaggctgggatctttatccattcactcaactcccattccccatggttgaaagtttccctggggcatccctgggaggcctgggggctgacaagattcaaacgttttggtgaaaagccccaagacagtgaagtggggtgtgcttgaagtggggcaccgtcatcacccacctacccaccacagaggtgagctaaaaggttaccagaccggagcctccagcaatccaggagcacaaacaaggatgccttaaaacaaaacttgtgtcagggtacccttcgctgcctcagaggaaatcagaatgacctggtggacaactgttcataaggacaagagccagtatcactgcctttgagtcccagcctcctcaaatccattttctgccctgcaccacctcatcatatcccggatattgttagtgtcgtgtcatttcatgactcaggagctgcgggtgactttggctgccctgacatttgttaaattggctcctgggtcctggtttgcaaatgttgccactttgagatccgtagatggtcatccctggctcccttggggaatgtcctggaatccaccagctccatctgctcgacaagagacttgagtttgttctgttacctctttcatcattagccaaagctccgggacttggttaaaactttaggcaattaaaaagactgacttatggagatagtagtgttttcactatatcgtccctgcttgaatttatgttcttgaattccattaacctgaaatatatc

SEQ ID NO: 52421 - DNA, 328 bp, Homo sapiens
cttttttcatgttttggatcatgagaaggggtgaaagttggattctaggagataatcggcccagaattttaactaaggtgtggaatgaagcagtcttctctcactagattttgcttgccctaaagatgcaacatctgccctgtaaacacaaatgcagcatgcatggcaagccctggagtgacgcctcaagttggagaccatagaatactagagaggcacacccaaacctttgaattccctccagccctggggatctcctgaaagggcatattctgattggggactgggctggggttcaagattctgcatctctcagcagctcccaggg

SEQ ID NO: 52422 - DNA, 439 bp, Homo sapiens
catttattgaccagtgctgtgtgttcacaactgtatttagactagtggtatagcagtgcagtagtctgaaaacattttctcatctgtaaacaaagacagtcatacctcctaggactgcaagaagtcactgaacatatacctggcccttagtgtacacattactaaagagaataagatgtggtctgcaccctctcatgcaccagtggcttcttgagcagtatgatagagagagacagctgagatttagtggaaaaacacaaggcttagaattgggagagctgggttcaagccccagctttgccactaaatggctgtgtagtcttgaacaagtcacctgccctctctgagctataatttgaaatagacttagcttaagcaacaggaaagcagtaatgagctagaagataggctcactcagggggagaggggagctgctgca

SEQ ID NO: 52423 - DNA, 533 bp, Homo sapiens
taccattccaatttgaaatggactgtgtacacgcttcatttagtacttttgtaaactgtgtttgtgatctgacagcagcctgtgaaattcataagaatcacataggatgtaaatctccatgatgtatgccaattacagaaattaggttggtctgtgtctttgttactaacaaaaatagctatagcagtggccttcagagatgtagagtctggaaaaacttgatcttaatgtcaggttctggcactgcttttacagttatagccctgatgagagctatcagtagggaaaataatttatgggagaaatttaattttgctaaaagagataaaagtttatgctcataaccctaatgtagtttttatccattatgaggccacaaactctttgagaatctgctgaaatctctattaagaaactgccaaagagcatacacaaaatttgcatgcaatttcagggaaggtcttcaccccagttcccacactaccccctatcctccattattccctcagacttagaatgtcagtcctaataga

SEQ ID NO: 52424 - DNA, 258 bp, Homo sapiens
aaatttctctaagcaagcctcatgggagattctccaagaacacctttaacaacagaatttcccctagaaatgccacatcgaaagtcatattcccagtggagatttctatgggaattgggaagttaactagatttgctgttttcacacctgctgagggttttgagtctagggaattaagtttgtcatagctagacattttacctttgccaaaccagtctattgtatgaaacctaagttgccatcaaaagctggaaagga

SEQ ID NO: 52425 - DNA, 538 bp, Homo sapiens
cgagattgttgttggctgaacatcttttaattctgagttaccaacacgttgtgcgtgcattgatgacccggcttcctggcctgcccttggtgcctgagccccagtaatgattgccctctatgttgggagaagaagggagaaagtagtacaagtagtgaagaaaaaaatgtaggtggtgttggtggttgagagtacatggcacagaaaataaaggagccaggattacctgtgcctttggcttctccttcccctgctgctttttcttcctttttccatgtcagtgcttgggaaccctcacaactggcaggtaacggggtcgggataaaatgtaaacctgtgggtgtcttctgctgagtcattaggatctttgtagcaggctgcggataaatatgtggatgacatggggcaactaagagccccttttgcttgccacctcccacccctgctctggatggtgtctcctcttgctagactgccgggtacagatcacgtggcaattaaggcaaatgttaataaataccatgaaacagtgagtttg

SEQ ID NO: 52426 - DNA, 144 bp, Homo sapiens
gggagagggaggagtcagataactcagaatttctagcagacccagtgggtggatagtaatgccatcattgagatatggaggacactggaagagagccaggtttgggggaagagggtaatttcaatttgaacacgttaagtttaa

SEQ ID NO: 52427 - DNA, 653 bp, Homo sapiens
actttgaagatgaatgtgagatattttaagagataaatcatagcaattgaaaagacataattttaaattctgagctaaaattcatttaaaattagaaaattaaacaatactctaatttaactaaaaactctataattttcaaaaataaagcccaaaatagaaatgtaggaaaaagatcctttgctactgttaaaaaaaaaaaccccatcctgatgtggcccacattcttatttgattctagttttatctgagcaagaggaaaggaaaagggttgtacttcagttaataaagacttaaaattctggaccatcaagtgtaaatttaatataaataattttatttaaagataaatggccaggaagtactctgcaaagtaacaacagagtattattaatgctgataattacatggaaaatcctaagactggccatgtaaaagctttgattaaaatataattcaaattacagatgatgtaataacatgaagctggtggtaggatcctcaggagccataatgaacagtgtaagccagttcacaaaaggcaggcatttttacagatccttatgtttcaatttcatgctctattcacgtgaagtaaatataacatcacagtgtaccaattaaatggccataatgagaacattattcctcaa

SEQ ID NO: 52428 - DNA, 250 bp, Homo sapiens
tttcctctcctcctccctccttccctccctccattctatatttgttcaattttgcagcaggtgcaaccactgctgtgtctcgcattttgcagatgaggaaactgaggctcaaagagggtccaggatcagcttgcctggatctcaaacaggggaggctgagctctcaggctgtctggcttggaagtgggtgggaggcgggacagtgctggacttgaacttggttctgggtagagccagccagagcctgtgt

SEQ ID NO: 52429 - DNA, 3110 bp, Homo sapiens
  misc_feature (709)..(709): n is a, c, g, or t
agacctcggcacccgttcagactgacagcagaggcggcgaaggagcgcgtagccgagatcaggcgtacagagtccggaggcggcggcgggtgagctcaacttcgcacagcccttcccagctccagccccggctggcccggcacttctcggagggtcccggcagccgggaccagtgagtgcctctacggaccagcgccccggcgggcgggaagatgatgatgatgtccctgaacagcaagcaggcgtttagcatgccgcacggcggcagcctgcacgtggagcccaagtactcggcactgcacagcacctcgccgggctcctcggctcccatcgcgccctcggccagctcccccagcagctcgagcaacgctggtggtggcggcggcggcggcggcggcggcggcggcggcggcggaggccgaagcagcagctccagcagcagtggcagcagcggcggcgggggctcggaggctatgcggagagcctgtcttccaaccccaccgagcaatatattcggcgggctggatgagagtctgctggcccgcgccgaggctctggcagccgtggacatcgtctcccagagcaagagccaccaccaccatccaccccaccacagccccttcaaaccggacgccacctaccacactatgaataccatcccgtgcacgtcggccgcctcttcttcatcggtgcccatctcgcacccttncgcgttggcgggcacgcaccaccaccaccaccatcaccaccaccaccaccaccaaccgcaccaggcgctggagggcgagctgctggagcacctgagtcccgggctggccctgggcgctatggcgggccccgacggcgctgtggtgtccacgccggctcacgcgccgcacatggccaccatgaaccccatgcaccaagcagcgctcagcatggcccacgcgcacgggctgccgtcgcacatgggctgcatgagcgacgtggacgccgacccgcgggacctggaggcattcgccgagcgcttcaagcagcgacgcatcaagctgggggtgacccaggcagatgtgggctccgcgctggccaacctcaagatccccggcgtgggctcgcttagccagagcaccatctgcaggttcgagtccctcacactgtcccacaataatatgatcgcgctcaaacccatcctgcaggcatggctcgaggaggccgagaagtcccaccgcgagaagctcaccaagcctgaactcttcaatggcgcggagaagaagcgcaagcgcacgtccatcgctgcgccagagaagcgctcgctcgaagcctactttgccattcagcctcggccctcctctgaaaagatcgccgccatcgcggagaagctggacctgaagaaaaacgtggtgcgcgtctggttctgcaaccagaggcagaaacagaaaagaatgaaatattccgccggcatttagaagactcttggcctctccagagacgcccctttcctcgtccgctcttttctctcctctcttctgcctcttttcacttttggcgactagaaacaattccagtaaatgtgaatctcgacaaatcgaggactgaagagggagcgaacgagcgaacaactgagcccaagccggtgagaatgtgaaacagtttctcaaaggaaagaataacaaaagatggtatttgtctgttgtagcaaagttgtccctttgaaccccacctcggcttcttcagaggaagtgtggagatggctgtttgcaggaaggcagacgagacagtgtttaaaaagtccacaagaatgatcaagtaagatttgtttttattcttacagacatcacccgtgttcaagtttaaaagtacactttgcaactatttttcagaaatagaaattgattcaggactaaaactttaaactagagttgatgcttaatgtgatagagacatctctaaagtattttgaattttaaaaaaagatggcagattttctgcatttacactgtatattatatatatatttttattgtggttcttacccccttttccttctctgaagtgttaatgcttaagaaaagagttgcgcctgctgtgttcactgatcttgaaagctattattagattattgcagaacaaccctctgtaaattattaatttatctctctagcaacttaattttgtgcacattctaattaattaaacttcttccgtctaaaaaaagtgggggaaatgtatagctagtaacgttcaaaaaattttgtttgatgagtttaccgaatttttacagctttcctcctatactgtgttccttttgacccatttgtatattctcacttgaatgaagattgtttttttctttgtttttactggtagtgttctgatttgtgagtcgacactcagtaatggatgtcttaatcgtgtagacctgattcactgtctgaagtattgtttacttcgttacatatttaatggggattcccacattgtccccatgacacatgagcgctctcacttacccttacacacacacacacacacacacacacacctctaacagaagggaagaagcagttggaagcatgaccgatgcaccattttctagttttaggtgcatttgccacttggtgtttgcccttcagattttagatttcaccaaggtatttcagtcttccagttttcaattgctttgttggctacatgttaatatttataggaatacttcagtttttccttttggaggtttgtttgtagaaaaactaatttgaactataagaaagacagtgcactgcttgtaaattcacattgtttggaaaaattcttttggaacaaaaaattaggtacatgataactggtaccttatctactgtaaatatttcattaaaaatgatgcacacatagatatattcttacaaattttgctgtattgctgttctctttgaggctctccaaagtcttgagttctgtatatggcctggtttcttgtttttattaatagatggtttatttactatggtaatgtattaatttatttttggtgttgttcgattgtctttcattgaagagataattttaatgttttattggcaacgtatgctgctttttcattaaaatatgctattaaaattaaatggctttta

SEQ ID NO: 52430 - DNA, 106 bp, Homo sapiens
ttgcataggggttcttaactaagacctctaccttcttcatccaactccaagtatattggtttacttcatttttattacaagaatatggtatcatcgtagctttata

SEQ ID NO: 52431 - DNA, 341 bp, Homo sapiens
tcaggttgggttctcctagaagcaggctgtgagcctatgatttcagtgcaagtagttaatagggaaggtgaagggaatactgctagaggagtaggaaagtgaggcaaaggagggaaggcattgaacaaagggcataataccaagacagctacagtcggggcaactgaagcttaaccctgctggaaaattctgggaacttaggcagaatttatctcagagttagtctacctagcggtgagggagctggggtatttacacttcaacatccctaatgcctccagtctgctgtgtggattgtgactcaggcccaggagcaagaaaaaaccactggcagagaaatg

SEQ ID NO: 52432 - DNA, 211 bp, Homo sapiens
ttttctataacattgccagaaaatagtgtcgtggagctgaggctaagttttaagggaaaaaaggttgtaactaagaattaaatagtcacactaattgttgttaatttgtgaaggcagtgtgctagctccaccttctgtatcttcagggaccatctttcttgctgccttcacaaattacccattgcttcctccagcttggcaggaacccttg

SEQ ID NO: 52433 - DNA, 1060 bp, Homo sapiens
  misc_feature (772)..(772): n is a, c, g, or t
gcgagcggcccgcaggggctggtgtcactggtcattcctgcacaggacagtccaccatggcctcagatcaccagacccaggcgggcaagccacagtccctcaaccccaagatcatcatctttgagcaggaaaactttcaaggccactcgcatgagctcaatgggccctgccccaacctgaaggaaactggcgtggagaaggcaggttctgtcctagtgcaggctggaccctgggtgggctatgaacaggccaactgcaagggcgagcagtttgtgtttgagaagggtgagtacccccgctgggactcatggaccagcagccgaaggacggactccctcagctccctgaggcccatcaaagtggacagccaagagcacaagatcatcctctatgaaaaccccaacttcaccgggaagaagatggaaatcatagatgacgatgtacccagcttccacgcccatggctaccaggagaaggtgtcatctgtgcgggtgcagagtggcacgtgggttggctaccagtaccccggctaccgtgggctgcagtacctgctggagaagggagactacaaggacagcagcgactttggggcccctcacccccaggtgcagtccgtgcgccgtatccgcgacatgcagtggcaccaacgtggtgccttccacccctccaactagtgccctccccaccatgcctccttcccaggacccaggtctgctgcccaggaaccctccagacctcccagagagtgaataaagtgtgacttgcaacttgnaaaaaaaaaaaaaaaaaaaaaaaaaaaaaaaaaaaaaaaaaaaaaaaaaaaaaaaaaaaaaaaaaaaaaaaaaaaaaaaaaaaaaaaaaaaaaaaaaaaaaaaaggggggggccgttttaaagtttccttgggggggccaaagtttacccttccccattttttttgtaaaagggggcccttttggggggggtttttataagttgggccttgcccgttttttaaaaacttttgaatgggaaaaactgttatttgggaatttttggaagggacccttatttttggggggg

SEQ ID NO: 52434 - DNA, 1110 bp, Homo sapiens
  misc_feature (822)..(822): n is a, c, g, or t
caccggcacttctggggaaggtataaatgccacctcccgctggccgagcttcacggcactcgcaggggctggtgtcactggtcattcctgcacaggacagtccaccatggcctcagatcaccagacccaggcgggcaagccacagtccctcaaccccaagatcatcatctttgagcaggaaaactttcaaggccactcgcatgagctcaatgggccctgccccaacctgaaggaaactggcgtggagaaggcaggttctgtcctagtgcaggctggaccctgggtgggctatgaacaggccaactgcaagggcgagcagtttgtgtttgagaagggtgagtacccccgctgggactcatggaccagcagccgaaggacggactccctcagctccctgaggcccatcaaagtggacagccaagagcacaagatcatcctctatgaaaaccccaacttcaccgggaagaagatggaaatcatagatgacgatgtacccagcttccacgcccatggctaccaggagaaggtgtcatctgtgcgggtgcagagtggcacgtgggttggctaccagtaccccggctaccgtgggctgcagtacctgctggagaagggagactacaaggacagcagcgactttggggcccctcacccccaggtgcagtccgtgcgccgtatccgcgacatgcagtggcaccaacgtggtgccttccacccctccaactagtgccctccccaccatgcctccttcccaggacccaggtctgctgcccaggaaccctccagacctcccagagagtgaataaagtgtgacttgcaacttgnaaaaaaaaaaaaaaaaaaaaaaaaaaaaaaaaaaaaaaaaaaaaaaaaaaaaaaaaaaaaaaaaaaaaaaaaaaaaaaaaaaaaaaaaaaaaaaaaaaaaaaaaggggggggccgttttaaagtttccttgggggggccaaagtttacccttccccattttttttgtaaaagggggcccttttggggggggtttttataagttgggccttgcccgttttttaaaaacttttgaatgggaaaaactgttatttgggaatttttggaagggacccttatttttggggggg

SEQ ID NO: 52435 - DNA, 236 bp, Homo sapiens
ttcggtacaggctgacttccttgagtcagcatagggtcacagctatgggacagggctcagcacccagactgtgttcaaatcctggctctgctacttacccgctgtgatcttcagaaaggtacttaaccttcctaagcctctgtttcctcatctgtaaaatggggataatggaagctaccttatgtggtcattgcaaagacttcattagaattgtatctatcatgcctggtgtataa

SEQ ID NO: 52436 - DNA, 391 bp, Homo sapiens
tcaactgcaaaatcccttcccatcaacactgagattactgcgtgactgagtaactgacagaagatgtgtgtataccagggccaaggaattttgggggtcatctcagaattctgcctctgttaggccgatgttataggatttttatttgcattttaaaatcatattccattgttaaatatatgccacaatttctttatccatttgtctgttgatggatgcttagattgactcctgtttctttcaggtcacccaacacttgcagtgttggattcccttaaggttttcttggagtagtgaggttctttgaaaataagtgcagcgtcttgggtgaggggtccagtcctggttgtgttgagtgacgggagagctgcaccctggtcctgcctcgaag

SEQ ID NO: 52437 - DNA, 95 bp, Homo sapiens
atggtgagtcccctaaggacagggcttgggacctctgagtgtagcccctgcgcagaggggtctggcggcacacacctgtggagtgaacagttaag

SEQ ID NO: 52438 - DNA, 1076 bp, Homo sapiens
catctcagaaatttttctcttttgaggggagatcaaatatccagaattctctagactggagcaggggtttttcaaacaacagcagcagactcacctgtaatcttgtcagaagtatgaattatcagtctccaccctagacttactgaatcagacactgtgggagttaggcctagcagtctgtatttactaggtgatccggaggcatgctagtttgaaaactgctgggctagagaaggtctgctgaggatgtgatacattcctcactaatttaaggatttgactcagaagccatttaattaaaaggatctgctgggtcaagggaaaggggaaaaactcatatgaatttaattgcctggtcctttcaagagtcagaaggtacaaatatttatttagtttgctcacagagtcgagaattttgagactagtggtaacttctttcgccagtccctaatgacatcacgttagagggtgtgggacagtgtgattaactctaagtgtttaaggtcttttgccataggcatcgccacttaagctgtatgtttttaatgaacctggaattccagcatgctcactgcccagacgttattgtatttttgttcactaattcaccgagcatataatgagcacctacttattgtgagacacaagatgagtaagacatggtccctgtgtttaaggaatgtatcattcagtcttgagaaataccccagaacatgacgctttcatatgctcacagatgtgtgcttttctaaacatatccaagctgctacccacagatctgatgtaaacctggccttgtagtcagagctcagctaccttttagcattatttggagcttaattcttttaccttacctgtccccctttttttcccttttgatatactgtttagtttactcctgagatacttgctatctcatatgaaaatgtctttcaagacctcgtaagtttaagaatgagagccagcttcctattatggttcatttttggagaaattccgaataaagactgatagatggattcccttaagggaaataattatttaaactattaattttctaatgaaaagaacttagt

SEQ ID NO: 52439 - DNA, 407 bp, Homo sapiens
agcttcaataccctgtctctaaaagttaaataaataaataagaataaattaaaatccagatttccagcatcttttccaaaaagtgtcaaaagatccaaggacactgggcccacttcctcacatggcaacaagcaagtggagctgagcagcaactgctccctttagtttgggcccgtgctctccagttcatcaaggcccagcctactcatcctagtacataacaggcatcggacttggagaccactgaggaagatgctcaaacagaacaataataataatttaatgaagatttgtttactcttttttggccagttttttgtgggctctattcacacattagctctgtgactcttaagtaacatatttaaccactaagcctcttaaatttaacacaagctgaaatatgc

SEQ ID NO: 52440 - DNA, 764 bp, Homo sapiens
gtgaagtttgagaagttatgaaagatttatgacaaacatttttttctcctcacggtcttccgtgttatttataattacatgaatcttaaccagaggttttattgatttcataatgaattcaaataaagattgcagctcctcagcgacctttaaaggttagactggctatgcatgtttttttccaaaagtttttgtcgtgatagaatttattttttaccatggaagtattcagacatagtagggtcacttcagactgtaattatcactgcaaggcttatgaaataagtgaccaacacagtctctatcacacacacacacacacacacacacacacacacacacacacacacttatatattcagaggacttctttataatagttcttattccaagcaagccatgtaggagaaatgttgtcacttttgtgagggcatataacatgagcaacctataatggatccctttttttggtgtttgccatctcttagagagatttgatttgcaaaggaagcccccaaaacgtgcctgttatccacacgaccctgtatgtctagggcaggccttgatggctgatcaacctgtcttgaagtgaatgagggagaatattttaacgtggaatgccaccttaaagcatgactttaaaaaatatcttgaggctgggcctgtaatccgagcactttgggaggccaaagtgggaggatctcttgagctcaggagttcaagcccagcctaggcaacatagcaagagctcgcctctacaaaaa

SEQ ID NO: 52441 - DNA, 2352 bp, Homo sapiens
accggtggtcagagtgaaacagaacagaacgggaggtttcacaatgtccttccatacaatctctggaatctatagataacaacagctgctaggtcaggggtcgaattttaactaccaggcttaggtcaggcaggcccaggcctggtttcgggtctggttccttggtttcgggtctggttccttggtttcaggtctggtttttaggcgccgggctacctgcctttagtttcgcttctctttccttttccgagtataaaacagtatgagagggtctctctcctccctcagtgccatcctcatccctgggtgggagttgtctggatccatagggttggagccacagataacagagccattaatctcggggtctcagcctctcttaacggaccttccaggcactgctgagaaaaccaggttaatggtttcctgcggcagcaatgagcagaagcagggccatctccagactccagagaagccaggagagggctggggtgataatggggaggaggataaaaaacagccacccaatgcgtgccttccctgtgccaggcccttgtcctgaaatgttatctcactccatcctcccaacagtcccttgggctaaattggtgatgctgcttgtttgagtgagcaaacagagggtgaatgaagtgacttgcgggcagctgggtagaggatgaggtcagcattggtgtaaaggactggagcttcagggttctcgggattcgagtcctggccctgctgcttgccagctctgtgctgtggcaagttacttcctctccccaggtctctcggtttcctcatctgctgcctctccagacttctgccagaacattgcacgcgacagtttcaggcacagaactgactggcagcaggggctgctccacgagtgggaatttgctccagcacttcacggactgcaagcgaggcacttgctaactcttggataacaagacctctgccagaagaaccatggctttggaaggcggagttcaggctgaggagatgggtgcggtcctcagtgagcccctgcctccctgaacataggaaacccacctgggcagccatggaatgggacaatggcacaggccaggctctgggcttgccacccaccacctgtgtctaccgcgagaacttcaagcaactgctgctgccacctgtgtattcggcggtgctggcggctggcctgccgctgaacatctgtgtcattacccagatctgcacgtcccgccgggccctgacccgcacggccgtgtacaccctaaaccttgctctggctgacctgctatatgcctgctccctgcccctgctcatctacaactatgcccaaggtgatcactggccctttggcgacttcgcctgccgcctggtccgcttcctcttctatgccaacctgcacggcagcatcctcttcctcacctgcatcagcttccagcgctacctgggcatctgccacccgctggccccctggcacaaacgtgggggccgccgggctgcctggctagtgtgtgtagccgtgtggctggccgtgacaacccagtgcctgcccacagccatcttcgctgccacaggcatccagcgtaaccgcactgtctgctatgacctcagcccgcctgccctggccacccactatatgccctatggcatggctctcactgtcatcggcttcctgctgccctttgctgccctgctggcctgctactgtctcctggcctgccgcctgtgccgccaggatggcccggcagagcctgtggcccaggagcggcgtggcaaggcggcccgcatggccgtggtggtggctgctgcctttgccatcagcttcctgccttttcacatcaccaagacagcctacctggcagtgcgctcgacgccgggcgtcccctgcactgtattggaggcctttgcagcggcctacaaaggcacgcggccgtttgccagtgccaacagcgtgctggaccccatcctcttctacttcacccagaagaagttccgccggcgaccacatgagctcctacagaaactcacagccaaatggcagaggcagggtcgctgagtcctccaggtcctgggcagccttcatatttgccattgtgtccggggcaccaggagccccaccaaccccaaaccatgcggagaattagagttcagctcagctgggcatggagttaagatccctcacaggacccagaagctcaccaaaaactatttcttcagccccttctctggcccagaccctgtgggcatggagatggacagacctgggcctggctcttgagaggtcccagtcagccatggagagctggggaaaccacattaaggtgctcacaaaaatacagtgtgacgtgtactgtc

SEQ ID NO: 52442 - DNA, 1538 bp, Homo sapiens
ctgggttccagggacgctggggccggagctgctgccgccgtctacacggtcccctcatttgacgggttcgcctcctagcagcgcctgggcgagtgacatctgggccggaccagctggtgctgcgcggcgcagataacaagacctctgccagaagaaccatggctttggaaggcggagttcaggctgaggagatgggtgcggtcctcagtgagcccctgcctccctgaacataggaaacccacctgggcagccatggaatgggacaatggcacaggccaggctctgggcttgccacccaccacctgtgtctaccgcgagaacttcaagcaactgctgctgccacctgtgtattcggcggtgctggcggctggcctgccgctgaacatctgtgtcattacccagatctgcacgtcccgccgggccctgacccgcacggccgtgtacaccctaaaccttgctctggctgacctgctatatgcctgctccctgcccctgctcatctacaactatgcccaaggtgatcactggccctttggcgacttcgcctgccgcctggtccgcttcctcttctatgccaacctgcacggcagcatcctcttcctcacctgcatcagcttccagcgctacctgggcatctgccacccgctggccccctggcacaaacgtgggggccgccgggctgcctggctagtgtgtgtagccgtgtggctggccgtgacaacccagtgcctgcccacagccatcttcgctgccacaggcatccagcgtaaccgcactgtctgctatgacctcagcccgcctgccctggccacccactatatgccctatggcatggctctcactgtcatcggcttcctgctgccctttgctgccctgctggcctgctactgtctcctggcctgccgcctgtgccgccaggatggcccggcagagcctgtggcccaggagcggcgtggcaaggcggcccgcatggccgtggtggtggctgctgcctttgccatcagcttcctgccttttcacatcaccaagacagcctacctggcagtgcgctcgacgccgggcgtcccctgcactgtattggaggcctttgcagcggcctacaaaggcacgcggccgtttgccagtgccaacagcgtgctggaccccatcctcttctacttcacccagaagaagttccgccggcgaccacatgagctcctacagaaactcacagccaaatggcagaggcagggtcgctgagtcctccaggtcctgggcagccttcatatttgccattgtgtccggggcaccaggagccccaccaaccccaaaccatgcggagaattagagttcagctcagctgggcatggagttaagatccctcacaggacccagaagctcaccaaaaactatttcttcagccccttctctggcccagaccctgtgggcatggagatggacagacctgggcctggctcttgagaggtcccagtcagccatggagagctggggaaaccacattaaggtgctcacaaaaatacagtgtgacgtgtactgtc

SEQ ID NO: 52443 - DNA, 339 bp, Homo sapiens
tgcaagcgaggcacttgctaactcttggcctccctgaacataggaaaccgtcctgggcagccttcatatttgccattgtgtccggggcaccaggagccccaccaaccccaaaccatgcggagaattagagttcagctcagctgggcatggagttaagatccctcacaggacccagaagctcaccaaaaactatttcttcagccccttctctggcccagaccctgtgggcatggagatggacagacctgggcctggctcttgagaggtcccagtcagccatggagagctggggaaaccacattaaggtgctcacaaaaatacagtgtgacgtgtactgtc

SEQ ID NO: 52444 - DNA, 3121 bp, Homo sapiens
  misc_feature (3108)..(3108): n is a, c, g, or t
aaggacagaggaggggcccttcctgtcagctggctgggagcagaggtggctttgtcttttcggaagaactggttctgtggaatttgtgcttatttcccatcaaggatcaaggacctgctctggggctacctcagggccccacaggatgaggggctggttttcagatgagttttctgcttgcctgtcatctggatagtgtctaaaaatttgcaaactgccttcttgtcagtgtcttgctcattcttcatgacactcctgatatgtctctcggtttcctcatctgctgcctctccagacttctgccagaacattgcacgcgacagtttcaggcacagaactgactggcagcaggggctgctccacgagtgggaatttgctccagcacttcacggactgcaagcgaggcacttgctaactcttggataacaagacctctgccagaagaaccatggctttggaaggcggagttcaggctgaggagatgggtgcggtcctcagtgagcccctgcctccctgaacataggaaacccacctgggcagccatggaatgggacaatggcacaggccaggctctgggcttgccacccaccacctgtgtctaccgcgagaacttcaagcaactgctgctgccacctgtgtattcggcggtgctggcggctggcctgccgctgaacatctgtgtcattacccagatctgcacgtcccgccgggccctgacccgcacggccgtgtacaccctaaaccttgctctggctgacctgctatatgcctgctccctgcccctgctcatctacaactatgcccaaggtgatcactggccctttggcgacttcgcctgccgcctggtccgcttcctcttctatgccaacctgcacggcagcatcctcttcctcacctgcatcagcttccagcgctacctgggcatctgccacccgctggccccctggcacaaacgtgggggccgccgggctgcctggctagtgtgtgtagccgtgtggctggccgtgacaacccagtgcctgcccacagccatcttcgctgccacaggcatccagcgtaaccgcactgtctgctatgacctcagcccgcctgccctggccacccactatatgccctatggcatggctctcactgtcatcggcttcctgctgccctttgctgccctgctggcctgctactgtctcctggcctgccgcctgtgccgccaggatggcccggcagagcctgtggcccaggagcggcgtggcaaggcggcccgcatggccgtggtggtggctgctgcctttgccatcagcttcctgccttttcacatcaccaagacagcctacctggcagtgcgctcgacgccgggcgtcccctgcactgtattggaggcctttgcagcggcctacaaaggcacgcggccgtttgccagtgccaacagcgtgctggaccccatcctcttctacttcacccagaagaagttccgccggcgaccacatgagctcctacagaaactcacagccaaatggcagaggcagggtcgctgagtcctccaggtcctgggcagccttcatatttgccattgtgtccggggcaccaggagccccaccaaccccaaaccatgcggagaattagagttcagctcagctgggcatggagttaagatccctcacaggacccagaagctcaccaaaaactatttcttcagccccttctctggcccagaccctgtgggcatggagatggacagacctgggcctggctcttgagaggtcccagtcagccatggagagctggggaaaccacattaaggtgctcacaaaaatacagtgtgacgtgtactgtcaaaaaggggtatgctccatgctttgagtcaccaatgaagcgggtgagggaagatgagagggggaggtgagagcttctgggaaggggcatttgagctgggttttgagggatgattatgagctctctggagaggagtgatattccatttatttagaaagcctttactgacaccttgtgctcaggcctgtgttggttctggggccctagaagaaccagtcctagccctggtccatacgggctcccaactgctggaagtacagactggcacagcaacatcagggttgtgacagagggaagcatggctggggggagggggtacacagacagtgcccatgacccagtccaaggagtcaggaaagagctctctgaggagggagcatctgagccagatgttgagggctgagtgggaacttggcaagcagaagtggggagcactttaatgcaacccaggtatgctccatgcatatccagctgggccagcctcgtgctgggctctgccctgggcagacaggcagagggccagagcagaggacacatggccttgcgtgtgtgaaagctgagaaaatgggagctgtgcttcagctaccctccagacaagggcaagagttagccagatgctccaggcagtgggaagccaatggagggattaagcggcggaagcttcttagaagaggcagggggcgaagtgcagtggctcatgcctgtaatctcagcaatttgggaggccaaggaaggaggaatgcttgagcccaagagttttagaccagcctgggcaacacagtaagaccctgtttctacaaaaaaatataaaaaatagcctggtgtggtggtgtctgactgtagtactaactactcaggaagctgaggtgctgagttcgagattacagtgagctaggagtgatccagtgcattccagcctgagcgacagagggagacactgtctctaaaaaaattaaaataaatcgggagcagtggctcacatctgtaatcccagcactttgggaggctgaagcaggtggatcacttgaggtcaggaatttgagaccagcctggccaacacagtgaaaccctgtctctaccgaaaatacaaaaattagctgggcatggtggctggtgcctgtaatcccagctactcgggaggctaaggcaagcgaattgcttgaacctgggaggcggaggttgcagtgagccgagatcacatcactgcattccagcctgggcgatggagcgagaacctgtctcataacccgggatactaacatattgttatttccccctctncctttctctctct

SEQ ID NO: 52445 - DNA, 3559 bp, Homo sapiens
  misc_feature (3546)..(3546): n is a, c, g, or t
accggtggtcagagtgaaacagaacagaacgggaggtttcacaatgtccttccatacaatctctggaatctatagataacaacagctgctaggtcaggggtcgaattttaactaccaggcttaggtcaggcaggcccaggcctggtttcgggtctggttccttggtttcgggtctggttccttggtttcaggtctggtttttaggcgccgggctacctgcctttagtttcgcttctctttccttttccgagtataaaacagtatgagagggtctctctcctccctcagtgccatcctcatccctgggtgggagttgtctggatccatagggttggagccacagataacagagccattaatctcggggtctcagcctctcttaacggaccttccaggcactgctgagaaaaccaggttaatggtttcctgcggcagcaatgagcagaagcagggccatctccagactccagagaagccaggagagggctggggtgataatggggaggaggataaaaaacagccacccaatgcgtgccttccctgtgccaggcccttgtcctgaaatgttatctcactccatcctcccaacagtcccttgggctaaattggtgatgctgcttgtttgagtgagcaaacagagggtgaatgaagtgacttgcgggcagctgggtagaggatgaggtcagcattggtgtaaaggactggagcttcagggttctcgggattcgagtcctggccctgctgcttgccagctctgtgctgtggcaagttacttcctctccccaggtctctcggtttcctcatctgctgcctctccagacttctgccagaacattgcacgcgacagtttcaggcacagaactgactggcagcaggggctgctccacgagtgggaatttgctccagcacttcacggactgcaagcgaggcacttgctaactcttggcctccctgaacataggaaacccacctgggcagccatggaatgggacaatggcacaggccaggctctgggcttgccacccaccacctgtgtctaccgcgagaacttcaagcaactgctgctgccacctgtgtattcggcggtgctggcggctggcctgccgctgaacatctgtgtcattacccagatctgcacgtcccgccgggccctgacccgcacggccgtgtacaccctaaaccttgctctggctgacctgctatatgcctgctccctgcccctgctcatctacaactatgcccaaggtgatcactggccctttggcgacttcgcctgccgcctggtccgcttcctcttctatgccaacctgcacggcagcatcctcttcctcacctgcatcagcttccagcgctacctgggcatctgccacccgctggccccctggcacaaacgtgggggccgccgggctgcctggctagtgtgtgtagccgtgtggctggccgtgacaacccagtgcctgcccacagccatcttcgctgccacaggcatccagcgtaaccgcactgtctgctatgacctcagcccgcctgccctggccacccactatatgccctatggcatggctctcactgtcatcggcttcctgctgccctttgctgccctgctggcctgctactgtctcctggcctgccgcctgtgccgccaggatggcccggcagagcctgtggcccaggagcggcgtggcaaggcggcccgcatggccgtggtggtggctgctgcctttgccatcagcttcctgccttttcacatcaccaagacagcctacctggcagtgcgctcgacgccgggcgtcccctgcactgtattggaggcctttgcagcggcctacaaaggcacgcggccgtttgccagtgccaacagcgtgctggaccccatcctcttctacttcacccagaagaagttccgccggcgaccacatgagctcctacagaaactcacagccaaatggcagaggcagggtcgctgagtcctccaggtcctgggcagccttcatatttgccattgtgtccggggcaccaggagccccaccaaccccaaaccatgcggagaattagagttcagctcagctgggcatggagttaagatccctcacaggacccagaagctcaccaaaaactatttcttcagccccttctctggcccagaccctgtgggcatggagatggacagacctgggcctggctcttgagaggtcccagtcagccatggagagctggggaaaccacattaaggtgctcacaaaaatacagtgtgacgtgtactgtcaaaaaggggtatgctccatgctttgagtcaccaatgaagcgggtgagggaagatgagagggggaggtgagagcttctgggaaggggcatttgagctgggttttgagggatgattatgagctctctggagaggagtgatattccatttatttagaaagcctttactgacaccttgtgctcaggcctgtgttggttctggggccctagaagaaccagtcctagccctggtccatacgggctcccaactgctggaagtacagactggcacagcaacatcagggttgtgacagagggaagcatggctggggggagggggtacacagacagtgcccatgacccagtccaaggagtcaggaaagagctctctgaggagggagcatctgagccagatgttgagggctgagtgggaacttggcaagcagaagtggggagcactttaatgcaacccaggtatgctccatgcatatccagctgggccagcctcgtgctgggctctgccctgggcagacaggcagagggccagagcagaggacacatggccttgcgtgtgtgaaagctgagaaaatgggagctgtgcttcagctaccctccagacaagggcaagagttagccagatgctccaggcagtgggaagccaatggagggattaagcggcggaagcttcttagaagaggcagggggcgaagtgcagtggctcatgcctgtaatctcagcaatttgggaggccaaggaaggaggaatgcttgagcccaagagttttagaccagcctgggcaacacagtaagaccctgtttctacaaaaaaatataaaaaatagcctggtgtggtggtgtctgactgtagtactaactactcaggaagctgaggtgctgagttcgagattacagtgagctaggagtgatccagtgcattccagcctgagcgacagagggagacactgtctctaaaaaaattaaaataaatcgggagcagtggctcacatctgtaatcccagcactttgggaggctgaagcaggtggatcacttgaggtcaggaatttgagaccagcctggccaacacagtgaaaccctgtctctaccgaaaatacaaaaattagctgggcatggtggctggtgcctgtaatcccagctactcgggaggctaaggcaagcgaattgcttgaacctgggaggcggaggttgcagtgagccgagatcacatcactgcattccagcctgggcgatggagcgagaacctgtctcataacccgggatactaacatattgttatttccccctctncctttctctctct

SEQ ID NO: 52446 - DNA, 1665 bp, Homo sapiens
ctgggttccagggacgctggggccggagctgctgccgccgtctacacggtcccctcatttgacgggttcgcctcctagcagcgcctgggcgagtgacatctgggccggaccagctggtgctgcgcggcgcagacttctgccagaacattgcacgcgacagtttcaggcacagaactgactggcagcaggggctgctccacgagtgggaatttgctccagcacttcacggactgcaagcgaggcacttgctaactcttggataacaagacctctgccagaagaaccatggctttggaaggcggagttcaggctgaggagatgggtgcggtcctcagtgagcccctgcctccctgaacataggaaacccacctgggcagccatggaatgggacaatggcacaggccaggctctgggcttgccacccaccacctgtgtctaccgcgagaacttcaagcaactgctgctgccacctgtgtattcggcggtgctggcggctggcctgccgctgaacatctgtgtcattacccagatctgcacgtcccgccgggccctgacccgcacggccgtgtacaccctaaaccttgctctggctgacctgctatatgcctgctccctgcccctgctcatctacaactatgcccaaggtgatcactggccctttggcgacttcgcctgccgcctggtccgcttcctcttctatgccaacctgcacggcagcatcctcttcctcacctgcatcagcttccagcgctacctgggcatctgccacccgctggccccctggcacaaacgtgggggccgccgggctgcctggctagtgtgtgtagccgtgtggctggccgtgacaacccagtgcctgcccacagccatcttcgctgccacaggcatccagcgtaaccgcactgtctgctatgacctcagcccgcctgccctggccacccactatatgccctatggcatggctctcactgtcatcggcttcctgctgccctttgctgccctgctggcctgctactgtctcctggcctgccgcctgtgccgccaggatggcccggcagagcctgtggcccaggagcggcgtggcaaggcggcccgcatggccgtggtggtggctgctgcctttgccatcagcttcctgccttttcacatcaccaagacagcctacctggcagtgcgctcgacgccgggcgtcccctgcactgtattggaggcctttgcagcggcctacaaaggcacgcggccgtttgccagtgccaacagcgtgctggaccccatcctcttctacttcacccagaagaagttccgccggcgaccacatgagctcctacagaaactcacagccaaatggcagaggcagggtcgctgagtcctccaggtcctgggcagccttcatatttgccattgtgtccggggcaccaggagccccaccaaccccaaaccatgcggagaattagagttcagctcagctgggcatggagttaagatccctcacaggacccagaagctcaccaaaaactatttcttcagccccttctctggcccagaccctgtgggcatggagatggacagacctgggcctggctcttgagaggtcccagtcagccatggagagctggggaaaccacattaaggtgctcacaaaaatacagtgtgacgtgtactgtc

SEQ ID NO: 52447 - DNA, 2855 bp, Homo sapiens
  misc_feature (2842)..(2842): n is a, c, g, or t
taggctaggtacgggccgggtgttaatcggccgagggctgcttgccagctctgtgctgtggcaagttacttcctctccccaggtctctcggtttcctcatctgctgcctctccagacttctgccagaacattgcacgcgacagtttcaggcacagaactgactggcagcaggggctgctccacgagtgggaatttgctccagcacttcacggactgcaagcgaggcacttgctaactcttggcctccctgaacataggaaacccacctgggcagccatggaatgggacaatggcacaggccaggctctgggcttgccacccaccacctgtgtctaccgcgagaacttcaagcaactgctgctgccacctgtgtattcggcggtgctggcggctggcctgccgctgaacatctgtgtcattacccagatctgcacgtcccgccgggccctgacccgcacggccgtgtacaccctaaaccttgctctggctgacctgctatatgcctgctccctgcccctgctcatctacaactatgcccaaggtgatcactggccctttggcgacttcgcctgccgcctggtccgcttcctcttctatgccaacctgcacggcagcatcctcttcctcacctgcatcagcttccagcgctacctgggcatctgccacccgctggccccctggcacaaacgtgggggccgccgggctgcctggctagtgtgtgtagccgtgtggctggccgtgacaacccagtgcctgcccacagccatcttcgctgccacaggcatccagcgtaaccgcactgtctgctatgacctcagcccgcctgccctggccacccactatatgccctatggcatggctctcactgtcatcggcttcctgctgccctttgctgccctgctggcctgctactgtctcctggcctgccgcctgtgccgccaggatggcccggcagagcctgtggcccaggagcggcgtggcaaggcggcccgcatggccgtggtggtggctgctgcctttgccatcagcttcctgccttttcacatcaccaagacagcctacctggcagtgcgctcgacgccgggcgtcccctgcactgtattggaggcctttgcagcggcctacaaaggcacgcggccgtttgccagtgccaacagcgtgctggaccccatcctcttctacttcacccagaagaagttccgccggcgaccacatgagctcctacagaaactcacagccaaatggcagaggcagggtcgctgagtcctccaggtcctgggcagccttcatatttgccattgtgtccggggcaccaggagccccaccaaccccaaaccatgcggagaattagagttcagctcagctgggcatggagttaagatccctcacaggacccagaagctcaccaaaaactatttcttcagccccttctctggcccagaccctgtgggcatggagatggacagacctgggcctggctcttgagaggtcccagtcagccatggagagctggggaaaccacattaaggtgctcacaaaaatacagtgtgacgtgtactgtcaaaaaggggtatgctccatgctttgagtcaccaatgaagcgggtgagggaagatgagagggggaggtgagagcttctgggaaggggcatttgagctgggttttgagggatgattatgagctctctggagaggagtgatattccatttatttagaaagcctttactgacaccttgtgctcaggcctgtgttggttctggggccctagaagaaccagtcctagccctggtccatacgggctcccaactgctggaagtacagactggcacagcaacatcagggttgtgacagagggaagcatggctggggggagggggtacacagacagtgcccatgacccagtccaaggagtcaggaaagagctctctgaggagggagcatctgagccagatgttgagggctgagtgggaacttggcaagcagaagtggggagcactttaatgcaacccaggtatgctccatgcatatccagctgggccagcctcgtgctgggctctgccctgggcagacaggcagagggccagagcagaggacacatggccttgcgtgtgtgaaagctgagaaaatgggagctgtgcttcagctaccctccagacaagggcaagagttagccagatgctccaggcagtgggaagccaatggagggattaagcggcggaagcttcttagaagaggcagggggcgaagtgcagtggctcatgcctgtaatctcagcaatttgggaggccaaggaaggaggaatgcttgagcccaagagttttagaccagcctgggcaacacagtaagaccctgtttctacaaaaaaatataaaaaatagcctggtgtggtggtgtctgactgtagtactaactactcaggaagctgaggtgctgagttcgagattacagtgagctaggagtgatccagtgcattccagcctgagcgacagagggagacactgtctctaaaaaaattaaaataaatcgggagcagtggctcacatctgtaatcccagcactttgggaggctgaagcaggtggatcacttgaggtcaggaatttgagaccagcctggccaacacagtgaaaccctgtctctaccgaaaatacaaaaattagctgggcatggtggctggtgcctgtaatcccagctactcgggaggctaaggcaagcgaattgcttgaacctgggaggcggaggttgcagtgagccgagatcacatcactgcattccagcctgggcgatggagcgagaacctgtctcataacccgggatactaacatattgttatttccccctctncctttctctctct

SEQ ID NO: 52448 - DNA, 2450 bp, Homo sapiens
  misc_feature (2437)..(2437): n is a, c, g, or t
taggctaggtacgggccgggtgttaatcggccgagggctgcttgccagctctgtgctgtggcaagttacttcctctccccaggtctctcggtttcctcatctgctgcctctccagacttctgccagaacattgcacgcgacagtttcaggcacagaactgactggcagcaggggctgctccacgagtgggaatttgctccagcacttcacggactgcaagcgaggcacttgctaactcttggataacaagacctctgccagaagaaccatggctttggaaggcggagttcaggctgaggagatgggtgcggtcctcagtgagcccctgcctccctgaacataggaaacccacctgggcagccatggaatgggacaatggcacagcgtaaccgcactgtctgctatgacctcagcccgcctgccctggccacccactatatgccctatggcatggctctcactgtcatcggcttcctgctgccctttgctgccctgctggcctgctactgtctcctggcctgccgcctgtgccgccaggatggcccggcagagcctgtggcccaggagcggcgtggcaaggcggcccgcatggccgtggtggtggctgctgcctttgccatcagcttcctgccttttcacatcaccaagacagcctacctggcagtgcgctcgacgccgggcgtcccctgcactgtattggaggcctttgcagcggcctacaaaggcacgcggccgtttgccagtgccaacagcgtgctggaccccatcctcttctacttcacccagaagaagttccgccggcgaccacatgagctcctacagaaactcacagccaaatggcagaggcagggtcgctgagtcctccaggtcctgggcagccttcatatttgccattgtgtccggggcaccaggagccccaccaaccccaaaccatgcggagaattagagttcagctcagctgggcatggagttaagatccctcacaggacccagaagctcaccaaaaactatttcttcagccccttctctggcccagaccctgtgggcatggagatggacagacctgggcctggctcttgagaggtcccagtcagccatggagagctggggaaaccacattaaggtgctcacaaaaatacagtgtgacgtgtactgtcaaaaaggggtatgctccatgctttgagtcaccaatgaagcgggtgagggaagatgagagggggaggtgagagcttctgggaaggggcatttgagctgggttttgagggatgattatgagctctctggagaggagtgatattccatttatttagaaagcctttactgacaccttgtgctcaggcctgtgttggttctggggccctagaagaaccagtcctagccctggtccatacgggctcccaactgctggaagtacagactggcacagcaacatcagggttgtgacagagggaagcatggctggggggagggggtacacagacagtgcccatgacccagtccaaggagtcaggaaagagctctctgaggagggagcatctgagccagatgttgagggctgagtgggaacttggcaagcagaagtggggagcactttaatgcaacccaggtatgctccatgcatatccagctgggccagcctcgtgctgggctctgccctgggcagacaggcagagggccagagcagaggacacatggccttgcgtgtgtgaaagctgagaaaatgggagctgtgcttcagctaccctccagacaagggcaagagttagccagatgctccaggcagtgggaagccaatggagggattaagcggcggaagcttcttagaagaggcagggggcgaagtgcagtggctcatgcctgtaatctcagcaatttgggaggccaaggaaggaggaatgcttgagcccaagagttttagaccagcctgggcaacacagtaagaccctgtttctacaaaaaaatataaaaaatagcctggtgtggtggtgtctgactgtagtactaactactcaggaagctgaggtgctgagttcgagattacagtgagctaggagtgatccagtgcattccagcctgagcgacagagggagacactgtctctaaaaaaattaaaataaatcgggagcagtggctcacatctgtaatcccagcactttgggaggctgaagcaggtggatcacttgaggtcaggaatttgagaccagcctggccaacacagtgaaaccctgtctctaccgaaaatacaaaaattagctgggcatggtggctggtgcctgtaatcccagctactcgggaggctaaggcaagcgaattgcttgaacctgggaggcggaggttgcagtgagccgagatcacatcactgcattccagcctgggcgatggagcgagaacctgtctcataacccgggatactaacatattgttatttccccctctncctttctctctct

SEQ ID NO: 52449 - DNA, 2266 bp, Homo sapiens
accggtggtcagagtgaaacagaacagaacgggaggtttcacaatgtccttccatacaatctctggaatctatagataacaacagctgctaggtcaggggtcgaattttaactaccaggcttaggtcaggcaggcccaggcctggtttcgggtctggttccttggtttcgggtctggttccttggtttcaggtctggtttttaggcgccgggctacctgcctttagtttcgcttctctttccttttccgagtataaaacagtatgagagggtctctctcctccctcagtgccatcctcatccctgggtgggagttgtctggatccatagggttggagccacagataacagagccattaatctcggggtctcagcctctcttaacggaccttccaggcactgctgagaaaaccaggttaatggtttcctgcggcagcaatgagcagaagcagggccatctccagactccagagaagccaggagagggctggggtgataatggggaggaggataaaaaacagccacccaatgcgtgccttccctgtgccaggcccttgtcctgaaatgttatctcactccatcctcccaacagtcccttgggctaaattggtgatgctgcttgtttgagtgagcaaacagagggtgaatgaagtgacttgcgggcagctgggtagaggatgaggtcagcattggtgtaaaggactggagcttcagggttctcgggattcgagtcctggccctgctgcttgccagctctgtgctgtggcaagttacttcctctccccaggtctctcggtttcctcatctgctgcctctccagacttctgccagaacattgcacgcgacagtttcaggcacagaactgactggcagcaggggctgctccacgagtgggaatttgctccagcacttcacggactgcaagcgaggcacttgctaactcttggcctccctgaacataggaaacccacctgggcagccatggaatgggacaatggcacaggccaggctctgggcttgccacccaccacctgtgtctaccgcgagaacttcaagcaactgctgctgccacctgtgtattcggcggtgctggcggctggcctgccgctgaacatctgtgtcattacccagatctgcacgtcccgccgggccctgacccgcacggccgtgtacaccctaaaccttgctctggctgacctgctatatgcctgctccctgcccctgctcatctacaactatgcccaaggtgatcactggccctttggcgacttcgcctgccgcctggtccgcttcctcttctatgccaacctgcacggcagcatcctcttcctcacctgcatcagcttccagcgctacctgggcatctgccacccgctggccccctggcacaaacgtgggggccgccgggctgcctggctagtgtgtgtagccgtgtggctggccgtgacaacccagtgcctgcccacagccatcttcgctgccacaggcatccagcgtaaccgcactgtctgctatgacctcagcccgcctgccctggccacccactatatgccctatggcatggctctcactgtcatcggcttcctgctgccctttgctgccctgctggcctgctactgtctcctggcctgccgcctgtgccgccaggatggcccggcagagcctgtggcccaggagcggcgtggcaaggcggcccgcatggccgtggtggtggctgctgcctttgccatcagcttcctgccttttcacatcaccaagacagcctacctggcagtgcgctcgacgccgggcgtcccctgcactgtattggaggcctttgcagcggcctacaaaggcacgcggccgtttgccagtgccaacagcgtgctggaccccatcctcttctacttcacccagaagaagttccgccggcgaccacatgagctcctacagaaactcacagccaaatggcagaggcagggtcgctgagtcctccaggtcctgggcagccttcatatttgccattgtgtccggggcaccaggagccccaccaaccccaaaccatgcggagaattagagttcagctcagctgggcatggagttaagatccctcacaggacccagaagctcaccaaaaactatttcttcagccccttctctggcccagaccctgtgggcatggagatggacagacctgggcctggctcttgagaggtcccagtcagccatggagagctggggaaaccacattaaggtgctcacaaaaatacagtgtgacgtgtactgtc

SEQ ID NO: 52450 - DNA, 3387 bp, Homo sapiens
aaggacagaggaggggcccttcctgtcagctggctgggagcagaggtggctttgtcttttcggaagaactggttctgtggaatttgtgcttatttcccatcaaggatcaaggacctgctctggggctacctcagggccccacaggatgaggggctggttttcagatgagttttctgcttgcctgtcatctggatagtgtctaaaaatttgcaaactgccttcttgtcagtgtcttgctcattcttcatgacactcctgatatgtctctcggtttcctcatctgctgcctctccagacttctgccagaacattgcacgcgacagtttcaggcacagaactgactggcagcaggggctgctccacgagtgggaatttgctccagcacttcacggactgcaagcgaggcacttgctaactcttggataacaagacctctgccagaagaaccatggctttggaaggcggagttcaggctgaggagatgggtgcggtcctcagtgagcccctgcctccctgaacataggaaacccacctgggcagccatggaatgggacaatggcacaggccaggctctgggcttgccacccaccacctgtgtctaccgcgagaacttcaagcaactgctgctgccacctgtgtattcggcggtgctggcggctggcctgccgctgaacatctgtgtcattacccagatctgcacgtcccgccgggccctgacccgcacggccgtgtacaccctaaaccttgctctggctgacctgctatatgcctgctccctgcccctgctcatctacaactatgcccaaggtgatcactggccctttggcgacttcgcctgccgcctggtccgcttcctcttctatgccaacctgcacggcagcatcctcttcctcacctgcatcagcttccagcgctacctgggcatctgccacccgctggccccctggcacaaacgtgggggccgccgggctgcctggctagtgtgtgtagccgtgtggctggccgtgacaacccagtgcctgcccacagccatcttcgctgccacaggcatccagcgtaaccgcactgtctgctatgacctcagcccgcctgccctggccacccactatatgccctatggcatggctctcactgtcatcggcttcctgctgccctttgctgccctgctggcctgctactgtctcctggcctgccgcctgtgccgccaggatggcccggcagagcctgtggcccaggagcggcgtggcaaggcggcccgcatggccgtggtggtggctgctgcctttgccatcagcttcctgccttttcacatcaccaagacagcctacctggcagtgcgctcgacgccgggcgtcccctgcactgtattggaggcctttgcagcggcctacaaaggcacgcggccgtttgccagtgccaacagcgtgctggaccccatcctcttctacttcacccagaagaagttccgccggcgaccacatgagctcctacagaaactcacagccaaatggcagaggcagggtcgctgagtcctccaggtcctgggcagccttcatatttgccattgtgtccggggcaccaggagccccaccaaccccaaaccatgcggagaattagagttcagctcagctgggcatggagttaagatccctcacaggacccagaagctcaccaaaaactatttcttcagccccttctctggcccagaccctgtgggcatggagatggacagacctgggcctggctcttgagaggtcccagtcagccatggagagctggggaaaccacattaaggtgctcacaaaaatacagtgtgacgtgtactgtcaaaaaggggtatgctccatgctttgagtcaccaatgaagcgggtgagggaagatgagagggggaggtgagagcttctgggaaggggcatttgagctgggttttgagggatgattatgagctctctggagaggagtgatattccatttatttagaaagcctttactgacaccttgtgctcaggcctgtgttggttctggggccctagaagaaccagtcctagccctggtccatacgggctcccaactgctggaagtacagactggcacagcaacatcagggttgtgacagagggaagcatggctggggggagggggtacacagacagtgcccatgacccagtccaaggagtcaggaaagagctctctgaggagggagcatctgagccagatgttgagggctgagtgggaacttggcaagcagaagtggggagcactttaatgcaacccaggtatgctccatgcatatccagctgggccagcctcgtgctgggctctgccctgggcagacaggcagagggccagagcagaggacacatggccttgcgtgtgtgaaagctgagaaaatgggagctgtgcttcagctaccctccagacaagggcaagagttagccagatgctccaggcagtgggaagccaatggagggattaagcggcggaagcttcttagaagaggcagggggcgaagtgcagtggctcatgcctgtaatctcagcaatttgggaggccaaggaaggaggaatgcttgagcccaagagttttagaccagcctgggcaacacagtaagaccctgtttctacaaaaaaatataaaaaatagcctggtgtggtggtgtctgactgtagtactaactactcaggaagctgaggtgctgagttcgagattacagtgagctaggagtgatccagtgcattccagcctgagcgacagagggagacactgtctctaaaaaaattaaaataaatcgggagcagtggctcacatctgtaatcccagcactttgggaggctgaagcaggtggatcacttgaggtcaggaatttgagaccagcctggccaacacagtgaaaccctgtctctaccgaaaatacaaaaattagctgggcatggtggctggtgcctgtaatcccagctactcgggaggctaaggcaagcgaattgcttgaacctgggaggcggaggttgcagtgagccgagatcacatcactgcattccagcctgggcgatggagcgagaacctgtctcaaaaaaaacccaaaaaaaacaaaattaaataataactaagaaaaaaaaaaaaaaaaaaaactcgagacctagttctctatccagcgtaaccgcactgtctgctatgacctcagcccgcctgccctggccacccactatatgccctatggcatggctctcactgtcctcggcttcctgctgccctttgctgccctgctggcctgctactgtctcctggcctgccgcctgtgccgccaggatggcccggcagagcctgtggcccaggagcggcgtggcaagcggcccgcatgccgtggtggtggctgctgccttgccatc

SEQ ID NO: 52451 - DNA, 2991 bp, Homo sapiens
  misc_feature (2978)..(2978): n is a, c, g, or t
ctgggttccagggacgctggggccggagctgctgccgccgtctacacggtcccctcatttgacgggttcgcctcctagcagcgcctgggcgagtgacatctgggccggaccagctggtgctgcgcggcgcaggtctctcggtttcctcatctgctgcctctccagacttctgccagaacattgcacgcgacagtttcaggcacagaactgactggcagcaggggctgctccacgagtgggaatttgctccagcacttcacggactgcaagcgaggcacttgctaactcttggataacaagacctctgccagaagaaccatggctttggaaggcggagttcaggctgaggagatgggtgcggtcctcagtgagcccctgcctccctgaacataggaaacccacctgggcagccatggaatgggacaatggcacaggccaggctctgggcttgccacccaccacctgtgtctaccgcgagaacttcaagcaactgctgctgccacctgtgtattcggcggtgctggcggctggcctgccgctgaacatctgtgtcattacccagatctgcacgtcccgccgggccctgacccgcacggccgtgtacaccctaaaccttgctctggctgacctgctatatgcctgctccctgcccctgctcatctacaactatgcccaaggtgatcactggccctttggcgacttcgcctgccgcctggtccgcttcctcttctatgccaacctgcacggcagcatcctcttcctcacctgcatcagcttccagcgctacctgggcatctgccacccgctggccccctggcacaaacgtgggggccgccgggctgcctggctagtgtgtgtagccgtgtggctggccgtgacaacccagtgcctgcccacagccatcttcgctgccacaggcatccagcgtaaccgcactgtctgctatgacctcagcccgcctgccctggccacccactatatgccctatggcatggctctcactgtcatcggcttcctgctgccctttgctgccctgctggcctgctactgtctcctggcctgccgcctgtgccgccaggatggcccggcagagcctgtggcccaggagcggcgtggcaaggcggcccgcatggccgtggtggtggctgctgcctttgccatcagcttcctgccttttcacatcaccaagacagcctacctggcagtgcgctcgacgccgggcgtcccctgcactgtattggaggcctttgcagcggcctacaaaggcacgcggccgtttgccagtgccaacagcgtgctggaccccatcctcttctacttcacccagaagaagttccgccggcgaccacatgagctcctacagaaactcacagccaaatggcagaggcagggtcgctgagtcctccaggtcctgggcagccttcatatttgccattgtgtccggggcaccaggagccccaccaaccccaaaccatgcggagaattagagttcagctcagctgggcatggagttaagatccctcacaggacccagaagctcaccaaaaactatttcttcagccccttctctggcccagaccctgtgggcatggagatggacagacctgggcctggctcttgagaggtcccagtcagccatggagagctggggaaaccacattaaggtgctcacaaaaatacagtgtgacgtgtactgtcaaaaaggggtatgctccatgctttgagtcaccaatgaagcgggtgagggaagatgagagggggaggtgagagcttctgggaaggggcatttgagctgggttttgagggatgattatgagctctctggagaggagtgatattccatttatttagaaagcctttactgacaccttgtgctcaggcctgtgttggttctggggccctagaagaaccagtcctagccctggtccatacgggctcccaactgctggaagtacagactggcacagcaacatcagggttgtgacagagggaagcatggctggggggagggggtacacagacagtgcccatgacccagtccaaggagtcaggaaagagctctctgaggagggagcatctgagccagatgttgagggctgagtgggaacttggcaagcagaagtggggagcactttaatgcaacccaggtatgctccatgcatatccagctgggccagcctcgtgctgggctctgccctgggcagacaggcagagggccagagcagaggacacatggccttgcgtgtgtgaaagctgagaaaatgggagctgtgcttcagctaccctccagacaagggcaagagttagccagatgctccaggcagtgggaagccaatggagggattaagcggcggaagcttcttagaagaggcagggggcgaagtgcagtggctcatgcctgtaatctcagcaatttgggaggccaaggaaggaggaatgcttgagcccaagagttttagaccagcctgggcaacacagtaagaccctgtttctacaaaaaaatataaaaaatagcctggtgtggtggtgtctgactgtagtactaactactcaggaagctgaggtgctgagttcgagattacagtgagctaggagtgatccagtgcattccagcctgagcgacagagggagacactgtctctaaaaaaattaaaataaatcgggagcagtggctcacatctgtaatcccagcactttgggaggctgaagcaggtggatcacttgaggtcaggaatttgagaccagcctggccaacacagtgaaaccctgtctctaccgaaaatacaaaaattagctgggcatggtggctggtgcctgtaatcccagctactcgggaggctaaggcaagcgaattgcttgaacctgggaggcggaggttgcagtgagccgagatcacatcactgcattccagcctgggcgatggagcgagaacctgtctcataacccgggatactaacatattgttatttccccctctncctttctctctct

SEQ ID NO: 52452 - DNA, 196 bp, Homo sapiens
cagcagacaaacaagaatgttgaaatagctacaataaatatattcaatatattcaagtaattaaaacaaaaatcaacataagtagagaaatggaaaatataaagagccaaatggaacttataaagatgaaatataaagtatatttaatgaatttcacttatataaattacagacaagttagatactgcagaagaaa

SEQ ID NO: 52453 - DNA, 1113 bp, Homo sapiens
atttcctttccacctatttttgtgtcacaatatcttctttataaatggatcatattccttcacttatctctttcagcatcctaaacttcttttaaactttttgtatgtctattatacaaaatcaatttcatctggaataaattcatgttgtaattgttgattttattaattaccattctgagaattagaatttgccttgttttttggaattctgtattatatgcttcttagtgggagacttaatgttttgtttcctttttttctcccattatgatcactcttccaaaccagaacctgctcttaaaatgactttgcgggttcaggcttcatattgacttaatattgtgggaaactttgttaagttattattgtaaggcaacgtttttgtctccccatatcaagtccacaactttttagaaaactttactgtagataccaggttggcagattttcccagcatcctgttataaggagggacttgagcaagaaatcttgctctggctttcatggaacacatttgaaacaattcattgtccttaacagcctaaacacccagataccagagttcactaccttgaatgtctattccattcctgatcttgttttcaagtctagttatatatatattccacatttttctttttatactttattacttatgtgtgtttggagcaggaatggaagggctgtggtgatgcttgaacttaccattctattttgcctgaaagtcttaattaaaaaaatattttacaagctcaatgctgtatcataatgagtggattttagagtgagaacacagcaaatgctagaaacctcagaatgactcttaatgctaacttattaggactgactcatgttattttagcatttgaaatatctgaggagttagttacctttctttctatctcgtggtatctgaatcacccaggtcctggaccttattgtcctatttacctcattcctattctaaataataatgcacttatcacatactgagtaagcttactatgtgaaggtagataggtaaatatttcagataggttatttaatttttcacaaaaatcctgagattacagattgagtatctcttacccaaaatgaagtgtttaagat

SEQ ID NO: 52454 - DNA, 161 bp, Homo sapiens
tcaacttttacttagaaaccatttggtatggaggattatatgtttatgcaggcaagattccttttaaagaggagatgaagatgataaaagttgtttctccaatttttaatgaaacttgcttaataattcccaaatgttggcaggaaccttggaaccatttt

SEQ ID NO: 52455 - DNA, 278 bp, Homo sapiens
agcagtccttcagaggccctgagtttgcccatagttctatagatgtggaaggaccctttgcaaatgttaatagaggtaatacatgctgtttgtcaattacttgcctagtggtagtgactgttcatgttttataatcttgtgctggaactattaataccattagcaaagcatgaaatttgtgttcctagtgctttccattgacaaaccatcatacagtggggctgtaactaacaaggaaggatgaggttgcataattcatatggtgatcagatggtact

SEQ ID NO: 52456 - DNA, 822 bp, Homo sapiens
  misc_feature (164)..(164): n is a, c, g, or t
  misc_feature (346)..(346): n is a, c, g, or t
  misc_feature (447)..(447): n is a, c, g, or t
  misc_feature (573)..(573): n is a, c, g, or t
ggagaagtctggaatgcacttaatagctggtttttacaccttgatttcgaggtggaaagaaatgatcatgaatctctaataaatttaaatctcttaaaccagtaggtgcttaatatttttgattgattaatgcccatttaaatctcatgggttctattaaaaanatatatatatagggccccaatccattgccatcaaatgcccttggacttttccaaggtatattatggggttttatgcaaaattccaagctaccatgtaactttttttaaccatttaacaaggagggggaactgtttcctaccttctttacatgtgtgcattgtgtggtccagaaatgccaaanctttttaaagatggtgcaactttgagtcctggcttgactatacaggccttgaacttcatggcatatcaacttgccatatctgcaggagagctgttctatangaaatagctcagagttgcaaatatcacatgtgaatgatacggtaacttttaagaaatgtctgtattgtatttgaagactgtttgccatatcaactttgccatatctgcaggagagctgttctatangaaatagctcagagttgcaaatatcacatgtgaatgatacggtaacttttaagaaatgtctgtattgtatttgaagactgtttgccataaatctgaaatttgaacctatgtatttcaatttggtatgctaaaaagttctgaattaatgtaaagtttttggttataatattgtaatctcagttcaaaagttaactgcaaaatataaaaccaatgatttctatatagtaaattgaactgtaaaggtaaaaa

SEQ ID NO: 52457 - DNA, 696 bp, Homo sapiens
  misc_feature (164)..(164): n is a, c, g, or t
  misc_feature (346)..(346): n is a, c, g, or t
  misc_feature (447)..(447): n is a, c, g, or t
ggagaagtctggaatgcacttaatagctggtttttacaccttgatttcgaggtggaaagaaatgatcatgaatctctaataaatttaaatctcttaaaccagtaggtgcttaatatttttgattgattaatgcccatttaaatctcatgggttctattaaaaanatatatatatagggccccaatccattgccatcaaatgcccttggacttttccaaggtatattatggggttttatgcaaaattccaagctaccatgtaactttttttaaccatttaacaaggagggggaactgtttcctaccttctttacatgtgtgcattgtgtggtccagaaatgccaaanctttttaaagatggtgcaactttgagtcctggcttgactatacaggccttgaacttcatggcatatcaacttgccatatctgcaggagagctgttctatangaaatagctcagagttgcaaatatcacatgtgaatgatacggtaacttttaagaaatgtctgtattgtatttgaagactgtttgccataaatctgaaatttgaacctatgtatttcaatttggtatgctaaaaagttctgaattaatgtaaagtttttggttataatattgtaatctcagttcaaaagttaactgcaaaatataaaaccaatgatttctatatagtaaattgaactgtaaaggtaaaaa

SEQ ID NO: 52458 - DNA, 281 bp, Homo sapiens
taccaagggtcctgccctgcctagaaccttcctatcatagggctcagcaaactctcttacctgggctttgcaatgtctccactctgacctctctctccctgctcccacctgcaggtccacactctgctgaagccccacaccactgccactctggaacaggcacctccaccagccaccctgtccctccctgtcatttattctcccagctaaagcatgaatctataaaaggaagctctcttctcacaggatccaactcgtcctccaccctcacacaacactcc

SEQ ID NO: 52459 - DNA, 298 bp, Homo sapiens
tagaatctgccctcttatcagccacccacatccaccacctccaccaccccagtccaacctcatatcatcctgtggctgagtcactgcaacaacattcaaactaatttcattcacactttgccctttgctatgatgattatcttaaaacatatattagatcaagtcgctcctgtgcaagccctcaacaatttcccctatttctcaggatcgaaataaaattccttgtcataggctttacaagatcttatatgatctggccaccccagttacttctctgtcttcctttcctatttccttg

SEQ ID NO: 52460 - DNA, 575 bp, Homo sapiens
tgggagtgggtgggcccagggttggggtgaatgccggggacctgccaggcacataggagctagcccacaaatgttcccagatgagggcctggttggagcacagagggtttgtcatgtctgcctgtcccggcagcccctttacctcccagtgaggggcttgggtcaggcactgttgtccccattttacagatgagaacgctgaggctgagattcccagatcaacctgggtctctctctgccccagcccagcctggctgatgctgcccttctgtccccagtgacccgtgtccgttctcagggctttgtcaccctcctcttcaacgtggtgaccaaggacatgaggaaactgggctatgacactgggccttctgatacacagggtgtgttggggcccagcccaccccagagcttcccccagtgaaggctccacaggctgcacagtctctgataatgaagggctgccttcccgaagtcagccgctgcccatcggcctgaggggcagcctggtggccagagctgggggcacacagaatagttttgtataataaagtctcattttcagagaaaaaaaaaat

SEQ ID NO: 52461 - DNA, 977 bp, Homo sapiens
cagcgacatctagtggctgaatgtattttaaacactcggcttgctgagggcgtgagtcggagcgctgctccccaggactcagctctcattcgcctctgcgcttcggcggggacggggagccgggccgagtcagagtgaacacacactccctgcgcgtgcaactgagtcgagcgtttccagagtatgatgacctctactgcaagtactgctttgtgtacggccaggactgggcccccacagcgggtctggaggaggggatctcacagatcacatccaagagccaagatgtgcggcaagcactggtgtggaacttccccattgatgtcacctttaaaagcaccaacccctacggctggccacagatcgtgctcagcgtgtatggaccagatgtgttcgggaacgatgtggttcgaggctatggggccgtgcacgtgcccttctcacctggccggcacaaaaggaccatccccatgtttgtcccagaatctacgtctaaactgcagaagtttacaagatctgcaagctgctccacccactgaggacaaatagaaacaggtcccctgggagtgctgagtcacggggctcccttcagccctgttccagcagcagaaggccgggcgattttaccctgtgccctgtgaaaaatctttgtgtctgagggagcagaggaaaaactcttgtcagatgggaaaaatgctcatgacataatgtgacattaaaaggtgggaaacaagaggatatagcagtatgagtcagacaccttggaacagtaatcatgataaatgcctttacatgtgggagtctctggccggagctgacatttgcgcagaggcttagtgtggagggaagagccggggaagaacatcaggcacagggaacagtgcctgccaggctgaggagagcgtgagcttagcatgctagagaagccaggacggtggtgtggccaggacggcagtgtggccagtaagtggtaagcc

SEQ ID NO: 52462 - DNA, 821 bp, Homo sapiens
ctgcgccggccgcatgcaattcacgcgcactcgcgtggccttcgcgaaggtgtcgctgccaagaaacgtgtcctgcgcgctacgccgtctgtttctagggcaacgccggcgtctcttagcaaccgcgcgcggcctaggtgggtccccccggcacccccagacctgccatggcgaccgcgagtcctagcgtctttctactcatggtcaacgggcaggtggagagcgcccagtttccagagtatgatgacctctactgcaagtactgctttgtgtacggccaggactgggcccccacagcgggtctggaggaggggatctcacagatcacatccaagagccaagatgtgcggcaagcactggtgtggaacttccccattgatgtcacctttaaaagcaccaacccctacggctggccacagatcgtgctcagcgtgtatggaccagatgtgttcgggaacgatgtggttcgaggctatggggccgtgcacgtgcccttctcacctggccggcacaaaaggaccatccccatgtttgtcccagaatctacgtctaaactgcagaagtttacaagtttgtgcctggtcgcctcctcagatctgcaagctgctccacccactgaggacaaatagaaacaggtcccctgggagtgctgagtcacggggctcccttcagccctgttccagcagcagaaggccgggcgattttaccctgtgccctgtgaaaaatctttgtgtctgagggagcagaggaaaaactcttgtcagatgggaaaaatgctcatgacataatgtgacattaaaaggtgggaaacaagaggatat

SEQ ID NO: 52463 - DNA, 882 bp, Homo sapiens
ctgcgccggccgcatgcaattcacgcgcactcgcgtggccttcgcgaaggtgtcgctgccaagaaacgtgtcctgcgcgctacgccgtctgtttctagggcaacgccggcgtctcttagcaaccgcgcgcggcctaggtgggtccccccggcacccccagacctgccatggcgaccgcgagtcctagcgtctttctactcatggtcaacgggcaggtggagagcgcccagtttccagagtatgatgacctctactgcaagtactgctttgtgtacggccaggactgggcccccacagcgggtctggaggaggggatctcacagatcacatccaagagccaagatgtgcggcaagcactggtgtggaacttccccattgatgtcacctttaaaagcaccaacccctacggctggccacagatcgtgctcagcgtgtatggaccagatgtgttcgggaacgatgtggttcgaggctatggggccgtgcacgtgcccttctcacctggccggcacaaaaggaccatccccatgtttgtcccagaatctacgtctaaactgcagaagtttacaagctggttcatggggcggcggcccgagtacacagaccccaaggtggtggctcagggtgaaggccgggaagtgacccgtgtccgttctcagggctttgtcaccctcctcttcaacgtggtgaccaaggacatgaggaaactgggctatgacactgggccttctgatacacagggtgtgttggggcccagcccaccccagagcttcccgaagtcagccgctgcccatcggcctgaggggcagcctggtggccagagctgggggcacacagaatagttttgtataataaagtctcattttcagagaaaaaaaaaat

SEQ ID NO: 52464 - DNA, 936 bp, Homo sapiens
ctgcgccggccgcatgcaattcacgcgcactcgcgtggccttcgcgaaggtgtcgctgccaagaaacgtgtcctgcgcgctacgccgtctgtttctagggcaacgccggcgtctcttagcaaccgcgcgcggcctaggtgggtccccccggcacccccagacctgccatggcgaccgcgagtcctagcgtctttctactcatggtcaacgggcaggtggagagcgcccagtttccagagtatgatgacctctactgcaagtactgctttgtgtacggccaggactgggcccccacagcgggtctggaggaggggatctcacagatcacatccaagagccaagatgtgcggcaagcactggtgtggaacttccccattgatgtcacctttaaaagcaccaacccctacggctggccacagatcgtgctcagcgtgtatggaccagatgtgttcgggaacgatgtggttcgaggctatggggccgtgcacgtgcccttctcacctggccggcacaaaaggaccatccccatgtttgtcccagaatctacgtctaaactgcagaagtttacaagctggttcatggggcggcggcccgagtacacagaccccaaggtggtggctcagggtgaaggccgggaagtgacccgtgtccgttctcagggctttgtcaccctcctcttcaacgtggtgaccaaggacatgaggaaactgggctatgacactgggccttctgatacacagggtgtgttggggcccagcccaccccagagcttcccccagtgaaggctccacaggctgcacagtctctgataatgaagggctgccttcccgaagtcagccgctgcccatcggcctgaggggcagcctggtggccagagctgggggcacacagaatagttttgtataataaagtctcattttcagagaaaaaaaaaat

SEQ ID NO: 52465 - DNA, 798 bp, Homo sapiens
ctgcgccggccgcatgcaattcacgcgcactcgcgtggccttcgcgaaggtgtcgctgccaagaaacgtgtcctgcgcgctacgccgtctgtttctagggcaacgccggcgtctcttagcaaccgcgcgcggcctaggtgggtccccccggcacccccagacctgccatggcgaccgcgagtcctagcgtctttctactcatggtcaacgggcaggtggagagcgcccagtttccagagtatgatgacctctactgcaagtactgctttgtgtacggccaggactgggcccccacagcgggtctggaggaggggatctcacagatcacatccaagagccaagatgtgcggcaagcactggtgtggaacttccccattgatgtcacctttaaaagcaccaacccctacggctggccacagatcgtgctcagcgtgtatggaccagatgtgttcgggaacgatgtggttcgaggctatggggccgtgcacgtgcccttctcacctggccggcacaaaaggaccatccccatgtttgtcccagaatctacgtctaaactgcagaagtttacaagatctgcaagctgctccacccactgaggacaaatagaaacaggtcccctgggagtgctgagtcacggggctcccttcagccctgttccagcagcagaaggccgggcgattttaccctgtgccctgtgaaaaatctttgtgtctgagggagcagaggaaaaactcttgtcagatgggaaaaatgctcatgacataatgtgacattaaaaggtgggaaacaagaggatat

SEQ ID NO: 52466 - DNA, 879 bp, Homo sapiens
cagcgacatctagtggctgaatgtattttaaacactcggcttgctgagggcgtgagtcggagcgctgctccccaggactcagctctcattcgcctctgcgcttcggcggggacggggagccgggccgagtcagagtgaacacacactccctgcgcgtgcaactgagtcgagcgtttccagagtatgatgacctctactgcaagtactgctttgtgtacggccaggactgggcccccacagcgggtctggaggaggggatctcacagatcacatccaagagccaagatgtgcggcaagcactggtgtggaacttccccattgatgtcacctttaaaagcaccaacccctacggctggccacagatcgtgctcagcgtgtatggaccagatgtgttcgggaacgatgtggttcgaggctatggggccgtgcacgtgcccttctcacctggccggcacaaaaggaccatccccatgtttgtcccagaatctacgtctaaactgcagaagtttacaagctggttcatggggcggcggcccgagtacacagaccccaaggtggtggctcagggtgaaggccgggaagtgacccgtgtccgttctcagggctttgtcaccctcctcttcaacgtggtgaccaaggacatgaggaaactgggctatgacactgggccttctgatacacagggtgtgttggggcccagcccaccccagagcttcccccagtgaaggctccacaggctgcacagtctctgataatgaagggctgccttcccgaagtcagccgctgcccatcggcctgaggggcagcctggtggccagagctgggggcacacagaatagttttgtataataaagtctcattttcagagaaaaaaaaaat

SEQ ID NO: 52467 - DNA, 1025 bp, Homo sapiens
ctgcgccggccgcatgcaattcacgcgcactcgcgtggccttcgcgaaggtgtcgctgccaagaaacgtgtcctgcgcgctacgccgtctgtttctagggcaacgccggcgtctcttagcaaccgcgcgcggcctaggtgggtccccccggcacccccagacctgccatggcgaccgcgagtcctagcgtctttctactcatggtcaacgggcaggtggagagcgcccagtttccagagtatgatgacctctactgcaagtactgctttgtgtacggccaggactgggcccccacagcgggtctggaggaggggatctcacagatcacatccaagagccaagatgtgcggcaagcactggtgtggaacttccccattgatgtcacctttaaaagcaccaacccctacggctggccacagatcgtgctcagcgtgtatggaccagatgtgttcgggaacgatgtggttcgaggctatggggccgtgcacgtgcccttctcacctggccggcacaaaaggaccatccccatgtttgtcccagaatctacgtctaaactgcagaagtttacaagctggttcatggggcggcggcccgagtacacagaccccaaggtggtggctcagggtgaaggccgggaagatgagaacgctgaggctgagattcccagatcaacctgggtctctctctgccccagcccagcctggctgatgctgcccttctgtccccagtgacccgtgtccgttctcagggctttgtcaccctcctcttcaacgtggtgaccaaggacatgaggaaactgggctatgacactgggccttctgatacacagggtgtgttggggcccagcccaccccagagcttcccccagtgaaggctccacaggctgcacagtctctgataatgaagggctgccttcccgaagtcagccgctgcccatcggcctgaggggcagcctggtggccagagctgggggcacacagaatagttttgtataataaagtctcattttcagagaaaaaaaaaat

SEQ ID NO: 52468 - DNA, 268 bp, Homo sapiens
aaaatacaaaagttagccaggcacagtggtgcatgtctgtaatcccagctactcaggaggctgaggcagaagagtcgcttgaacctgggaggcagaggttgcagtgagccgagatcgtgccattacactccagcctggatgacggagcaagactctgtcttaaaaataaataaataaaataaactaaaacagaaaaagaaatagatacttcaacttctggctgcggggaacacccatattaatgcctgttctataaggtcacaagcaa

SEQ ID NO: 52469 - DNA, 404 bp, Homo sapiens
cagagaacctttgtgtcccctgggtgttctagcccagtatatctcaaactttgctgcactgaggaccttgttgaaatgcaggttctcatctggcaggctcagtcggccagcaaatgtgcattgctttaggaagctcaccctgagtagcaagtttcagtgaggaccaggcagccctgcctgccctctcagctgggcttaaccctggctctcgcccgccagagttcctcccctcaaaataggagctattttcaaaacgcctcttggaaaaaaggccctgttttaaaattggggtgtttaggattggccatctgctcaccatggggttttaagacctttgcccaaacccccgcaaccaacttagaactgacattttcactcttgaagggcccactccacaccatgtt

SEQ ID NO: 52470 - DNA, 1248 bp, Homo sapiens
tctcaggctgacagagatttgaattctccctgagatggagtgccccgagggaggggtgggctgccatatttgatgttttggcaacttagccattccaacctttgggctttaaggagtcccagctgacttagggtggatatagcccaccagcacagcacagctgctgtacaaaagcatagccagactgcttctttaagcaggtcccggattcattcctcctcactgtttgggacttcccaactggggcctccagccacccccactggtgttctcctgctgacagtgatttcagttttttcttggctggagctccctgatggaggggcaggccatcatgtttgctgtttttgcaacttaaccacttcaaccttcagtctttggagtgtccaaggagaccaggggctgatgtggaccctcagcatagcacagatgctctataaaaatgtggtcagactgctttttaagcactttcccaatgtcattccgcctcactgggcaaaaccccctaactggggtctccagctacctcctacaggtgtgtttgggccagcaacaagttcattcatacctccctagggcaaagcttccaaagggagcagtaggctgccaacttttctgtttcacagccttcactgatgataactccaggtactggaaaatctgaggctactagagactgaagtgggccctgggcatactgcagcagccctatggaaaagtggccagactgttacctgggttcccattcctgtatcttctcactaggcaagtcttgcaggcctgggcctctacctaacccccctgccagagctgtcgagccagtagcaactcagccactccctggacagagcctccaggggcaactgaaagcctctctgccactgcttctgcagtggaactgtccttgctaccctcagactgatgaaggagctaacacccttatctacaccttcaacaagctttaattgaccaaagcccatctcccacgggttttacacactccccactgctcataacagacagggaacccctggattggcccccacagcatgaattctccatcctgcttgctgattgcaataaacagttgctgacctgtattctccgggggtagaaccctgaggagacaaacaaaagacccttggctacaaccactactaatgtcccttcctcttcttccccaaagttagggaagaaatataaacactgagattgccccagagctgcagtgggcagcctaggagtgcc

SEQ ID NO: 52471 - DNA, 572 bp, Homo sapiens
tggcagctggcgaagcttctcgtgctgctcctgaagcctgtcctcctgcttccgaagcctgggttcccattcctgtatcttctcactaggcaagtcttgcaggcctgggcctctacctaacccccctgccagagctgtcgagccagtagcaactcagccactccctggacagagcctccaggggcaactgaaagcctctctgccactgcttctgcagtggaactgtccttgctaccctcagactgatgaaggagctaacacccttatctacaccttcaacaagctttaattgaccaaagcccatctcccacgggttttacacactccccactgctcataacagacagggaacccctggattggcccccacagcatgaattctccatcctgcttgctgattgcaataaacagttgctgacctgtattctccgggggtagaaccctgaggagacaaacaaaagacccttggctacaaccactactaatgtcccttcctcttcttccccaaagttagggaagaaatataaacactgagattgccccagagctgcagtgggcagcctaggagtgcc

SEQ ID NO: 52472 - DNA, 625 bp, Homo sapiens
cattttcaactttcaagttttattcgttcattatttttgcaacacctgtttggtgcaagtcactgtgctgggtactataggaaatatatttagctttttgcttctcagattgtagagacagaccacacatgcataatcccaattcgaggcagcatatgccacatgtcacagaagaggctgtcacaggcagtagccactgttgcatagctacttcaaagccattcccagcttgttccacctgccaacacaacgcagctctgtcctggtgtgggacacccatgtgcattggaggggctgggcttcactaccagggtgaaccttcccctaagccaatcaaggtaattccagttgtttcgccagggcctggttaaggaaccagcatgtgatgtaattatggaaatgagaggtgagccctgggcattactgcgtgagcacattgtgcttgtgcttgtgcttgtgcctggtgcttgaggttgctgcagccgtcttgtgaccagaatgggacaaacacgaggacaaaagctaccgctcaatagcaaggcaacacagaaagctgaaaagagcatgggccccgatagagtgttgagcccctgaattaaccaaccttgacaccaaaccttgctct

SEQ ID NO: 52473 - DNA, 361 bp, Homo sapiens
cctgattaaaggcaagatcaaatgagctcacgggcatttccactagtgaccagtgacctcagagcaaatcttccttaattcccaaagcataatttgaatttttatgagaagtgaaaggaggaggtcagttattttggacaaatattatttcaaactcatagaacagatgtttcaagtgattccctacttttctgcctgcttcccttcctaaaactgtgcttccccttttgtaaatcttagtgtgcagcctatgattgcaagctgagctgtgggccttgaaagactcgtggtgaaagtgaatctgaacagcaaagctgctgcaattcaggagcaggggtaaagaaggaagggccagtagcat

SEQ ID NO: 52474 - DNA, 324 bp, Homo sapiens
gcgcaggtttggcagggagcagggagacatgctggcaggcatgcatggtggctttgatttgaggagctgttggtgggaatgaaaagcctaataagcacgtgggctttggatctgccaccccccagctctgccaacagctgtgagaccttgggcgggttgttcagcagccctgtacctcagtttccccatcagtaaaatgtgcatatggttgtgaggactgaattagctagtatctgatctaagttgtccagtacgggagactggccacgtgcaactgtgaagtacttcaaaaggtggcttttctgaactgagatgtgcttttga

SEQ ID NO: 52475 - DNA, 303 bp, Homo sapiens
ctgcatatccaatcccactatccattccccttcctgtgccttcttttcccccaaagcccgttatcatcacccaaccacctgtatatttcaatcctttctcttgtttatctattcctatgaaggcaaggatttggggctattttgtctcctgctgtgtttgctaggcctagcaccgtgattggcacataaagggtactgaatacttactggggaataaatgattggatgtttgcatgcccgggtctccggccccctctgggatgctggcctctgtcccgcatcctcaaggtctgcccacacctg

SEQ ID NO: 52476 - DNA, 901 bp, Homo sapiens
ttcttccagccagcattcatcctttaatgttcgtgcccgtctccttagtgcttgatagaaaggatgcacttcttatgttagcaatgcttgtggagcctttgtggtcattctcagacatgcacagagtggggaaaaacattgagtcacctggaatccacgttcagctgaggttgaaccagcaatcctggaatcagggcactacgggtaaccacattctcactttacaaatgataactcacacaccccatggaagatccgggaagtcttctgatgcccctgctttccaagacaatatgatgcttctctacattccatggactatgacaagtatatcagtcgtcgaagtgggtggtttaatggcatgattagctccattttctcttcctgcagcatagcaaagtgcataaagcttgagctctgtgtccagcagatctttattagaattccagtccccccacagttacatatgctctctccctgacagttttcacagatgaatcatccagactccatttcctattagagctggaccctccacttggacttttgacacttagacccctctagcccacacagggacatcagtgcaataattctcccctttctacagcatcattaaattttgcctctctcctggatcatcccattcacatattcatatgctgctatttctcccatctaaaactgaccaggcactgtggctcatgtctataatcctagcactttgggaggccaaggctggcagatcacttgaggctaggagtttgagaccagcctggccaacatgacaaaaccccatctctactaaaaatacaaaaattagcagggtgtgctgcactccagcttgggcgacagagcaagacactgtctcaaaataaataaataattaattaaaaataaa

SEQ ID NO: 52477 - DNA, 409 bp, Homo sapiens
tttattaaacacctactagataccagacatttgctgactcttctattttcttctcttcttcagtgacagcttcattgttctggttgagatttaaacattaataaaatgaaattgcaaagccagaacttaatattacaaaatatgttctaagtagagcaaaccacattgtttagaaatctgggccaaatggattaacatctatctcaggagctgagaaacttgtatggctttatgctgtggtctaagatctcctctgaatactcaacatccttaagtccctgtatcagtttcttagggttgccacacaaatcaccacacactgggtggcttaaagcgacaggtatgtattttctcacagtgctggaggccagaagtctgaagtcaaagtgtcagcagggctctctgaggg

SEQ ID NO: 52478 - DNA, 1356 bp, Homo sapiens
caaacatttgaggctatttttacatgccattaatctaaatatgataaggatgtgttataggacacaaggaaaacttccttcgcctgaaataaatgccttccttgctaattccttaattttataccggagaaaaaccaaagcaaaagacagaaaaatacatttcctctgttaagttcctgataaattagcattttaaaagaaaacgaatataaccatagaattaattcatcaactttacagagctgtgaatatccattatggcccaaattatcctttcatttccattaagacacatgggcactgaagggaacctatgttcaaaatcttaccctctttgcctcagcctgccttggaagataaaatatgaaaggatctttagccatgaatgctttaaaaaatttaggaagtcgaagcatgaggcagacattttcttcagattgccttttataaatagaaatgatgaaatttaaaaataattaccagttgtgaatataatatttaagcttagatcttcagattgcactttttcgttttgcaaactgcaggaaaaagtgtcattaatataaacagccttagatgaaatagtgactcataaatacgtataattttctgtacgtgtccttgtttgtaccatgatcttagacaaaagatgaaatgcccagttaaggttatgactgaaaagagcttacacatcttttttttgaaaactcttgacttctcgtcgctttctgcttagatgtgcagttttggaaaacagaactgaagttttggctttgtgtctttactcacatggttatattgctcaacctgatctacagaaattattttgtcaaaagtagctttaagacctttcatttctgtacattttgatacttattttaaagcatcaagcagtgattaggattaggagcaatgttgacttcttttcaagttatatctcttacatgtgtcatgccctgtctggatttttaaagggaaattggctctgtccgtttatttataccacctcaattttgttccagtaagtaacagtagaccttctattgtatgcctttgggcaatatatttttttaaaatgcagccaaatgcagtggctcctgcctgtgatcccggcacttcaggaggctggaggatcacttgagcccaggagttcaagatcagcctgggcaacatagcaagaccccatctctacaaaaaatttttaaaattagctgggtgtggtgacacatgtctctagtcccaactactcaggaggctaaggcaggagactcgcttgagcccaggaatacaaggcttcagtgagccataattgaaaccactgcactgcagtcaggcaacagagcaagacctagtttc

SEQ ID NO: 52479 - DNA, 470 bp, Homo sapiens
aagtataccctcacttagcttgcagacccaaggcactccagcccctttcaagaagcttgcactttctgatattttctccatcactcttgcctcctgtggtagaggagctttgggctactccttaacaaatcattcatggatcggcagcaaatctgcaacatatggaaatatttgccaatttttgtcctcagctttgggtctcagccaaaatggagatttaggaaagtctcatttagcatcctctagcctgcttttggctgttttgttttgtttttgtgtttgttttttagagacagggtcttactctgttgccagactggaatgcggtggtgtgaccatagctcactgcagcctcaaactcctgggctcatgcaatcctcctgcctcagccttctgagtagctaggcctgtagtctcagagggaactgtcttcaataaagttggcactgtccacatacactccttaagtt

SEQ ID NO: 52480 - DNA, 302 bp, Homo sapiens
ctagcatacatcgtgtgctattccttgggcacagaaaaataagaatagatccggtcatgtaggcaggggaagaaacccaaagaagacgagacctcttctgccatgaacctagactgccaagaatgggactgggttttcacagtgctttggtggctttaaatctacattcgatagtttataatacattttcttaaagccaacctaaatatataaatttccctttcctcatcgattatttaattttgtatttcatttctgatagacagaagtgactatattttgttttcagttgcattctttat

SEQ ID NO: 52481 - DNA, 522 bp, Homo sapiens
gtgatcctcctgccttggcctcccaaagtgctaggattacaggcgtgagccaccatgcccagcctggtgtttatctttaaagtgggcacagccacaggagttcacctgactcctggtctgagagtcacgagatcgttcaagatagtgaggccctcttttccaaaacgaggaccaaaaatcaattgacagtgttggtcaagatggtagaaaccttaaaatgatagaaatctcaactctgaaataaaaactttatttgtatatttatttaccactattttgacatagggctaaggtctttttctttgagctgatttctggttttgttttcttaaagtggcataagaattcaaagacattttgaggaaggctgagtgcagaaatctctctttttaaatgacttctcctttcttttaacttgcactgttgtctagccctcacttattttgtcaattctttttagctgtttgtctttgaatcttcataaagccatagcttttctcataagaagcagcactttctttg

SEQ ID NO: 52482 - DNA, 474 bp, Homo sapiens
ctccgtcgcccaggctggagtgtggtggcacgatcttggctcattgcaagctccacctcccgggtttaagcaattctcctgcctccacctcccgagtagctgggattacaggcatgcaccaccatgcccagcaaatttttttttttgtatttttagtagaaaccttaaaatgatagaaatctcaactctgaaataaaaactttatttgtatatttatttaccactattttgacatagggctaaggtctttttctttgagctgatttctggttttgttttcttaaagtggcataagaattcaaagacattttgaggaaggctgagtgcagaaatctctctttttaaatgacttctcctttcttttaacttgcactgttgtctagccctcacttattttgtcaattctttttagctgtttgtctttgaatcttcataaagccatagcttttctcataagaagcagcactttctttg

SEQ ID NO: 52483 - DNA, 317 bp, Homo sapiens
ctgatggcgcagccagacccgccccgtgtgttgcagcccgtgtaatacccttctctccctacccacagttggggtcatcttctataagcgggtcatgaaataggcgagctagctctgtgcactcttttcttcctttctggaaaactagttctgaaagcatcttttttgttgctgttgtaggttatgatttaattctaccttattggtgtgaccaggaacagggcaagagtccacctctacaatcccataggaagaacagtcaggagaattatatacatctacagcgggcacaggacttaggccagatcttcctggaa

SEQ ID NO: 52484 - DNA, 395 bp, Homo sapiens
tcacggggacaccaggccctgggatagggctgggtcagaaagcctgctcttcccactcacttcccttcctctgtctctgggaacagatcagggctgcgatggtctgggttctctccccagccacacaggagggtgctgggactggggctccttctgctcctccacttggcagctctgtgacccaggccaggggcttcctgtcccttcctccctggctgctccgtgcagcacaagctgcatgtatgtgcctgggccagggccccaagaagcccctccatggagtgtggagcctgggcctggccttgccgagtccccttcctttgcctcggctcagcccctcggaacctggtgggggcggggtgggaatcctagccttctaccttccctgctcccgt

SEQ ID NO: 52485 - DNA, 290 bp, Homo sapiens
agcaaagcagaatttaacatagttttaacataccgttaattcacagagtatataatttaggcttccaaagtgctgcatttactttcgagcctctaggacactactgtcctgcctctgtaatatggggagaaataaagtttatttttatgtatttattttattttattttattttgagatggggtaccgctctgtcatctaggttggtgtgcagtggagtggcatactgttaattcacagagtatataatttaggtttccaaagaggggtacatttacttttgaggtttct

SEQ ID NO: 52486 - DNA, 1098 bp, Homo sapiens
ccattgactaactatggaagattataccaaaatagagaaaattggagaaggtacctatggagttgtgtataagggtagacacaaaactacaggtcaagtggtagccatgaaaaaaatcagactagaaagtgaagaggaaggggttcctagtactgcaattcgggaaatttctctattaaaggaacttcgtcatccaaatatagtcagtcttcaggatgtgcttatgcaggattccaggttatatctcatctttgagtttctttccatggatctgaagaaatacttggattctatccctcctggtcagtacatggattcttcacttgttaagagttatttataccaaatcctacaggggattgtgttttgtcactctagaagagttcttcacagagacttaaaacctcaaaatctcttgattgatgacaaaggaacaattaaactggctgattttggccttgccagagcttttggaatacctatcagagtatatacacatgaggtagtaacactctggtacagatctccagaagtattgctggggtcagctcgttactcaactccagttgacatttggagtataggcaccatatttgctgaactagcaactaagaaaccacttttccatggggattcagaaattgatcaactcttcaggattttcagagctttgggcactcccaataatgaagtgtggccagaagtggaatctttacaggactataagaatacatttcccaaatggaaaccaggaagcctagcatcccatgtcaaaaacttggatgaaaatggcttggatttgctctcgaaaatgttaatctatgatccagccaaacgaatttctggcaaaatggcactgaatcatccatattttaatgatttggacaatcagattaagaagatgtagctttctgacaaaaagtttccatatgttatgtcaacagatagttgtgtttttattgttaactcttgtctatttttgtcttatatatatttctttgttatcaaacttcagctgtacttcgtcttctaatttcaaaaatataacttaaaaatgtaaatattctatatgaatttaaatataattctgtaaatgtg

SEQ ID NO: 52487 - DNA, 2094 bp, Homo sapiens
tgaatatgtaaaaatgaaagaaaaggccaactgtattgaagatacaaaatagagttggtagcggtatatagaagaaaaatcaagaggcttctgtgtagaaaaccaatttgtaatttaaggatcggggaccaaaaatttttaaagactaaatgtgttcacattactatagatatgtctataaggtgaagattcttttcttaggtatacaaatgtgatgttgtatataaatgggcttcccacccacaaatgcttattagcctaaaatggcctgaaagctctagtaattaaattatttctctgcgtcctaattttttgtctttgaaacagattatttagaaaatcatgtacttcgcttaagtttctaacttttacttgctttttccagagttatttataccaaatcctacaggggattgtgttttgtcactctagaagagttcttcacagagacttaaaacctcaaaatctcttgattgatgacaaaggaacaattaaactggctgattttggccttgccagagcttttggaatacctatcagagtatatacacatgaggtagtaacactctggtacagatctccagaagtattgctggggtcagctcgttactcaactccagttgacatttggagtataggcaccatatttgctgaactagcaactaagaaaccacttttccatggggattcagaaattgatcaactcttcaggattttcagagctttgggcactcccaataatgaagtgtggccagaagtggaatctttacaggactataagaatacatttcccaaatggaaaccaggaagcctagcatcccatgtcaaaaacttggatgaaaatggcttggatttgctctcgaaaatgttaatctatgatccagccaaacgaatttctggcaaaatggcactgaatcatccatattttaatgatttggacaatcagattaagaagatgtagctttctgacaaaaagtttccatatgttatgtcaacagatagttgtgtttttattgttaactcttgtctatttttgtcttatatatatttctttgttatcaaacttcagctgtacttcgtcttctaatttcaaaaatataacttaaaaatgtaaatattctatatgaatttaaatataattctgtaaatgtgtgtaggtctcactgtaacaactatttgttactataataaaactataatattgatgtcaggaatcaggaaaaaatttgagttggcttaaatcatctcagtccttatggcagttttattttcctgtagttggaactactaaaatttaggaaaatgctaagttcaagtttcgtaatgctttgaagtatttttatgctctgaatgtttaaatgttctcatcagtttcttgccatgttgttaactatacaacctggctaaagatgaatatttttctactggtattttaatttttgacctaaatgtttaagcattcggaatgagaaaactatacagatttgagaaatgatgctaaatttataggagttttcagtaacttaaaaagctaacatgagagcatgccaaaatttgctaagtcttacaaagatcaagggctgtccgcaacagggaagaacagttttgaaaatttatgaactatcttatttttaggtaggttttgaaagctttttgtctaagtgaattcttatgccttggtcagagtaataactgaaggaggtgcttatcttggctttcgagtctgagtttaaaactacacattttgacatagtgtttattagcagccatctaaaaaggctctaatgtatatttaactaaaattactagctttgggaattaaactgtttaacaaataaaaaaaaaaaaaaaaaaaaaaaaaaaaaaaaaaaaaaacaaaaaaaaaacaaaaaaaaaaaaaaaataaaaaaaaaaaaaaaagggaaaaaaaaaaaaaaaaaaaaaaaaaaaatctttggggcccctttggcccaatctttttttaatttgggaaagttttttcttggcccccaaattggggcttatttggccaattgccctttaggggggggggtttaaaattcaagggcgcgggttttaaagggggaggtgggg

SEQ ID NO: 52488 - DNA, 2632 bp, Homo sapiens
agcattagtttttgttttttatctgacaggtagctatggatattctgagggagaagccaggattaatacacattttttttttaagttgctgaattgtagtggctctcctttctagcatttttgtcactattgagccctcttagtttatgctagacgtgtttttcttattggttgatattttaaattattaaagccatcttctgaataagctttattcgcactttgtacctagtttctccatcagaaggatctattgctataccattgtatacattttctcattggtcttcgggttactttcagagtgtaaagactccttatgccacaaaattaagcttagatttcccccaaatcaaatactataaatcagattccttagtctagccacaattgacatatcttggagtggataaatctttgttgctggcattgttctgtgcatcataacttgtttagtggcatgtcatcactgtcttctactctctagatgccattagtatactcttcacagttaggacaaccaaaagtgtctccagatattgccaaatgtctcctgatgggcaaagtctatcccagttgcgaaccattattgtaaattaaacttggtttcaaatttgagctttattccttagctctgggaacttgggcaagttacttcccttcgagcctcaatgtcctcatttgtaaaatgacattaatacctacttttagctgtgggaattgagtaccatgatttatacaaagcagtttgtatggtgctggttacatgagagttcagatggtaactagttagtaaaaaatctctagtgtgcttgttgattttattttattttagtatttcttaaagatcaaatttaacatcaatcctaaactttatttagctttttctggcgtgtaaactaacatactaagttgtgtgactataattcatttagtgactcatttttagctatttttataacacattgtgctatggggggttttggaacttgctggaagctacatcagaaactgccatagttaattgccatttcaagaatgttgtaaataactcaggtggccgtttaattctcaatgtaaatataattaactagacatctttcctatatttgtgtctcagttttaaagctatttctggatgcttgagtcttaccgtaattgataacaaaaagaggttattgagaatatctatgatttacagagtaagttattctagacctcaagagtgaaatgtaggggaggagacatttgtgtgttaaactaatggaaatgctcatttaatagatattcactgaaagtattagttttggtttattgtagaaaagttgaggttttatggagatttttgtaaaaaatggtttatttcctaaataaatatctctttttcttttttctcccagaaaatgttaatctatgatccagccaaacgaatttctggcaaaatggcactgaatcatccatattttaatgatttggacaatcagattaagaagatgtagctttctgacaaaaagtttccatatgttatgtcaacagatagttgtgtttttattgttaactcttgtctatttttgtcttatatatatttctttgttatcaaacttcagctgtacttcgtcttctaatttcaaaaatataacttaaaaatgtaaatattctatatgaatttaaatataattctgtaaatgtgtgtaggtctcactgtaacaactatttgttactataataaaactataatattgatgtcaggaatcaggaaaaaatttgagttggcttaaatcatctcagtccttatggcagttttattttcctgtagttggaactactaaaatttaggaaaatgctaagttcaagtttcgtaatgctttgaagtatttttatgctctgaatgtttaaatgttctcatcagtttcttgccatgttgttaactatacaacctggctaaagatgaatatttttctactggtattttaatttttgacctaaatgtttaagcattcggaatgagaaaactatacagatttgagaaatgatgctaaatttataggagttttcagtaacttaaaaagctaacatgagagcatgccaaaatttgctaagtcttacaaagatcaagggctgtccgcaacagggaagaacagttttgaaaatttatgaactatcttatttttaggtaggttttgaaagctttttgtctaagtgaattcttatgccttggtcagagtaataactgaaggaggtgcttatcttggctttcgagtctgagtttaaaactacacattttgacatagtgtttattagcagccatctaaaaaggctctaatgtatatttaactaaaattactagctttgggaattaaactgtttaacaaataaaaaaaaaaaaaaaaaaaaaaaaaaaaaaaaaaaaaaacaaaaaaaaaacaaaaaaaaaaaaaaaataaaaaaaaaaaaaaaagggaaaaaaaaaaaaaaaaaaaaaaaaaaaatctttggggcccctttggcccaatctttttttaatttgggaaagttttttcttggcccccaaattggggcttatttggccaattgccctttaggggggggggtttaaaattcaagggcgcgggttttaaagggggaggtgggg

SEQ ID NO: 52489 - DNA, 2040 bp, Homo sapiens
ccattgactaactatggaagattataccaaaatagagaaaattggagaaggtacctatggagttgtgtataagggtagacacaaaactacaggtcaagtggtagccatgaaaaaaatcagactagaaagtgaagaggaaggggttcctagtactgcaattcgggaaatttctctattaaaggaacttcgtcatccaaatatagtcagtcttcaggatgtgcttatgcaggattccaggttatatctcatctttgagtttctttccatggatctgaagaaatacttggattctatccctcctggtcagtacatggattcttcacttgttaagagttatttataccaaatcctacaggggattgtgttttgtcactctagaagagttcttcacagagacttaaaacctcaaaatctcttgattgatgacaaaggaacaattaaactggctgattttggccttgccagagcttttggaatacctatcagagtatatacacatgaggtagtaacactctggtacagatctccagaagtattgctggggtcagctcgttactcaactccagttgacatttggagtataggcaccatatttgctgaactagcaactaagaaaccacttttccatggggattcagaaattgatcaactcttcaggattttcagagctttgggcactcccaataatgaagtgtggccagaagtggaatctttacaggactataagaatacatttcccaaatggaaaccaggaagcctagcatcccatgtcaaaaacttggatgaaaatggcttggatttgctctcgaaaatgttaatctatgatccagccaaacgaatttctggcaaaatggcactgaatcatccatattttaatgatttggacaatcagattaagaagatgtagctttctgacaaaaagtttccatatgttatgtcaacagatagttgtgtttttattgttaactcttgtctatttttgtcttatatatatttctttgttatcaaacttcagctgtacttcgtcttctaatttcaaaaatataacttaaaaatgtaaatattctatatgaatttaaatataattctgtaaatgtgtgtaggtctcactgtaacaactatttgttactataataaaactataatattgatgtcaggaatcaggaaaaaatttgagttggcttaaatcatctcagtccttatggcagttttattttcctgtagttggaactactaaaatttaggaaaatgctaagttcaagtttcgtaatgctttgaagtatttttatgctctgaatgtttaaatgttctcatcagtttcttgccatgttgttaactatacaacctggctaaagatgaatatttttctactggtattttaatttttgacctaaatgtttaagcattcggaatgagaaaactatacagatttgagaaatgatgctaaatttataggagttttcagtaacttaaaaagctaacatgagagcatgccaaaatttgctaagtcttacaaagatcaagggctgtccgcaacagggaagaacagttttgaaaatttatgaactatcttatttttaggtaggttttgaaagctttttgtctaagtgaattcttatgccttggtcagagtaataactgaaggaggtgcttatcttggctttcgagtctgagtttaaaactacacattttgacatagtgtttattagcagccatctaaaaaggctctaatgtatatttaactaaaattactagctttgggaattaaactgtttaacaaataaaaaaaaaaaaaaaaaaaaaaaaaaaaaaaaaaaaaaacaaaaaaaaaacaaaaaaaaaaaaaaaataaaaaaaaaaaaaaaagggaaaaaaaaaaaaaaaaaaaaaaaaaaaatctttggggcccctttggcccaatctttttttaatttgggaaagttttttcttggcccccaaattggggcttatttggccaattgccctttaggggggggggtttaaaattcaagggcgcgggttttaaagggggaggtgggg

SEQ ID NO: 52490 - DNA, 462 bp, Homo sapiens
ctgcagctcagtagtgcctctcgtacctgctccagaccctaagtaaatcacaagagtgcttcatttcaaatatgaatgaatccttgatgggaccaactaaccaacccaagccccacacgaaggaacaggagaagggtctgccgcagctaaggggtacgataggtataaacaaagcttgtaacctgacctcttgcaaatcaacagcacagtgcatggctaaagatagacttgctatccccaaacagaaatacacacaacccagaaaacctcactaagtgataacaatttcttgtaccctaaataactgtttacatttggatctcatttggtcattcttctaacccagggaggaaagattccaacagaacttgctgctctagtgtgtttattgaagatcgccttgttctggttctggttctggtttttgttttggttttgttgagacaagagcaagtctcactc

SEQ ID NO: 52491 - DNA, 734 bp, Homo sapiens
actagtgacttaagaccaggaggagggaagcaggggaggtttgtttttgattttaagggtaagaatctagttccgaacttcgtgactcccggaacactcctgaattgagtctgatacatttcataaatcaatcaagcccttatctagataactcaccatttcatttctgtatcaaattaagtagccctgggtcttttgctatatatttatatcttagaagctaatccaaaggacaaaaattcctctctgcacattactgcaagatttcagctttgctattacatcagaaagcagtaagctcaccaggacaaaaaccacagaaggccctgaaaagacttgcccccaacatacactggccattctaacccgcaaagcggaggctttcttttccttaagggtctgttctccagaaattcccttattcactgcctgcccagttcacactgtgtataccccaccctcaggagtataaacctgacaaatgcttttgagccaaaccagacagagtcccccataaaactcatggaacacaacagatgattctttcagcacaaataccttcagatttggaagcacatcctgatatgtttcttccaagttcatttaattaatagtacttacttgttcttaaatgatttggaagactcccattgggcaggtcaaatcatgggctaaatgtgctggggctttttggtggagatgctaatttaaattttctcaaagtattttacgta

SEQ ID NO: 52492 - DNA, 480 bp, Homo sapiens
tagtaataataagaaaactaactcctttcattaggacttctttttctgagtttagcaaggattggatatttgttgccttttgtttctttgttgggataaacgtgccaggcacaacctgtgcaaccacatatggaagtctgtcttccttcccttactgcctctctattcaattttaacaaataacgttgtatcctatttcttttggaaaatagaacctgtcagaaaagaatatccatgaactactagtaaaatatatcttcctattaacatctgtcaacatgaattcagctttccttcatgttaatataaactgaatatccatgttcatatctacagaaaactgatccacttatatgctagattttatcccttcctgcctattcaaggatatcatttcagaaataccggctgagcgtggtggctcacgcttgtaatcccagcactttaggaggctgaggcgggcggatcacgaggtcaggg

SEQ ID NO: 52493 - DNA, 661 bp, Homo sapiens
tggtttaatgtagaggaagggatccaaaggcttagggagattcagaaggtggagtggattagtcactttagacctactcatcccagctgggagggtccagaagatatacccttgactgatgccttgcaaaacagatttacaagggcagcagctacatctttgaagaaccctataattgcacttctctgtatgtcagatctaacagtgggaacctcagtcactcaactacaaaatttaaatacaaaatgggaataactggatccggaggtagcaggggccaagtgacggcactcaactatcaaaggtaaggtgggcgtagctactgtaatggacagcagaagcaaagcagcaatcagaatagtctgacttgtgtagaacttgggcattggctaattaattatggtgttcctggaagtgaaactgataggaagcctactgcattcccacttaatttatacaagcagaaaacttctaggtcaaatggacaaaatactaatttgaattattaaaacagaatcacggcccctcaatcaatttccagacttgagccagtttacacacccagagccccaatatttgacctatagcatgacatgtattgtttaacttaaaatcagcatctgctacaaatggcaataccagtacattaaaaatgttaaaa

SEQ ID NO: 52494 - DNA, 444 bp, Homo sapiens
ggttaagagacagaacatgaagctcagggttggattgaacagactcagcacagtcagtcagatccagtttatcatcatttgcttcacatttatctaaaactgtaacagcatacccgactgttctaaagagaacactacatgttatagcttatatatttacatcaaccaaaacacatgctatttcctttgctataaatatgccaccttctggctgggcgcggtggctcacgcctgtaatcccagcactttgggaggccgaggtgggtggatcacctgaggtcaggagtttgagaccagcctggccaacatgatgaaagccctgtctctactaaaaatacaaaaattagccgggtgcctttgatcccagctactcaggaggctgaggttgcagtgagccaagatagcaccactgtactccagcctgggagacagactccatctccc

SEQ ID NO: 52495 - DNA, 772 bp, Homo sapiens
ttcagtggcatcattgcactgtgactgtgcaggtcccaaacagtatggacatgaatgtcctcaagctgcatgttagcagggcttctaattccatctgcaagtgatagtgtgtggagcttagttgcacagagcgcatgttactggaggagatatgggtctgtgtcatcctgcatgggaatgatcctaaaaacaaagtgatcagtgactgctcaggactgtggaaaggtcacttggagcagtgggaaaaggtctggcagaggaataagaagatacaggtcttagaacaagccctgggacttcaaccaagtcatttaacatctggggccttcgtttatttatcctcccagcagataaagcaatacctgccctgtcttcctaaccttggaggggtcaaaaaagtgatgggtgtgaaagcattttgtaaactgtagtgcaagcatacggcaggggagtgaaccatactttcactagcgacttgaatgaggtgataaagaaaaggctcagaacttcagaaaatgcaagaggggcttgaccctggattggcagaggaaagcaatggtgggatcgataccttggagagccaaggaccaaggggttaagggtccatgaggacaggcctggatcatcaggaagctgagtgtggtaagactgtggcttcttcagggattgggtggagtacagtcctgccaagaccacagtaactcagggcttggagacatcacaaaggcaggggctcctagagctgagataatctggagaagaggatacccat

SEQ ID NO: 52496 - DNA, 511 bp, Homo sapiens
ttcagtggcatcattgcactgtgactgtgcaggtcccaaacagtatggacatgaatgtcctcaagctgcatgttagcagggcttctaattccatctgcaagtgatagtgtgtggagcttagttgcacagagcgcatgttactggaggagatatgggtctgtgtcatcctgcatgggaatgatcctaaaaacaaagtgatcagtgactgctcaggactgtggaaaggtcacttggagcagtggggattccaagagtctcaaggttagagaagtcgcctagtccacctcccctctctgcttctcacagaagggtctgctgaacactctggtgacagagaactcacccaacatgttccatggcagaggcttttcattagatcaaggtgacatctgttttactggagcttccaaccacgtgtcccaatactgcccttagtcacaggcatccaggtcctctctctcaggacagcactttgaataaatgaggacagctcccatccccctttctccca

SEQ ID NO: 52497 - DNA, 1029 bp, Homo sapiens
ttcagtggcatcattgcactgtgactgtgcaggtcccaaacagtatggacatgaatgtcctcaagctgcatgttagcagggcttctaattccatctgcaagtgatagtgtgtggagcttagttgcacagagcgcatgttactggaggagatatgggtctgtgtcatcctgcatgggaatgatcctaaaaacaaagtgatcagtgactgctcaggactgtggaaaggtcacttggagcagtggggattccaagagtctcaaggttagagaagtcgcctagtccacctcccctctctgcttctcacagaagggtctgctgaacactctggtgacagagaactcacccaacatgttccatggcagaggcttttcattagatcaaggtgacatctgttttactggagcttccaaccacgtgtcccaatactgcccttagtcacaggcatccaggtcctctctctcaggacagcactttgaataaatgaggacagctcccatccccctttctcccagttgactttccagaaacatctcatattgttgttggctttccaccatttttcctcttcacttcctgggcctactactacactgtgtgtcctccacttggtctcttcctgaaagcaacactgtgcacaatgttcctgggggcagacttattaaaccaagtggaccacttccttcaaaaaaaaaaaaaaaaaaaaaaaaaaaaaaaaaaaaaaaaaaaaaaaaaaaaaaaaaaaaaaaaaaaaaaaaaaaaaaaagaaaaaaagaaaagaagagaggggggcgcgcgcgcgcccgaaaagctccaccgaggggggcgacacaagaaagaacagagcgccccaccaaagctttagaggaagagaagcgggggagccacaaaaaagaggggacacggcaacaaacaaacacacagggagcagagggcgggggacgcaaaaaagaagcgcagagagagaggaaaaccaagcacacaaacgcaagacgaacaacatagagaacgacgcacacaacaggagaggag

SEQ ID NO: 52498 - DNA, 910 bp, Homo sapiens
ttcagtggcatcattgcactgtgactgtgcaggtcccaaacagtatggacatgaatgtcctcaagctgcatgttagcagggcttctaattccatctgcaagtgatagtgtgtggagcttagttgcacagagcgcatgttactggaggagatatgggtctgtgtcatcctgcatgggaatgatcctaaaaacaaagtgatcagtgactgctcaggactgtggaaaggtcacttggagcagtgggaaaaggtctggcagaggaataagaagatacaggtcttagaacaagccctgggacttcaaccaagtcatttaacatctggggccttcgtttatttatcctcccagcagataaagcaatacctgccctgtcttcctaaccttggaggggtcaaaaaagtgatgggtgtgaaagcattttgtaaactgtagtgcaagcatacggcaggggagtgaaccatactttcactagcgacttgaatgaggtgataaagaaaaggctcagaacttcagaaaatgcaagaggggcttgaccctggattggcagaggaaagcaatggtgggatcgataccttggagagccaaggaccaaggggttaagggtccatgaggacaggcctggatcatcaggaagctgagtgtggattccaagagtctcaaggttagagaagtcgcctagtccacctcccctctctgcttctcacagaagggtctgctgaacactctggtgacagagaactcacccaacatgttccatggcagaggcttttcattagatcaaggtgacatctgttttactggagcttccaaccacgtgtcccaatactgcccttagtcacaggcatccaggtcctctctctcaggacagcactttgaataaatgaggacagctcccatccccctttctccca

SEQ ID NO: 52499 - DNA, 1428 bp, Homo sapiens
ttcagtggcatcattgcactgtgactgtgcaggtcccaaacagtatggacatgaatgtcctcaagctgcatgttagcagggcttctaattccatctgcaagtgatagtgtgtggagcttagttgcacagagcgcatgttactggaggagatatgggtctgtgtcatcctgcatgggaatgatcctaaaaacaaagtgatcagtgactgctcaggactgtggaaaggtcacttggagcagtgggaaaaggtctggcagaggaataagaagatacaggtcttagaacaagccctgggacttcaaccaagtcatttaacatctggggccttcgtttatttatcctcccagcagataaagcaatacctgccctgtcttcctaaccttggaggggtcaaaaaagtgatgggtgtgaaagcattttgtaaactgtagtgcaagcatacggcaggggagtgaaccatactttcactagcgacttgaatgaggtgataaagaaaaggctcagaacttcagaaaatgcaagaggggcttgaccctggattggcagaggaaagcaatggtgggatcgataccttggagagccaaggaccaaggggttaagggtccatgaggacaggcctggatcatcaggaagctgagtgtggattccaagagtctcaaggttagagaagtcgcctagtccacctcccctctctgcttctcacagaagggtctgctgaacactctggtgacagagaactcacccaacatgttccatggcagaggcttttcattagatcaaggtgacatctgttttactggagcttccaaccacgtgtcccaatactgcccttagtcacaggcatccaggtcctctctctcaggacagcactttgaataaatgaggacagctcccatccccctttctcccagttgactttccagaaacatctcatattgttgttggctttccaccatttttcctcttcacttcctgggcctactactacactgtgtgtcctccacttggtctcttcctgaaagcaacactgtgcacaatgttcctgggggcagacttattaaaccaagtggaccacttccttcaaaaaaaaaaaaaaaaaaaaaaaaaaaaaaaaaaaaaaaaaaaaaaaaaaaaaaaaaaaaaaaaaaaaaaaaaaaaaaaagaaaaaaagaaaagaagagaggggggcgcgcgcgcgcccgaaaagctccaccgaggggggcgacacaagaaagaacagagcgccccaccaaagctttagaggaagagaagcgggggagccacaaaaaagaggggacacggcaacaaacaaacacacagggagcagagggcgggggacgcaaaaaagaagcgcagagagagaggaaaaccaagcacacaaacgcaagacgaacaacatagagaacgacgcacacaacaggagaggag

SEQ ID NO: 52500 - DNA, 670 bp, Homo sapiens
aggaccctaaaacaaacttcaaagagctctaaggacttctcaaagtcctttttggatagtaatgcaatgtctgtgacgtccaaaggaagaaaattcgtcagcggagatttgaactaaaattacttgtgctcatcagcagtttttgaagatgcagagcgctcggttatgaaaatagaacaaaaatgcacatctagtttgtccttagcacttctggttcatcatactttgaaaaagcctggcctgttgcccaagtcttttgaggcaaccctgggttgttgcccaagtcctttgagggtaagcaacagcaatgtctcagaaaacattaactcaacagcccacccgctccaattcattaagccctcatcttttttatctgaccaatagatgcccccagttaagatctaaatgactcttccaatgcagggttgttaaaggaagggagatagacattctgaaaagcagagatctgtttgattttcgggttattatagaacatggatggagctggaggccatcatccttagcaaactaacacgggaacagaaaaccaaataccgcatgttctcacttagaagtgggagctaagtaatgagaactcatggacacaaagaggggaacaatagacactggggcccacttgagggtggagggtggaaggagagagaggagc

SEQ ID NO: 52501 - DNA, 445 bp, Homo sapiens
acgtggccatgcggtggtgtgcaggcatagtgtgggtgtgtgtgtgcttctacttcaggtgtgtaaatacttggcacatacttgcctatgtgcacaggcatgtatctcaagtgtgtttatacagatgtgtctacattgtgttcataggtgggtgtgtgtacacaggtagatgcgtacacattgtgtgtaatgtggatatggggatccatacattgtatacatatacaggtgtgtgcaaaattgtgtgtgtacatatacagctgtgtacaaatggacatgtgtacatggtagtgtatgggtagagatatatcgtgtacatgtaagggtatatgtgtaagtatgtatacacatacatatgtcatctaggtgattgtgaacacagcatgtgtgtatatgtgaatgtgtatacatatatatgtatatatatacactttgtgtatctata

SEQ ID NO: 52502 - DNA, 455 bp, Homo sapiens
gagacagagtcttgctctgtcgcccaggctggagtgcagtggcgtgatctcggctcactgcaagctctgcctcccaggttcatgccattctcctgcctcagtctcccaagtagctgggattacaggagcccaccaccacgcccagctaatttttttgtatttttagtagagatggggtttcaacatgttagccaggatggtctccatctcctgcccttgggatccgcccacctcagcctcccaaagtgctgggattacagacgtgagccaccgcgcccagccgcctccagccatattttaaagataaaataattgtgcaatctctattactatcatttaattcccaaagttcccgctttccctctggtatcatttcccttctaccaagagtttcctttggcatttcttttcaggcaagtctgctggcaagaaatatatatcttaggtttgtttca

SEQ ID NO: 52503 - DNA, 322 bp, Homo sapiens
gatgtttgaattacccggagttgaactagaaaatcagcttttcttaagagtgaattttaaactaaaatcttctgagagatgaaatatatctgtttctatagtattatttggagtagataactatttttaaatttcagcatattaaagtttaaattagggacaaacagtagattatcttctataacttttatttgaataaaagcctaaaatgcttttagaatctaagctcttattttgatttcattttattttaatgtactgtataacagatccaatttactattgacaaatttcgtagcatttattattactatgcacaaaa

SEQ ID NO: 52504 - DNA, 393 bp, Homo sapiens
agcttgctttttcattctcttaacaatgtctttcatggaccaaaaattttaattttgttaaggtcatttatcaattttttttttcctatggactgtgcttttggtgtcaaatctgagaaatctgcctggccctagatcctaaagattttctcctttggttgtttctaaaagttttataagcttacattttacatttaagtccatgatctattttgtcaatttttgtacaaggtgtgagataaaggccaaagttcttttttcttctcccttatggatgtctagttgctccagcaccattcattgaaaagtctattctccctccattgagttccttttgcagtgaaaaatcagttgggcagatttgtgcatctctaattctggattctctgtccc

SEQ ID NO: 52505 - DNA, 434 bp, Homo sapiens
tagtgggatgtttgcattgaatattctcaagttgatcaggtattctaaattaattttaacttctgagtctccaggaaagctttcagaatttatacttactacccaggtgagaagttgcagtaaaataaaagtgaatctttcccaaacttgtggaatattagagttggaacaggccttagaaattccagtgcttcatttgccacatgagaaggctgatatctgaaccaaacagataacttcagaacctctggataccaaacttgtgaagctaaaacagaaatgtcaacttgggatttaaaggaaaatagtaatgcatagaaatggttttgaaaagaaggttttagatatttttgtgctccatgttttcctgcatatgtctcccttttctctgccaaactgcttttcacacccggtccttggactctttgagcact

SEQ ID NO: 52506 - DNA, 401 bp, Homo sapiens
aaagctcggtcagctctagggaggctgaggaggctccggggtctcactctgttgcccaggctgtggcataatcacagctcagtggagcctcaaactcctggtgtcaagcagtcctccctagctcaggctccccagtagctggggatacagacaagccaccgtgtctaattttctcattttctcaggagttcaagaccagcctggccaacatggtgaaacgtcgtctatcctaaaaatacaaaaataagctgggcgtggtggcagatgcctataaccacagctactcgggagtctgatacaggagaatcgcttgaacctgtggggttgaagttgaagtgagccaagatcatgccattgcactccagtttgggcaacagagaaagattttgtctcaaaaaaaa

SEQ ID NO: 52507 - DNA, 332 bp, Homo sapiens
tgaatacaatggatattcaaatatccaatacattccctcatttggaaaagacctctggcttatcagtgctggtctttttaaccagtgccatcgtgtctattcaattaaactatcagatgattaaggaagagggcattgcatcattgatgtaaaagaatttttactataagcttcctttaagagaagagcaggcagcgtagaaagaagcagaaaggacatcgactttgaaatcacgcctgggtggattcaaatcctgattctgtcacttacggccgatgtgatgttaggcaagtacttaatccctcccagctttgattccttcatgcagtagt

SEQ ID NO: 52508 - DNA, 463 bp, Homo sapiens
cccacagacgtgtctttgtgccagaacattcggccttcatgctaatgtccctgaacaaatgatgataatcaccatttactaagcacattctaaactgcctggcctgtgctgggtgtttctggaagcccattttacagatgagaatgccaaggctcagggacattaagtaatttgcccagggttgtacagcttcataagtggcagcaaaaggatttgcattcgggtgggtccaacccagctctgacctgggagtacagattgtttcctatgcaggaattttatgagctggttgttaaaggaaggtactattaagagtcactttatggctgggtacagtggcccatgcctgtaatcccagcactttgggaagcacaggtgggaggattgcttgagcccaggagttcaagaccagcctgggcaacagggagatcccatctctacttaaatatacatatatatttaa

SEQ ID NO: 52509 - DNA, 87 bp, Homo sapiens
tttcagagatagtccccatttgtttggcaagccttggctagatatttgcaggacctaagtctttatatgggagggcatctcctacag

SEQ ID NO: 52510 - DNA, 2121 bp, Homo sapiens
cgggaacccaggcggggcgagccgcgggagagtggagggcaggcgcctgggctgggggcggggaccaggcggggcagggggcagggagaggagggcggcgggagcctgagccggaatcgcagcgtgagcaggtggagccgcggtgggagcccgccgggtcgagctgagtaaggcggcgggctcggcgggggccatggagctgctaaagctgaaccggagcgtgcagggaaccggacccgggccgggggcttccctgtgccgcccgggggcgcctctcctcaacagcagcagtgtgggcaacctcagctgcgagccccctcgcattcgcggagccgggacacgagaattggagctggccattagaatcactctttacgcagtgatcttcctgatgagcgttggaggaaatatgctcatcatcgtggtcctgggactgagccgccgcctgaggactgtcaccaatgccttcctcctctcactggcagtcagcgacctcctgctggctgtggcttgcatgcccttcaccctcctgcccaatctcatgggcacattcatctttggcaccgtcatctgcaaggcggtttcctacctcatgggggtgtctgtgagtgtgtccacgctaagcctcgtggccatcgcactggagcggtacagcgccatctgccgaccactgcaggcacgagtgtggcagacgcgctcccacgcggctcgcgtgattgtagccacgtggctgctgtccggactactcatggtgccctaccccgtgtacactgtcgtgcaaccagtggggcctcgtgtgctgcagtgcgtgcatcgctggcccagtgcgcgggtccgccagacctggtccgtactgctgcttctgctcttgttcttcatcccgggtgtggttatggccgtggcctacgggcttatctctcgcgagctctacttagggcttcgctttgacggcgacagtgacagcgacagccaaagcagggtccgaaaccaaggcgggctgccaggggctgttcaccagaacgggcgttgccggcctgagactggcgcggttggcgaagacagcgatggctgctacgtgcaacttccacgttcccggcctgccctggagctgacggcgctgacggctcctgggccgggatccggctcccggcccacccaggccaagctgctggctaagaagcgcgtggtgcgaatgttgctggtgatcgttgtgcttttttttctgtgttggttgccagtttatagtgccaacacgtggcgcgcctttgatggcccgggtgcacaccgagcactctcgggtgctcctatctccttcattcacttgctgagctacgcctcggcctgtgtcaaccccctggtctactgcttcatgcaccgtcgctttcgccaggcctgcctggaaacttgcgctcgctgctgcccccggcctccacgagctcgccccagggctcttcccgatgaggaccctcccactccctccattgcttcgctgtccaggcttagctacaccaccatcagcacactgggccctggctgaggagtagaggggccgtgggggttgaggcagggcaaatgacatgcactgacccttccagacatagaaaacacaaaccacaactgacacaggaaaccaacacccaaagcatggactaaccccaacgcacaggaaaaggtagcttacctgacacaagaggaataagaatggagcagtacatgggaaaggaggcatgcctctgatatgggactgagcctggcccatagaaacatgacactgaccttggagagacacagcgtccctagcagtgaactatttctacacagtgggaactctgacaagggctgacctgcctctcacacacatagattaatggcactgattgttttagagactatggagcctggcacaggactgactctgggatgctcctagtttgacctcacagtgacccttcccaatcagcactgaaaataccatcaggcctaatctcatacctctgaccaacaggctgttctgcactgaaaaggttcttcatccctttccagttaaggaccgtggccctgccctctccttccttacccaaactgttcaagaaataataaattgtttggcttcctcctgaa

SEQ ID NO: 52511 - DNA, 2328 bp, Homo sapiens
cgggaacccaggcggggcgagccgcgggagagtggagggcaggcgcctgggctgggggcggggaccaggcggggcagggggcagggagaggagggcggcgggagcctgagccggaatcgcagcgtgagcaggtggagccgcggtgggagcccgccgggtcgagctgagtaaggcggcgggctcggcgggggccatggagctgctaaagctgaaccggagcgtgcagggaaccggacccgggccgggggcttccctgtgccgcccgggggcgcctctcctcaacagcagcagtgtgggcaacctcagctgcgagccccctcgcattcgcggagccgggacacgagaattggagctggccattagaatcactctttacgcagtgatcttcctgatgagcgttggaggaaatatgctcatcatcgtggtcctgggactgagccgccgcctgaggactgtcaccaatgccttcctcctctcactggcagtcagcgacctcctgctggctgtggcttgcatgcccttcaccctcctgcccaatctcatgggcacattcatctttggcaccgtcatctgcaaggcggtttcctacctcatgggggtgtctgtgagtgtgtccacgctaagcctcgtggccatcgcactggagcggtacagcgccatctgccgaccactgcaggcacgagtgtggcagacgcgctcccacgcggctcgcgtgattgtagccacgtggctgctgtccggactactcatggtgccctaccccgtgtacactgtcgtgcaaccagtggggcctcgtgtgctgcagtgcgtgcatcgctggcccagtgcgcgggtccgccagacctggtccgtactgctgcttctgctcttgttcttcatcccgggtgtggttatggccgtggcctacgggcttatctctcgcgagctctacttagggcttcgctttgacggcgacagtgacagcgacagccaaagcagggtccgaaaccaaggcgggctgccaggtggggctggaccacgtgagcaaaatctgggcgaggcggagctttggagggcgacggggcctgctggagtgggtgggactgaaatgaaggtgagggtgagaaggaagctggaaatggagttgagctgggagcggaggtcaggtggggactgggctggagactggggggactcgcctttttctctgaccgcccaccctttgtgctcaggggctgttcaccagaacgggcgttgccggcctgagactggcgcggttggcgaagacagcgatggctgctacgtgcaacttccacgttcccggcctgccctggagctgacggcgctgacggctcctgggccgggatccggctcccggcccacccaggccaagctgctggctaagaagcgcgtggtgcgaatgttgctggtgatcgttgtgcttttttttctgtgttggttgccagtttatagtgccaacacgtggcgcgcctttgatggcccgggtgcacaccgagcactctcgggtgctcctatctccttcattcacttgctgagctacgcctcggcctgtgtcaaccccctggtctactgcttcatgcaccgtcgctttcgccaggcctgcctggaaacttgcgctcgctgctgcccccggcctccacgagctcgccccagggctcttcccgatgaggaccctcccactccctccattgcttcgctgtccaggcttagctacaccaccatcagcacactgggccctggctgaggagtagaggggccgtgggggttgaggcagggcaaatgacatgcactgacccttccagacatagaaaacacaaaccacaactgacacaggaaaccaacacccaaagcatggactaaccccaacgcacaggaaaaggtagcttacctgacacaagaggaataagaatggagcagtacatgggaaaggaggcatgcctctgatatgggactgagcctggcccatagaaacatgacactgaccttggagagacacagcgtccctagcagtgaactatttctacacagtgggaactctgacaagggctgacctgcctctcacacacatagattaatggcactgattgttttagagactatggagcctggcacaggactgactctgggatgctcctagtttgacctcacagtgacccttcccaatcagcactgaaaataccatcaggcctaatctcatacctctgaccaacaggctgttctgcactgaaaaggttcttcatccctttccagttaaggaccgtggccctgccctctccttccttacccaaactgttcaagaaataataaattgtttggcttcctcctgaa

SEQ ID NO: 52512 - DNA, 2281 bp, Homo sapiens
cgggaacccaggcggggcgagccgcgggagagtggagggcaggcgcctgggctgggggcggggaccaggcggggcagggggcagggagaggagggcggcgggagcctgagccggaatcgcagcgtgagcaggtggagccgcggtgggagcccgccgggtcgagctgagtaaggcggcgggctcggcgggggccatggagctgctaaagctgaaccggagcgtgcagggaaccggacccgggccgggggcttccctgtgccgcccgggggcgcctctcctcaacagcagcagtgtgggcaacctcagctgcgagccccctcgcattcgcggagccgggacacgagacagaacaaatacagatcttctaaacaccaggagaagaactgaactgtcccaatcttctgagtcgcctggtctgatgccagttttcctcatccccaggaagatgatgagatgatgctcacgggtagacttatcaaggcacttgtggatgtaccccagcagaattggagctggccattagaatcactctttacgcagtgatcttcctgatgagcgttggaggaaatatgctcatcatcgtggtcctgggactgagccgccgcctgaggactgtcaccaatgccttcctcctctcactggcagtcagcgacctcctgctggctgtggcttgcatgcccttcaccctcctgcccaatctcatgggcacattcatctttggcaccgtcatctgcaaggcggtttcctacctcatgggggtgtctgtgagtgtgtccacgctaagcctcgtggccatcgcactggagcggtacagcgccatctgccgaccactgcaggcacgagtgtggcagacgcgctcccacgcggctcgcgtgattgtagccacgtggctgctgtccggactactcatggtgccctaccccgtgtacactgtcgtgcaaccagtggggcctcgtgtgctgcagtgcgtgcatcgctggcccagtgcgcgggtccgccagacctggtccgtactgctgcttctgctcttgttcttcatcccgggtgtggttatggccgtggcctacgggcttatctctcgcgagctctacttagggcttcgctttgacggcgacagtgacagcgacagccaaagcagggtccgaaaccaaggcgggctgccaggggctgttcaccagaacgggcgttgccggcctgagactggcgcggttggcgaagacagcgatggctgctacgtgcaacttccacgttcccggcctgccctggagctgacggcgctgacggctcctgggccgggatccggctcccggcccacccaggccaagctgctggctaagaagcgcgtggtgcgaatgttgctggtgatcgttgtgcttttttttctgtgttggttgccagtttatagtgccaacacgtggcgcgcctttgatggcccgggtgcacaccgagcactctcgggtgctcctatctccttcattcacttgctgagctacgcctcggcctgtgtcaaccccctggtctactgcttcatgcaccgtcgctttcgccaggcctgcctggaaacttgcgctcgctgctgcccccggcctccacgagctcgccccagggctcttcccgatgaggaccctcccactccctccattgcttcgctgtccaggcttagctacaccaccatcagcacactgggccctggctgaggagtagaggggccgtgggggttgaggcagggcaaatgacatgcactgacccttccagacatagaaaacacaaaccacaactgacacaggaaaccaacacccaaagcatggactaaccccaacgcacaggaaaaggtagcttacctgacacaagaggaataagaatggagcagtacatgggaaaggaggcatgcctctgatatgggactgagcctggcccatagaaacatgacactgaccttggagagacacagcgtccctagcagtgaactatttctacacagtgggaactctgacaagggctgacctgcctctcacacacatagattaatggcactgattgttttagagactatggagcctggcacaggactgactctgggatgctcctagtttgacctcacagtgacccttcccaatcagcactgaaaataccatcaggcctaatctcatacctctgaccaacaggctgttctgcactgaaaaggttcttcatccctttccagttaaggaccgtggccctgccctctccttccttacccaaactgttcaagaaataataaattgtttggcttcctcctgaa

SEQ ID NO: 52513 - DNA, 2288 bp, Homo sapiens
cgggaacccaggcggggcgagccgcgggagagtggagggcaggcgcctgggctgggggcggggaccaggcggggcagggggcagggagaggagggcggcgggagcctgagccggaatcgcagcgtgagcaggtggagccgcggtgggagcccgccgggtcgagctgagtaaggcggcgggctcggcgggggccatggagctgctaaagctgaaccggagcgtgcagggaaccggacccgggccgggggcttccctgtgccgcccgggggcgcctctcctcaacagcagcagtgtgggcaacctcagctgcgagccccctcgcattcgcggagccgggacacgagaattggagctggccattagaatcactctttacgcagtgatcttcctgatgagcgttggaggaaatatgctcatcatcgtggtcctgggactgagccgccgcctgaggactgtcaccaatgccttcctcctctcactggcagtcagcgacctcctgctggctgtggcttgcatgcccttcaccctcctgcccaatctcatgggcacattcatctttggcaccgtcatctgcaaggcggtttcctacctcatgggtgggtgagacaaccaccccacccccacttgccactctccccgcctaaagctcttgtggatgtaggggtcttccccggttggcagggaggggtgtgaggaagtcccactgatgcttgtgtagtgcaagtttcctaggtgactccttcctttctcttcccttgtttaggggtgtctgtgagtgtgtccacgctaagcctcgtggccatcgcactggagcggtacagcgccatctgccgaccactgcaggcacgagtgtggcagacgcgctcccacgcggctcgcgtgattgtagccacgtggctgctgtccggactactcatggtgccctaccccgtgtacactgtcgtgcaaccagtggggcctcgtgtgctgcagtgcgtgcatcgctggcccagtgcgcgggtccgccagacctggtccgtactgctgcttctgctcttgttcttcatcccgggtgtggttatggccgtggcctacgggcttatctctcgcgagctctacttagggcttcgctttgacggcgacagtgacagcgacagccaaagcagggtccgaaaccaaggcgggctgccaggggctgttcaccagaacgggcgttgccggcctgagactggcgcggttggcgaagacagcgatggctgctacgtgcaacttccacgttcccggcctgccctggagctgacggcgctgacggctcctgggccgggatccggctcccggcccacccaggccaagctgctggctaagaagcgcgtggtgcgaatgttgctggtgatcgttgtgcttttttttctgtgttggttgccagtttatagtgccaacacgtggcgcgcctttgatggcccgggtgcacaccgagcactctcgggtgctcctatctccttcattcacttgctgagctacgcctcggcctgtgtcaaccccctggtctactgcttcatgcaccgtcgctttcgccaggcctgcctggaaacttgcgctcgctgctgcccccggcctccacgagctcgccccagggctcttcccgatgaggaccctcccactccctccattgcttcgctgtccaggcttagctacaccaccatcagcacactgggccctggctgaggagtagaggggccgtgggggttgaggcagggcaaatgacatgcactgacccttccagacatagaaaacacaaaccacaactgacacaggaaaccaacacccaaagcatggactaaccccaacgcacaggaaaaggtagcttacctgacacaagaggaataagaatggagcagtacatgggaaaggaggcatgcctctgatatgggactgagcctggcccatagaaacatgacactgaccttggagagacacagcgtccctagcagtgaactatttctacacagtgggaactctgacaagggctgacctgcctctcacacacatagattaatggcactgattgttttagagactatggagcctggcacaggactgactctgggatgctcctagtttgacctcacagtgacccttcccaatcagcactgaaaataccatcaggcctaatctcatacctctgaccaacaggctgttctgcactgaaaaggttcttcatccctttccagttaaggaccgtggccctgccctctccttccttacccaaactgttcaagaaataataaattgtttggcttcctcctgaa

SEQ ID NO: 52514 - DNA, 889 bp, Homo sapiens
ggccactgcaccccagcctgggcaacagaatgagactctgtctcaaaaaaaaagaaaaaaaaaaaagatggagcctggagcccagaggcaaggtgacttactcctacaatctttgtagcagaacaggacctttgtagcagaaccaaaacctcccaactcccagttgacatggtagccaccttctctggtgagtgaagggattccacatccccagcagtgcagttggtgagaaggggcagtcagtcttcaaggatttgctccggtgtggcttcattcaatgctgcccacctctggtgcagcctcagctttgcctctgctctttgcaatgtagcctagaggtcttttttctccttaacaggttttattccctttgttcctcccatccttcatgtccttggcattgctttcttcaaaggaagcctcaaagaactgaaccttgagactgtttctccttttgagatattgtttccacattcattttatattaagttgtctaggagggttagttctcatttaaatgaatgttgtccttgtcaaggttaacattcccactggcaacatagcaagactccatctctacaaaaaataaaaaaattagccaggtgtagtggcatgcacctgtagtcccagctacttgggaggctgagatgggaggatcgcttgagcccgggaggctgagcctacaatgaaccatggtcatgtcactgcattccagtctgggcgacagagtaagactctatctcaaaaaaacaacacacacacaacaaaaaaattgtggggcgcctggcgctcagaaaagtcttaaaaccatgttgggcgcgggccccacaggtattacaactgacaccccggtcctcagaaccggcacacacggtggtctcccctaaag

SEQ ID NO: 52515 - DNA, 713 bp, Homo sapiens
cctgacctcaagcaaattcacctgccctggattcccaaagtgttgggattacaggcgtgagccactgcacgtggccgaggactgacactttgagttgtgactcaaaggtcgttgaagtacatctcagaagatttggaccattacatagtaggacatcttgcggcagagactgaacaattgaaaagactaaattcaggggttgtagttttacttgcaaaattgacgtacagttgacgttaatcacccagaatgcagaaaaacagcaaaggaatcctaaatggggatcattcataacacatcgcttttgatccatgtttaattgggtgccaccaacctcagcattagctttcattttaattagtgacatggaagagcaagagaacatatcttgagaacagtgctatattaaggaaagctctgcaagaaatcaaaataagattctactagaaaacctgctaaggagtgcccgggggtaggtggggaagtatggaaaggcaagaaccgaagtctagctaggcagtgtcaggagacacctggaaagtggtagtcagctagaggaaattgccacaaaattagatggaaattttcagtgttgagggatctaaaaaagaccaatgtgattcagtccagtgcatagatgcagaactcatactgcaaatgtccaaattgtccttcctgtcttttcttgtcaaacttggccttgccatatgcaa

SEQ ID NO: 52516 - DNA, 476 bp, Homo sapiens
ccatagtctaattattcttcaaatttatgttttaattatacttcttccattcagttgtatcttaatatatttttatatgtgaaagtcttttactgaccactctatcatatataatgcaataacaatatataaaaaaattaagtctaaatttaaaaatcccagtgcttccagcttgggcgttagggccattatggacaagttacagtgctgcagagattttatttttggccagttttggggccagtttatggccagattttggggggcttactcccaacactgaggagttaagattattgttcttcttctggagtgatgtcagcaaaagagaagggaaggtccaaggtctccttccccatcctctatctttaagaaaaatgaaaagcaggcactgttattaccaactttgtaagaactctgaaaaatgctcaagtttttcagcaaccaagcaaatgctgaatttcaaagcagtagga

SEQ ID NO: 52517 - DNA, 472 bp, Homo sapiens
ggagaattgagtgttttgatcaaaggtagcctatttagctgtaaaactgtctagaattatttcattcctaggataaaggaaaatttgtgtccaaaatatctctaaaggtattacactgtattcctttaatcttaatgatacacttttttttcttataaatgtagcacattatacactagcggtcttcagtatgataaacagatcaactaccaatttcattgccattactctttgaaatagtcctcattgagagttcttgaaacctgtgtctaataacaaagtaaaatataatcaaaaatttcacacaagtagaagaaaaaacattgacaaatctcttgggagaccacatacttatttttaacaagatgaatgaaatatattcaacctgtaaaatagtttgcaaatgttcatgtgctatattacattgcgtggagttcttattacagatgcaatttcctacaacattaaatct

SEQ ID NO: 52518 - DNA, 402 bp, Homo sapiens
agaagggcagaattatggaactggaaggcatctagttcagttttctcaatttgaaaatagaataaccgtggtctagagaggttaaacaggttacccaaggtcatatgctttaagttcagtgttgggatgagatgcccatctgctcatttccagcctgcagctttgttgccatggtgctcccttttacaaaccagtaaagatgtgttggagtaggtgatgatatccgttaactgatgttaggccatacagttttaatttgctccttctccaccccatctaaatgttcagacatcaggacacatgagaaataataaaaagtgatccttgggtgtgcaagtttagtggtcaaactgacccagcactattcacttggtagaaaaataattaaatagtgctggaaaa

SEQ ID NO: 52519 - DNA, 291 bp, Homo sapiens
atcaactcactcggccagaacccctcgtgtgtcgggggacccagaggcaggggtgaagccgctgctggggatccaggcgcactcactcaccctttgcgctccccagtccccaggggatgcaccttcctcgtcccaaccccgtgcactgctgcacccccagccagccccgtgctctcctccgctgatccggccgcctacccgaggcagtctcggaaccccggaccccagccatgcgcgcagggaactgccgggccgagcgagctcaccgaagtagtcccgcgccgtgcgcgc

SEQ ID NO: 52520 - DNA, 529 bp, Homo sapiens
  misc_feature (1)..(4): n is a, c, g, or t
  misc_feature (6)..(6): n is a, c, g, or t
  misc_feature (11)..(11): n is a, c, g, or t
  misc_feature (13)..(13): n is a, c, g, or t
  misc_feature (223)..(223): n is a, c, g, or t
nnnntnttctncnagcaatttcgagtgcaagtgcacagtgtcagctaaagaaacacaactgcgggttttctgcagagcaaaatggttctgaaatgtcactgaatagctcacaaaggacgccaatctacgacaacagagacataagcatataggagaaagggtccacacatcctcctttcaaagtgtggagaaaagagagagaaagggagagaagagtcatggnaccctactttatggttgccatggatgcaaggtcagccttccacacttggatctaccagcagagttcagacaggtcaacgtgtgaccggctcaggccctggggttaaaagttcaagcagctatggaaaaaccaatatgtccacgcagagtatgctgtacaatttatttcaatttacatcaagccatgcatataaaatttagataaattccattcagatctgatgttgcctgacacacaatgtatgcaaacagatgtctgtggggctttttctgtgctttagaaaacaacattaaatttaaaaatatg

SEQ ID NO: 52521 - DNA, 680 bp, Homo sapiens
  misc_feature (1)..(4): n is a, c, g, or t
  misc_feature (6)..(6): n is a, c, g, or t
  misc_feature (11)..(11): n is a, c, g, or t
  misc_feature (13)..(13): n is a, c, g, or t
  misc_feature (223)..(223): n is a, c, g, or t
nnnntnttctncnagcaatttcgagtgcaagtgcacagtgtcagctaaagaaacacaactgcgggttttctgcagagcaaaatggttctgaaatgtcactgaatagctcacaaaggacgccaatctacgacaacagagacataagcatataggagaaagggtccacacatcctcctttcaaagtgtggagaaaagagagagaaagggagagaagagtcatggnaccctactttatggttgccatggatgcaaggtcagccttccacacttggatctaccagcagagttcagacaggtcaacgtgtgaccggctcaggccctggggttaaaagttcaagcagctatggaaaaaccaatatgtccacgcagagtatgctgtacaatttatttcaatttacatcaagccatgcatataaaatttagataaattccattcagatctgatgttgcctgacacacaatgtatgcaaacagatgtctgtggggctttttctgtgctttagaaaacaacattaaatttaaaaatatgtctctgggatttctttattgaattacaaaatgaacataattttaacttaaatgttttcattcttttttccaatttttttgtgtgggggtcttaataatttctcagttctcaatctactctatgtcatattaaagaggataatgtatattta

SEQ ID NO: 52522 - DNA, 1402 bp, Homo sapiens
  misc_feature (1)..(4): n is a, c, g, or t
  misc_feature (6)..(6): n is a, c, g, or t
  misc_feature (11)..(11): n is a, c, g, or t
  misc_feature (13)..(13): n is a, c, g, or t
  misc_feature (223)..(223): n is a, c, g, or t
nnnntnttctncnagcaatttcgagtgcaagtgcacagtgtcagctaaagaaacacaactgcgggttttctgcagagcaaaatggttctgaaatgtcactgaatagctcacaaaggacgccaatctacgacaacagagacataagcatataggagaaagggtccacacatcctcctttcaaagtgtggagaaaagagagagaaagggagagaagagtcatggnaccctactttatggttgccatggatgcaaggtcagccttccacacttggatctaccagcagagttcagacaggtcaacgtgtgaccggctcaggccctggggttaaaagttcaagcagctatggaaaaaccaatatgtccacgcagagtatgctgtacaatttatttcaatttacatcaagccatgcatataaaatttagataaattccattcagatctgatgttgcctgacacacaatgtatgcaaacagatgtctgtggggctttttctgtgctttagaaaacaacattaaatttaaaaatatgtctctgggatttctttattgaattacaaaatgaacataattttaacttaaatgttttcattcttttttccaatttttttgtgtgggggtcttaataatttctcagttctcaatctactctatgtcatattaaagaggataatgtatatttacaactacagcttcagtgtcattgtagttatagattctatttatatcccttaccactttccgcaaatatttagtgattgatatttctgatttatctctggtttctagcctcatctccattcctttctactttgaacatagcaagtcctggaggctgctgggtcgtcttccagccacaaggtggctcccctcaatcgccttctctcaagccaatcgatgtacacctttgctgagttctccaggcggactacaattcagagctaattatgatctataaatgccattattttcattgtgaagtaaatggcttatgaccaagaccctggtacactaagatacaatgcaaaattagtctttaaaaataggagaaagaaaaatacctttgtatttgcctaatttctcttcacccatccttccaaaagtacaactgagctatccttagagtaaaataagaaaaataataaaaggctccagaggaacctaattttgttgtcaatgaacatagtcatagactagacaaggtcaaattttaagaaaagtatacaacttattctcacttaaactagacctacttttggatttgatattttaccacaagagagttttgatgagaagactttgcaaaactttcttagaagtcccacatcatgccatcattgaagaacagtgatctccaatactgcaaggctttaaaaggagtggaaatattacatatttccttttt

SEQ ID NO: 52523 - DNA, 1252 bp, Homo sapiens
  misc_feature (11)..(11): n is a, c, g, or t
  misc_feature (27)..(27): n is a, c, g, or t
  misc_feature (40)..(40): n is a, c, g, or t
  misc_feature (47)..(47): n is a, c, g, or t
  misc_feature (54)..(54): n is a, c, g, or t
agaggaggagngcttgacatccggttngctgacacggttnctatccnggaccanggagggagaaaacctatggttcctactttatggttgccatggatgcaaggtcagccttccacacttggatctaccagcagagttcagacaggtcaacgtgtgaccggctcaggccctggggttaaaagttcaagcagctatggaaaaaccaatatgtccacgcagagtatgctgtacaatttatttcaatttacatcaagccatgcatataaaatttagataaattccattcagatctgatgttgcctgacacacaatgtatgcaaacagatgtctgtggggctttttctgtgctttagaaaacaacattaaatttaaaaatatgtctctgggatttctttattgaattacaaaatgaacataattttaacttaaatgttttcattcttttttccaatttttttgtgtgggggtcttaataatttctcagttctcaatctactctatgtcatattaaagaggataatgtatatttacaactacagcttcagtgtcattgtagttatagattctatttatatcccttaccactttccgcaaatatttagtgattgatatttctgatttatctctggtttctagcctcatctccattcctttctactttgaacatagcaagtcctggaggctgctgggtcgtcttccagccacaaggtggctcccctcaatcgccttctctcaagccaatcgatgtacacctttgctgagttctccaggcggactacaattcagagctaattatgatctataaatgccattattttcattgtgaagtaaatggcttatgaccaagaccctggtacactaagatacaatgcaaaattagtctttaaaaataggagaaagaaaaatacctttgtatttgcctaatttctcttcacccatccttccaaaagtacaactgagctatccttagagtaaaataagaaaaataataaaaggctccagaggaacctaattttgttgtcaatgaacatagtcatagactagacaaggtcaaattttaagaaaagtatacaacttattctcacttaaactagacctacttttggatttgatattttaccacaagagagttttgatgagaagactttgcaaaactttcttagaagtcccacatcatgccatcattgaagaacagtgatctccaatactgcaaggctttaaaaggagtggaaatattacatatttccttttt

SEQ ID NO: 52524 - DNA, 869 bp, Homo sapiens
  misc_feature (1)..(4): n is a, c, g, or t
  misc_feature (6)..(6): n is a, c, g, or t
  misc_feature (11)..(11): n is a, c, g, or t
  misc_feature (13)..(13): n is a, c, g, or t
  misc_feature (223)..(223): n is a, c, g, or t
nnnntnttctncnagcaatttcgagtgcaagtgcacagtgtcagctaaagaaacacaactgcgggttttctgcagagcaaaatggttctgaaatgtcactgaatagctcacaaaggacgccaatctacgacaacagagacataagcatataggagaaagggtccacacatcctcctttcaaagtgtggagaaaagagagagaaagggagagaagagtcatggnaccctactttatggttgccatggatgcaagcctcatctccattcctttctactttgaacatagcaagtcctggaggctgctgggtcgtcttccagccacaaggtggctcccctcaatcgccttctctcaagccaatcgatgtacacctttgctgagttctccaggcggactacaattcagagctaattatgatctataaatgccattattttcattgtgaagtaaatggcttatgaccaagaccctggtacactaagatacaatgcaaaattagtctttaaaaataggagaaagaaaaatacctttgtatttgcctaatttctcttcacccatccttccaaaagtacaactgagctatccttagagtaaaataagaaaaataataaaaggctccagaggaacctaattttgttgtcaatgaacatagtcatagactagacaaggtcaaattttaagaaaagtatacaacttattctcacttaaactagacctacttttggatttgatattttaccacaagagagttttgatgagaagactttgcaaaactttcttagaagtcccacatcatgccatcattgaagaacagtgatctccaatactgcaaggctttaaaaggagtggaaatattacatatttccttttt

SEQ ID NO: 52525 - DNA, 521 bp, Homo sapiens
gggtggccatggtggagatcagcagcagcttccccacccaggacaaggcctagaggctcccagggtgatggagaatgcttcagagacagaaaaatgtgagccctagaagtgggaggctgacagcctgcatgagaactatccactgtacctgcatgtggactcgaagacagtctccgggaatatgggctgaggaatccacagtgtcagatgaggaaactgagacccaaaaagagacagcaactggcccagggtcaccagcatgcagatgcctgctatgatgtctctgcttcttgtgtctgtgggcctcatggaagcacttcaggcccagagccaccccatcacacgacgagacctcttgtcagcacagatgtaacttctgctctaatccatgagtcctgaggctcctctcatcacggctcactgtagcctcaaactcctggtttcaagagatcctcccacctcagcctcccaagtagctgggactacagatatgtgccaccacacctgactaatttttgtgt

SEQ ID NO: 52526 - DNA, 1315 bp, Homo sapiens
gggtggccatggtggagatcagcagcagcttccccacccaggacaaggcctagatgaggaaactgagacccaaaaagagacagcaactggcccagggtcaccagcatgcagatgcctgctatgatgtctctgcttcttgtgtctgtgggcctcatggaagcacttcaggcccagagccaccccatcacacgacgagacctcttctctcaagagattcagctggacatggccctggcctcctttgatgaccagtacgctggctgtgctgctgccatgacagctgctctcccggatctcaaccacacggagttccaggccaaccaggtgtatgcagacagctggacactggcaagcagccaatggcaggagcgtcaggccaggtggccagagtggagtctcagccccacccgtccatccccgccacccctgggcttccgcgatgagcatggggtggccctcctggcctacacagccaacagccccctgcacaaggagttcaatgcagccgtgcgtgaggcgggccgctcccgggcccactacctccaccacttctccttcaagacactccatttcctgctgactgaggccctgcagctcctgggcagcggccagcgtccaccccggtgccaccaggtgttccgaggtgtgcacggcctgcgcttccggccagcagggccccgggccaccgtgaggctggggggctttgcttctgcctccctgaagcatgttgcagcccagcagtttggtgaggacaccttcttcggcatctggacctgccttggggcccctatcaagggctactccttcttccctggagaggaagaggtgctgatccccccctttgagaccttccaagtgatcaatgccagcagaccggcccagggccccgcccgcatctacctccgagccctgggcaagcacagcacctacaactgcgagtacatcaaagacaagaagtgcaagtctgggccttgccatctggataattcagccatgggtcagagccccctctctgcagtctggtctttgctgctgctgctctggttcctcgtggtgagggcctttccagatggtccaggcctcctttgatgcatgagacacgggacagcctcgcctgctgcctctgcccatcctgaggatgttggccatgtgtgcttcagtgtaaccaagattcctgtcaatcccatctgcagggaactctgggaccttctctggtagctgccagaccggctggtggagaaacaggagacaatctggggactgaaccttacccagggctgtaggagtgagactctgaataaagggttgggccggc

SEQ ID NO: 52527 - DNA, 176 bp, Homo sapiens
gttcccttcagattgattattttgatgcaactttgcctcacttttcagctgatactgtatgtgtagtttttataggtaccatatacgtatacaaatgtaccactgtttttaaatgaagtatgaaaaaaatttaaaatatagtattactacattgagcctatatctgctctaacata

SEQ ID NO: 52528 - DNA, 682 bp, Homo sapiens
gccgactactactacctactactacattggcccccggtcgactttaaagagctcttttagagttagacatagatttttgtcatatgtcacttgcacattcaataagatggaaaacacaagtgaaaaaacacataaggaattgctaaatttcacatatttagagtctgccttctgaattgtttttggagtcagagttgttaatacctgtaattttccgttaaacatcctctgtgccgccaagagaattggtgatgtagcattcctttcaagatcccaaaaaagactgcgaaggttttggtgctggccttcagctttgcaattatgcaaagccagcctactttgactgctgcttagggattccccatcttctacttccttcccagtccatttggttcctagagggtgaaatgaatgctccagtatcatttctgggaatttctttcaggctgttgactgtcatatgcaaatgtcatgctggcagttttgttattttcccatgtgtaagcaatgacaacatcataattggcttctgtctgatagcaattgtaagaggaatcccaatttctgaaatgttacccaaaaaagtgactttaattgacgaagtatgatgatgtagaaggataggcaagaaatgcaaaaggtaatttagaaaggtttcatgggtaaaatgtgacctatgtga

SEQ ID NO: 52529 - DNA, 447 bp, Homo sapiens
gccgactactactacctactactacattggcccccggtcgactttaaagagctcttttagagttagacatagatttttgtcatatgtcacttgcacattcaataagatggaaaacacaagtgaaaaaacacataaggaattgctaaatttcacatatttagagtctgccttctgaattgtttttggagtcagagttgttaatacctgtaattttccgttaaacatcctctgtgccgccaagagaattggtgatgtagcattcctttcaagatcccaaaaaagactgcgaaggttttggtgctggccttcagctttgcaattatgcaaagccagcctactttgactgctgcttagggattccccatcttctacttccttccctcattccttgctctatgtgcatctcttcatctgtatcctttgcgatatcctttataataaaccggt

SEQ ID NO: 52530 - DNA, 343 bp, Homo sapiens
  misc_feature (227)..(227): n is a, c, g, or t
  misc_feature (279)..(279): n is a, c, g, or t
  misc_feature (292)..(292): n is a, c, g, or t
ctaggttcaggccatcctcttgcctcagcctctagagtagctgagactacaggtgcacaccaccacatctggctaacttccaaatcttttctaggaggaccattccatttgcctttttaataaattgtggccaaggaattggttttttttaaaaagccaatttgcacacacatatatcagccatgaattttgtatacactgaaactaagcattatatatgaaagaanagatacagtctttttcagacaaacaaatgctgagataagtcaccactaccangccacaactatangaactgctaaaagaagctctaaatcttgaaacgcatcctgggaggcacatc

SEQ ID NO: 52531 - DNA, 338 bp, Homo sapiens
ccccccacatacttttcagaagtgtgaggaggttgaatgttccagaagaagattcctgacaaagaggctgccctgggacacttcctgcagaggacacgctgcccgatttgtgaggttgcccagaacccccacggcagaggcagtgttcacagaatctcaggaattttaactttccggtcctcaatatcctttcattggctaaaatttaagattttgttttaacagcccagcaagctaagaattaactttttagaacccaggaactaatgtatttgtcagataagccttccctccactctttccacagcatgtccctcaaccagtccctgcattggccc

SEQ ID NO: 52532 - DNA, 233 bp, Homo sapiens
tccatattgttgtaaagcaaggtaatggacaaactgcagtttataggcataagatgaagtaaacaattctactctattacattagtttgtacttgccctgctataaataaatacctgagactgggcaatttataaagaaaggaggtttagttggctcatggttctttcttcaggctgtacaggaagcatgaaagcctctggggaggcttcaggaagactttcaatcatggcag

SEQ ID NO: 52533 - DNA, 473 bp, Homo sapiens
tactgcttcctccctcccatgtctcctggaagaatcagctccttcctggacctgctgcctgctccaaccctcctccctcctttctcagccagacccagttcattcccccaacaccaacaggggcttctgccccttgccccaaagttgctgtgacaaaagtccccaaaggccaggtctaggagatgcctgagcctccactgacctctgtgcatgtggcccaccagtggccactctctttctggaaatgttccttcatgggcttctgggactctctttccctgtcttcccctctttctcaggctcccctccccctgtccaatgctggtgctgcccagggctcagactccagccttccctctcactgtgcaccttttccctcaacttcatgcatccttgaagctttgcctctctcctagaggctgattcccaaaactgatagtccacactgggctcctttaagctccagtccaaca

SEQ ID NO: 52534 - DNA, 282 bp, Homo sapiens
gataatcatgtgtttttgttctttagttgtttagtttatgtgatgaatcacgtttattgatttggttatgttgaagcaacctggcatcctggggatgaagccaacttaatctcagaccaaaccttcttaagcaacttcagcaaagtctcagagtacaaaatcggtgtgcaaaaatcaccaacaacaggcaagccgaaagtcaaatcatgaatgaatttccattcacagttgctgcaaaaaacaaacaaacaaaacctaggaatacagctaacaagggaaggg

SEQ ID NO: 52535 - DNA, 984 bp, Homo sapiens
aatgagtcaggggctgtggacagtgacctgaaccccttccttgcccctagacaagccacagctgacctgctgagcagcctggaggacctggagctcagcaaccgacgtctggttggggagaatgccaaactgcagcggagcatggagacagctgaggaggggtcagcacgccttggggaggagatcttggctctgcgtaagcagcttcacagcacccagcaggccctgcagtttgccaaggccatggatgaggagctggaggacctgaagactctggccaggagcctggaggaacagaatcgcagccttctggcccaagcccggcaggcggtgggtctggcccaggggaaggaaggtgccctctctcttctttgtttcctggagtcagggcggcagagtgtgactatggagtaggaaggggcagaggtcacctggctttctccctctctccaggccctgctcaccctagactttttcaagcttacctgccatccttctcatgacaaaggagacagcaggagccatcagggcttcccagacccattcccccaggccctggttgtgttttcaggggtgggagaagggcaacatgggggcaaggaggctagaaatgaaacctttgtcctctctctggggttggtcaggaaaaggagcagcagcatctggtggctgagatggagactctgcaggaggaggtgagcggaggcccagcaccacccccaccccttccccagtccttaaggtcttcttgacaccactcccttctgcccccaacaccccagcagcctgtcttggggagacctcagaatgtcagtagtgtgggaatgtccctgaggttatatcacactgtgagaacagccgtggtttacaagagtgtgaggcatggggtcagcctacatggcttcaggctgaggccacctacataagagtggaccagtgcctcccttctctgtgcctcagttgcctcacctataaagatgaaca

SEQ ID NO: 52536 - DNA, 1525 bp, Homo sapiens
tgtgtcccgagactaggacgtggctccaggagtgctcgggccagctggtccttttcccatccctccccatgaaggagggaggctggtagctttgccagcagctgcgccgcggcaggggtggcccatggacctgcctgagggcccggtgggtggccccactgcggaaatgtacctccgggagcggcctgaggaggcaaggctgggaatgccggtcagcttggaggagcaaatactcaactccacgttcgaagcttgtgaccctcagaggacaggcactgtggctgtggcccaggtgctggcctacctggaggctgtgacaggccagggcccccaggatgcacgcctccaaacattggccaacagcctggaccccaatggggagggccctaaggccactgtggacttggacactttcctggttgtcatgcgtgactggattgctgcctgtcaactacatgggggattagagctggaagaggagaccgccttccagggagccctgacctcccagcaactgccatctggatgcccagaagctgaggagccagccaacctggagagcttcggaggcgaagaccccagacccgagctacaagccacagctgacctgctgagcagcctggaggacctggagctcagcaaccgacgtctggttggggagaatgccaaactgcagcggagcatggagacagctgaggaggggtcagcacgccttggggaggagatcttggctctgcgtaagcagcttcacagcacccagcaggccctgcagtttgccaaggccatggatgaggagctggaggacctgaagactctggccaggagcctggaggaacagaatcgcagccttctggcccaagcccggcaggcggtgggtctggcccaggggaaggaaggtgccctctctcttctttgtttcctggagtcagggcggcagagtgtgactatggagtaggaaggggcagaggtcacctggctttctccctctctccaggccctgctcaccctagactttttcaagcttacctgccatccttctcatgacaaaggagacagcaggagccatcagggcttcccagacccattcccccaggccctggttgtgttttcaggggtgggagaagggcaacatgggggcaaggaggctagaaatgaaacctttgtcctctctctggggttggtcaggaaaaggagcagcagcatctggtggctgagatggagactctgcaggaggaggtgagcggaggcccagcaccacccccaccccttccccagtccttaaggtcttcttgacaccactcccttctgcccccaacaccccagcagcctgtcttggggagacctcagaatgtcagtagtgtgggaatgtccctgaggttatatcacactgtgagaacagccgtggtttacaagagtgtgaggcatggggtcagcctacatggcttcaggctgaggccacctacataagagtggaccagtgcctcccttctctgtgcctcagttgcctcacctataaagatgaaca

SEQ ID NO: 52537 - DNA, 1598 bp, Homo sapiens
cgaaatcctagcgaagcccccccatattgtgggagagatacccctgcgtcagggccccccagatcctgaccacttgggaggccgaggcgggcggatcacgaggagtgctcgggccagctggtccttttcccatccctccccatgaaggagggaggctggtagctttgccagcagctgcgccgcggcaggggtggcccatggacctgcctgagggcccggtgggtggccccactgcggaaatgtacctccgggagcggcctgaggaggcaaggctgggaatgccggtcagcttggaggagcaaatactcaactccacgttcgaagcttgtgaccctcagaggacaggcactgtggctgtggcccaggtgctggcctacctggaggctgtgacaggccagggcccccaggatgcacgcctccaaacattggccaacagcctggaccccaatggggagggccctaaggccactgtggacttggacactttcctggttgtcatgcgtgactggattgctgcctgtcaactacatgggggattagagctggaagaggagaccgccttccagggagccctgacctcccagcaactgccatctggatgcccagaagctgaggagccagccaacctggagagcttcggaggcgaagaccccagacccgagctacaagccacagctgacctgctgagcagcctggaggacctggagctcagcaaccgacgtctggttggggagaatgccaaactgcagcggagcatggagacagctgaggaggggtcagcacgccttggggaggagatcttggctctgcgtaagcagcttcacagcacccagcaggccctgcagtttgccaaggccatggatgaggagctggaggacctgaagactctggccaggagcctggaggaacagaatcgcagccttctggcccaagcccggcaggcggtgggtctggcccaggggaaggaaggtgccctctctcttctttgtttcctggagtcagggcggcagagtgtgactatggagtaggaaggggcagaggtcacctggctttctccctctctccaggccctgctcaccctagactttttcaagcttacctgccatccttctcatgacaaaggagacagcaggagccatcagggcttcccagacccattcccccaggccctggttgtgttttcaggggtgggagaagggcaacatgggggcaaggaggctagaaatgaaacctttgtcctctctctggggttggtcaggaaaaggagcagcagcatctggtggctgagatggagactctgcaggaggaggtgagcggaggcccagcaccacccccaccccttccccagtccttaaggtcttcttgacaccactcccttctgcccccaacaccccagcagcctgtcttggggagacctcagaatgtcagtagtgtgggaatgtccctgaggttatatcacactgtgagaacagccgtggtttacaagagtgtgaggcatggggtcagcctacatggcttcaggctgaggccacctacataagagtggaccagtgcctcccttctctgtgcctcagttgcctcacctataaagatgaaca

SEQ ID NO: 52538 - DNA, 1580 bp, Homo sapiens
tgtgtcccgagactaggacgtggctccaggagtgctcgggccagctggtccttttcccatccctccccatgaaggagggaggctggtagctttgccagcagctgcgccgcggcaggggtggcccatggacctgcctgagggcccggtgggtggccccactgcggaaagaaagaggtaacaccaaccccattttccagaggaagaaactgaggcccaagagaatgtacctccgggagcggcctgaggaggcaaggctgggaatgccggtcagcttggaggagcaaatactcaactccacgttcgaagcttgtgaccctcagaggacaggcactgtggctgtggcccaggtgctggcctacctggaggctgtgacaggccagggcccccaggatgcacgcctccaaacattggccaacagcctggaccccaatggggagggccctaaggccactgtggacttggacactttcctggttgtcatgcgtgactggattgctgcctgtcaactacatgggggattagagctggaagaggagaccgccttccagggagccctgacctcccagcaactgccatctggatgcccagaagctgaggagccagccaacctggagagcttcggaggcgaagaccccagacccgagctacaagccacagctgacctgctgagcagcctggaggacctggagctcagcaaccgacgtctggttggggagaatgccaaactgcagcggagcatggagacagctgaggaggggtcagcacgccttggggaggagatcttggctctgcgtaagcagcttcacagcacccagcaggccctgcagtttgccaaggccatggatgaggagctggaggacctgaagactctggccaggagcctggaggaacagaatcgcagccttctggcccaagcccggcaggcggtgggtctggcccaggggaaggaaggtgccctctctcttctttgtttcctggagtcagggcggcagagtgtgactatggagtaggaaggggcagaggtcacctggctttctccctctctccaggccctgctcaccctagactttttcaagcttacctgccatccttctcatgacaaaggagacagcaggagccatcagggcttcccagacccattcccccaggccctggttgtgttttcaggggtgggagaagggcaacatgggggcaaggaggctagaaatgaaacctttgtcctctctctggggttggtcaggaaaaggagcagcagcatctggtggctgagatggagactctgcaggaggaggtgagcggaggcccagcaccacccccaccccttccccagtccttaaggtcttcttgacaccactcccttctgcccccaacaccccagcagcctgtcttggggagacctcagaatgtcagtagtgtgggaatgtccctgaggttatatcacactgtgagaacagccgtggtttacaagagtgtgaggcatggggtcagcctacatggcttcaggctgaggccacctacataagagtggaccagtgcctcccttctctgtgcctcagttgcctcacctataaagatgaaca

SEQ ID NO: 52539 - DNA, 767 bp, Homo sapiens
gggcagctacagtggggcgctaagcctcatccctttgatacaggggattagagctggaagaggagaccgccttccagggagccctgacctcccagcaactgccatctggatgcccagaagctgaggagccagccaacctggagagcttcggaggcgaagaccccagacccgagctacaagccacagctgacctgctgagcagcctggaggacctggagctcagcaaccgacgtctggttggggagaatgccaaactgcagcggagcatggagacagctgaggaggggtcagcacgccttggggaggagatcttggctctgcgtaagcagcttcacagcacccagcaggccctgcagtttgccaaggccatggatgaggagctggaggacctgaagactctggccaggagcctggaggaacagaatcgcagccttctggcccaagcccggcaggcggaaaaggagcagcagcatctggtggctgagatggagactctgcaggaggagaacgggaagctgcttgccgagcgggatggagtgaaaaagagaagtcaggagctggccatggagaaggacactttgaagcggcagctctttgagtgtgaacacctcatttgccaaagagacaccatcctctctgagcgcactcgcgatgtggagagcctggcccagaccctggaagaatacagagtgacgacgcaggaactgaggctggagatttcacgcctggaggagcagctgagtcagacctatgaggggcccgatgag

SEQ ID NO: 52540 - DNA, 1183 bp, Homo sapiens
tgtgtcccgagactaggacgtggctccaggagtgctcgggccagctggtccttttcccatccctccccatgaaggagggaggctggtagctttgccagcagctgcgccgcggcaggggtggcccatggacctgcctgagggcccggtgggtggccccactgcggaaatgtacctccgggagcggcctgaggaggcaaggctgggaatgccggtcagcttggaggagcaaatactcaactccacgttcgaagcttgtgaccctcagaggacaggcactgtggctgtggcccaggtgctggcctacctggaggctgtgacaggccagggcccccaggatgcacgcctccaaacattggccaacagcctggaccccaatggggagggccctaaggccactgtggacttggacactttcctggttgtcatgcgtgactggattgctgcctgtcaactacatgggggattagagctggaagaggagaccgccttccagggagccctgacctcccagcaactgccatctggatgcccagaagctgaggagccagccaacctggagagcttcggaggcgaagaccccagacccgagctacaagccacagctgacctgctgagcagcctggaggacctggagctcagcaaccgacgtctggttggggagaatgccaaactgcagcggagcatggagacagctgaggaggggtcagcacgccttggggaggagatcttggctctgcgtaagcagcttcacagcacccagcaggccctgcagtttgccaaggccatggatgaggagctggaggacctgaagactctggccaggagcctggaggaacagaatcgcagccttctggcccaagcccggcaggcggaaaaggagcagcagcatctggtggctgagatggagactctgcaggaggagaacgggaagctgcttgccgagcgggatggagtgaaaaagagaagtcaggagctggccatggagaaggacactttgaagcggcagctctttgagtgtgaacacctcatttgccaaagagacaccatcctctctgagcgcactcgcgatgtggagagcctggcccagaccctggaagaatacagagtgacgacgcaggaactgaggctggagatttcacgcctggaggagcagctgagtcagacctatgaggggcccgatgag

SEQ ID NO: 52541 - DNA, 1062 bp, Homo sapiens
gagagagaaggaagggaaacggcagagggatgcaaaggctagagctgaattccacaaacccgacttacttttcctggggctcttatgggatccagggccgggtacatttgtgtggttttaacttaacttgagttgagacactcagacatcacaggccagaaatcgtcctcttttacatgaaggaggggagtgtgggagggtggctgctcatggagggattacagacagaaaaagttgcaggggacaaaactcatccagaacgcttttccggtcttttcccaccccaagtgttaagccatttcaccctcttcaaaagcaaacacacaactccgatttgcatgcaggtaagaaaacacccctgctgccacatgggatcctggacttgtgtggcttgaagcaagaccagtggcaaagatttggtttcttctggcggcaggacacctaaggtagagatgtttttaatttactgaactgattgcccatctgtttatctccaagcccacaagactgttttcacgatgtaggtctttaaacaatctgttaagacacgggacaagttaatcaccctcgccgctccccaccaaaaaaatcaacaaaaacaagggctgggcaggcttaaaaataacaaaaaagtgggaattcttcatttcttcttttcttcttttttaaaatactgctccgtggcctctctttctggacttatctggccttcctgtgtaagtgtcaggcagcaatctttaaggcccttaataccaaaaacaaaaccctgccattccctttacatggtggtaacaaaagcaatgagcctccactttgacaagtaaaaagccccaaccacacagccccctaattgccttctctccctctattcacgcggaccaccacactcctggcagctgcttttgtcacacacgcaatttcttaagtaaactgcaagttctctgccgctgatggacagctcccaatcattcagcaacaataacttataaagtgcggcaaacaggatgggcaactttgactaagaatttattttctagctttctcaaaagaccgaaaaatgga

SEQ ID NO: 52542 - DNA, 492 bp, Homo sapiens
cttgctgtgagtctttctgcaagtggtttcacctctctgatcctttgtttcctcattgtaaggtcacattctgattctgaaaagtacaaatggtatttctgaagagggtgaactgggcgctggtctcttctgaggcaggggaaggttgttttttgctctctcggaggatttggttattcaggttgatttgtggcatcctggcctctcaggagtggtagtttcgaggtgtcgatgtgaatgtctgtgactccaattttgtgttcagaacagcaagacagacattctgctaacttcacatggtggagtcttgcagctcgaatcacgaatgcagagtgaaaaaatgctattgataaatattgcctgaactcctcaaagttctgatattttacaaagataatttcctaagttgctaaacctgaagctttctgcttcatagatgcccaaagccaacccttctgttttctctctaatactttgagcttattgaattta

SEQ ID NO: 52543 - DNA, 251 bp, Homo sapiens
caggcatggtggcgcatgcctgtaatcccaactcaggaggctgaggcaggagaattgcttgaatccaggaggtggagattgcaatgagctgagatcacaccactgcactccagctcggacaacagagcaagattctgtctcaaaaaaggaaaaaaaaaaagcgtctaaactcccgaagagaggattcagtgagaatattagtcatgatcctggcttgccattttcttaactttgaaattattctagtttgt

SEQ ID NO: 52544 - DNA, 670 bp, Homo sapiens
ggagggcaaaggtcaagtaaggagtttcggctcaagaaattaatctcacagatacatatacctcgtgagatctttttgtttgagggaagtttttgtttttctttgtcacagaacctctctctgtctctcccctcccccctcccccctcaggcttccagaatattcctgtgtctaggcatggagaggaggcggtcttttattaagagtggacaagatagtgtcttcccctagatgggttagaactgtcctggacagcttctcgaagcttctctctgttctcagtcttcctggaacctctcttcacctcttgcctcttgtgcctaactttcccctgtcctcaatgtctagtctcacttgttttcctcccccaattttaaaacatacagagttcatcgaaagacacataaattttaataggtctgaagctcatggccattggagatgagttaattctcattccctcaagattccctattttgacagctccctaaggaaaacacaacttgctggcttttctgttacttttgtcccccatgagcaattttgcatctgtgcagttggactgaacatctccagtgtgtcaagcgctctcctccagcagacaccccgtgtccagcagcaccccacggggaatgctccccttcaacgagctttgtcgtctctaaaaagg

SEQ ID NO: 52545 - DNA, 1376 bp, Homo sapiens
catcatcctgttgtcctgggcgacctgctgctgcctctgatttggcatttctgtttgggttttggttttggtttttctgtagtcctttcaaagataacttaatgaaacactttaaatactccattttaaaatttaaactcttttaattaaagcacttttcatggaaccctcagtcacgagttatttccccacatccttcagtacttaatctcggagcagaattggaaatatcgatagaaagtgtaaatcatgccctcctgctgaaagcgttgtatcaggtttcggctcaaaagagcaccattacctttagctgtcacggatctgtacacttgatcgataaacttcaaatattattagaggtagaggcttcagagatttgctctgttctttggagagagacagagataaatctttcttaaaaattgacttgaatttgcactctcagtcttcctggtgaaatgcatttctcttaggcatccagcaactgcaagggggacagatttataggccatgtgcttcttgtactgaaagattcaaatggtaaatccttcacatatgacttcacaaatcatgtaaagttaaaagatttttaccgtttctgttgctgctgtgcttaaattgtaaggtacagctagtaaatcattttaatggaggtgtcgtacttgactcaataaaaaaaaaagacaatggtttagcttccactccaaaatgttaatgtattaatcaacgggagaataattgtgttttactacattataaatctcaaatgccattaggatttcagcaaggggtgatgtagccacattcctaaattaaaatggtttacactgccatacatccattctgcatcaccatagctcattctgggttcattttggagttgttccccagccaaacatgtcgttcctcattcagaagaagacatcctgagggggtgatgcttataaaggaaaattaattgcattgcaatgtgttaaataaataaaataaccgtcggtggcaatggacaattattccttgctgtctcttttgaaatatgtttttaggttttaaattgaggcttactccttcatacatcctaaatgtagcaagcccgtcatctgtctttagtcttataatccctgtcttatctctatgcgactgtggcgtttgagcaccttacttctcccatgcatatccctaatctaccagataaataaagtcattgggggacattgaacgaggcggaccctcggtggctaaagggcctcaaagaccttaatacccgggaaccccctaaaaggcccgactggtacgacaggggaccgtacaagcagggggcaatattccacggagccaatgtcccagagaacccaagagatatacctggggcccct

SEQ ID NO: 52546 - DNA, 1318 bp, Homo sapiens
catcatcctgttgtcctgggcgacctgctgctgcctctgatttggcatttctgtttgggttttggttttggtttttctgtagtcctttcaaagataacttaatgaaacactttaaatactccattttaaaatttaaactcttttaattaaagcacttttcatggaaccctcagtcacgagttatttccccacatccttcagtacttaatctcggagcagaattggaaatatcgatagaaagtgtaaatcatgccctcctgctgaaagcgttgtatcaggtttcggctcaaaagagcaccattacctttagctgtcacggatctgtacacttgatcgataaacttcaaatattattagaggtagaggcttcagagatttgctctgttctttggagagagacagagataaatctttcttaaaaattgacttgaatttgcactctcagtcttcctggtgaaatgcatttctcttaggcatccagcaactgcaagggggacagatttataggccatgtgcttcttgtactgaaagattcaaatggtaaatccttcacatatgacttcacaaatcatgtaaagttaaaagatttttaccgtttctgttgctgctgtgcttaaattgtaaggtacagctagtaaatcattttaatggaggtgtcgtacttgactcaataaaaataattgtgttttactacattataaatctcaaatgccattaggatttcagcaaggggtgatgtagccacattcctaaattaaaatggtttacactgccatacatccattctgcatcaccatagctcattctgggttcattttggagttgttccccagccaaacatgtcgttcctcattcagaagaagacatcctgagggggtgatgcttataaaggaaaattaattgcattgcaatgtgttaaataaataaaataaccgtcggtggcaatggacaattattccttgctgtctcttttgaaatatgtttttaggttttaaattgaggcttactccttcatacatcctaaatgtagcaagcccgtcatctgtctttagtcttataatccctgtcttatctctatgcgactgtggcgtttgagcaccttacttctcccatgcatatccctaatctaccagataaataaagtcattgggggacattgaacgaggcggaccctcggtggctaaagggcctcaaagaccttaatacccgggaaccccctaaaaggcccgactggtacgacaggggaccgtacaagcagggggcaatattccacggagccaatgtcccagagaacccaagagatatacctggggcccct

SEQ ID NO: 52547 - DNA, 1091 bp, Homo sapiens
ttctgtggaggggactagaatagccatgttgtagttatcttagaagtcaggggtggggaagggcagggaggagggggaagcaattgttttgtcacacaccatgatgtaaactaactttcccctgtcctcaatgtctagtctcacttgttttcctcccccaattttaaaacatacagagttcatcgaaagacacataaattttaataggtctgaagctcatggccattggagatgagttaattctcattccctcaagattccctattttgacaatttataggccatgtgcttcttgtactgaaagattcaaatggtaaatccttcacatatgacttcacaaatcatgtaaagttaaaagatttttaccgtttctgttgctgctgtgcttaaattgtaaggtacagctagtaaatcattttaatggaggtgtcgtacttgactcaataaaaataattgtgttttactacattataaatctcaaatgccattaggatttcagcaaggggtgatgtagccacattcctaaattaaaatggtttacactgccatacatccattctgcatcaccatagctcattctgggttcattttggagttgttccccagccaaacatgtcgttcctcattcagaagaagacatcctgagggggtgatgcttataaaggaaaattaattgcattgcaatgtgttaaataaataaaataaccgtcggtggcaatggacaattattccttgctgtctcttttgaaatatgtttttaggttttaaattgaggcttactccttcatacatcctaaatgtagcaagcccgtcatctgtctttagtcttataatccctgtcttatctctatgcgactgtggcgtttgagcaccttacttctcccatgcatatccctaatctaccagataaataaagtcattgggggacattgaacgaggcggaccctcggtggctaaagggcctcaaagaccttaatacccgggaaccccctaaaaggcccgactggtacgacaggggaccgtacaagcagggggcaatattccacggagccaatgtcccagagaacccaagagatatacctggggcccct

SEQ ID NO: 52548 - DNA, 348 bp, Homo sapiens
aacattttctgaaggcatacagatatgcccaaagatggacagatcaagcagcttgcctaaagccacaccgctggtaaatggctgagccaggattcatcaacctaggaaggatgtgttttcttaatcacagctaaactaaactaccaaggctatcttatggtacattccaacttcaaatctgcaaatccaaaatcatttgttcaactctgcaaaagttgcatcaaacaaggcttgttaacttttactgtcacagaagcttcaagaacttataacaatgcttagagttgggtaatgaactatgctagttttttctttacttttcaaagtttatttaatgtgcttatattc

SEQ ID NO: 52549 - DNA, 487 bp, Homo sapiens
gaaggcaggcatcctacacactagccaaagacaataattcttccaaagaagaactggaaggctggtaaatgttctgaacccttacttgtctgatgtagcttcattttaccctcgcacttgaatgatcatttatgttcaaagccatttcccctcagagctttgaaaacattgctccattattttcttgtatccaattgtgctaatgaggaatatgatatcaatccaattcttgttcctatgcgtagtgggttggagtgagttacccaaaaagacacatttaagtcccagacccaacccccagcacttgttagtgtgaccttatttgcaaggagggtgtgtgcagatataattaaggatcttgagatgggatcttttagggtgggccctaagtccaaggactggggtccttataagaaaaggaaagaatgcagagacacagagaaggctatgtggagatggaagcaaagagcaggatcatggagctgca

SEQ ID NO: 52550 - DNA, 479 bp, Homo sapiens
acggttctagctccagaaaaaatgacattattgagaagaatccttccttaaggatggcaataactggctcaatgggaccaaaaaaaaaaaaaaaaaacaaaaaatctgacagaaaatctagcagcctagcaagcaggctttttccactttaagaatcgattttagcagctggaggagacagttcaaaggcctgaccactggctgagactcacctgtgctccagagggctattccctgattgctgagtaactgtggaccagctttggtctgggcaaaccagaaaacatctctgccatccagtgggctgcaactacatccagtgggctgcaactacaacaagtcctgaatccagcctagagaatcctccttccaagttagttcttccttgagaactctccttcagctctatggtagcctatggaagttaggctcttattgtcatagtttgtattacttttattaaaactttttaaaatcgc

SEQ ID NO: 52551 - DNA, 355 bp, Homo sapiens
acggttctagctccagaaaaaatgacattattgagaagaatccttccttaaggatggcaataactggctcaatgggaccaaaaaaaaaaaaaaaaaacaaaaaatctgacagaaaatctagcagcctagcaagcaggctttttccactttaagaatcgattttagcagctggaggagacagttcaaaggtaagtgatgattcatcccagagaaacaagttataaacaaaactgggagcagtcagttgaccttgaatcagctgcttcatttatacagtttaactagttataaaggaatataattatatagcaagcacctgtgtaaacaccatctaggtttaacaatgccatcttcc

SEQ ID NO: 52552 - DNA, 331 bp, Homo sapiens
aaattcagaggaacatgtactggggtcttaggaacattttcagccagtggagaggaaaaggaaaactaagtatctcttggatcattcacagagttcaccaaatacaactgaaaactgggggctctaatgtccctgctgccctgatggtattagtttaagatgttgacactgacatctgcagagatctcatccatcacggtatatcaaagagcaaatgtcattctagttgagaaactcatgtatgagaaagaatggtcatcttgggaaatctgtagctccagcggctcctgatgttttttcctgcctcctcctgtcccatgcttgtgcccca

SEQ ID NO: 52553 - DNA, 191 bp, Homo sapiens
tgaaaccaatgtcgccaggaacctccgaattcatatgaccagcgaaaagcacatgcataatatgatgcttttgcagcagaacatgaagcagatccagcataatctgcacttgggcctcgccccggcggaagcagagctttatcagtactacctagcccagaacataggcctgaccggaatgaagctggaaa

SEQ ID NO: 52554 - DNA, 456 bp, Homo sapiens
ccatccctaggtttcacaactagtaagctgagattcggactccaacgtgcatgttcctttcccagtagcacactgcttctcctgaagccgaagttccccttcagagaattatgtagatctcataattccctaggcaaaactggagctctttgaatcccagcctagccatccacactataccagtttaaggtgcaatcttgtgattattgccgctgatcacgattcttgataaggcatccacaactgataagtctgacgcttctgttttacaccaattgccagttgtctcagagtcactgtgaaaggagggaaaagcttatctcttataaagttggttagcttcaaaatacagtgatgtattttgggatatttctgtggggaaagggttacaaggggtcaaatggcatcattaatgtgaacttaatatacccacttgatggattgattcctgtggga

SEQ ID NO: 52555 - DNA, 1500 bp, Homo sapiens
  misc_feature (8)..(8): n is a, c, g, or t
gtctcganttctcgagcatgttggctatggattcagttcccactgcagcgcaggtgagctctcctgaggacctctctgtcagctcccctgattgtagggaggatccagtgtggcaagaaactcctccagcccagcaagcagctcaggatgttcctgaaggccgtggtcctgaccctggccctggtggctgtcgccggagccagggctgaggtcagtgctgaccaggtggccacagtgatgtgggactacttcagccagctgagcaacaatgccaaggaggccgtggaacatctccagaaatctgaactcacccagcaactcaatgccctcttccaggacaaacttggagaagtgaacacttacgcaggtgacctgcagaagaagctggtgccctttgccaccgagctgcatgaacgcctggccaaggactcggagaaactgaaggaggagattgggaaggagctggaggagctgagggcccggctgctgccccatgccaatgaggtgagccagaagatcggggacaacctgcgagagcttcagcagcgcctggagccctacgcggaccagctgcgcacccaggtcaacacgcaggccgagcagctgcggcgccagctgaccccctacgcacagcgcatggagagagtgctgcgggagaacgccgacagcctgcaggcctcgctgaggccccacgccgacgagctcaaggccaagatcgaccagaacgtggaggagctcaagggacgccttacgccctacgctgacgaattcaaagtcaagattgaccagaccgtggaggagctgcgccgcagcctggctccctatgctcaggacacgcaggagaagctcaaccaccagcttgagggcctgaccttccagatgaagaagaacgccgaggagctcaaggccaggatctcggccagtgccgaggagctgcggcagaggctggcgcccttggccgaggacgtgcgtggcaacctgaggggcaacaccgaggggctgcagaagtcactggcagagctgggtgggcacctggaccagcaggtggaggagttccgacgccgggtggagccctacggggaaaacttcaacaaagccctggtgcagcagatggaacagctcaggcagaaactgggcccccatgcgggggacgtggaaggccacttgagcttcctggagaaggacctgagggacaaggtcaactccttcttcagcaccttcaaggagaaagagagccaggacaagactctctccctccctgagctggagcaacagcaggaacagcagcaggagcagcagcaggagcaggtgcagatgctggcccctttggagagctgagctgcccctggtgcactggccccaccctcgtggacacctgccctgccctgccacctgtctgtctgtcccaaagaagttctggtatgaacttgaggacacatgtccagtgggaggtgagaccacctctcaatattcaataaagctgctgagaatctagcctca

SEQ ID NO: 52556 - DNA, 397 bp, Homo sapiens
gctagacaaaactgagcagagttccttctccaaatacagaggatcaatgcattttagggtcaatgggcccccaagtgtcctggagtttaaccactggctgaatgacaaaggaccctccgtctctgcttagatattctctttgatgaccgggtgcttacttcctcctgaggcaggcctttctgtatctccgccccgcacccctccccccccaaacccccccgccccgccccggcccctgagcaggcggagtctcgctcttgtcacccagactggagtgcagtggcgtgatcttggctcactgcaacctccgcctcccgggttcaagcaattctcctgcctcagcctcccaagtagctgggattacaggcacgaacccagctaatttttgtacttttag

SEQ ID NO: 52557 - DNA, 629 bp, Homo sapiens
aaagaatatccttgctgtgccaagaaagaaaagaccatggatctactagttgcagatttcagcagtaatgccaagggggcaagaagtgaccagcagaacaattaggccatggcaacagaagccaactacaacccatgttccaatctatgacctccctctcctgctggtacaaggatatgggcaagagctgataatcaactgactaatgaggattgacttctacaattgatgagcatggaattggatgtgcctaaatcaacagaagagggattttgatgtcatcacactgtagccccagaagacagaacgctcaaaggtgtcaatgggcagaatttgtagatgacatacagcatccaatggattactcctattcagattgttgttttgtttgctagacatgattttaggattttgtcaaggaagccatctatgaccccaatcaatcaaaaccataaggatcaaggctggaagaacctattccttagagcaaaggatgcaatgtcaagcaagttgtgatacctcaactatctacaatttaacaccaaggaaagaacactgtttggagaaatgagaaagattatcatcagtgtctttcagaagtcatcaaaagaagaaaaggagaaaagaga

SEQ ID NO: 52558 - DNA, 670 bp, Homo sapiens
aaagaatatccttgctgtgccaagaaagaaaagaccatggatctactagttgcagatttcagcagtaatgccaagggggcaagaagtgaccagcagaacaattaggccatggcaacagaagccaactacaacccatgttccaatctatgacctccctctcctgctggtacaaggatatggactagcctagatgatgatggctcaccaatttccttgcaagggcaagagctgataatcaactgactaatgaggattgacttctacaattgatgagcatggaattggatgtgcctaaatcaacagaagagggattttgatgtcatcacactgtagccccagaagacagaacgctcaaaggtgtcaatgggcagaatttgtagatgacatacagcatccaatggattactcctattcagattgttgttttgtttgctagacatgattttaggattttgtcaaggaagccatctatgaccccaatcaatcaaaaccataaggatcaaggctggaagaacctattccttagagcaaaggatgcaatgtcaagcaagttgtgatacctcaactatctacaatttaacaccaaggaaagaacactgtttggagaaatgagaaagattatcatcagtgtctttcagaagtcatcaaaagaagaaaaggagaaaagaga

SEQ ID NO: 52559 - DNA, 470 bp, Homo sapiens
gaaacatgtcttcccagccagcaggtaagcttcagctccttccattcaacaggtaagcttcagtaccaagaggaagtagctctccctgccggcctccgtagccttaaaaagagtggatagaagaagcccagcccacactcagcaatttggcattctagaagtgtagcagatctttctacgaattcttacacatgagcaagctctacccatcttctcagagacccacagatcttccaaagccaagagtttccatcatccaccaaccctcatttcagggagctctgtttttttcatctgcaggccaaaaatgagcatatctgggtcctggcaggacctgagtctcactcatattttcggggccttttcttgtgatgatggcaggtcacttgacgaggaaaagatggtcaataatgaatagttggcaaaggaaaagatcaggaatacattcaaactgacatcttcccagaatg

SEQ ID NO: 52560 - DNA, 665 bp, Homo sapiens
tccatgctgccttttataatttctctccgcttcctgttttctagtgccggcctgattggcttcctcttcatgctgagggctctggtagctgcaaacttcaacaccgtctacatttacacagctgaggtctaccccaccacgatgcgcgctttggggatgggaaccagcggctccctgtgtcgcattggtgcaatggtggcaccatttatatcccaggttcttatgagtgcatcaatactgggggccctgtgtctcttctcatctgtctgtgttgtatgcgccatttctgcattcactctccccatcgaaaccaaaggacgggccctccagcaaattaaatgaagacctgcaaagctatgtctaccagatgagaaaaatgaattctatcttcagaactgcggtgcatttttttaaaacttggttttacttctgtatgctactcggtaattagtaaagtgatttttttttaaaaggcatatatgggaatggggtaggtaactgtatattgatctcttccttgaggaacaatatataaagtacttttataaaatataatttaagctttcaaaggggtgtgagagggagatggtgggggggaagatggcttttcttcgttgaaatcaagtctgtaaacctttatatgaataaatactaaattttaaact

SEQ ID NO: 52561 - DNA, 626 bp, Homo sapiens
ctgggcatcaatttcctgggaagacggctgagcctttctattaccatgggatgcacggctttattcttccttctcctcaacatttgcacttcaagtgccggcctgattggcttcctcttcatgctgagggctctggtagctgcaaacttcaacaccgtctacatttacacagctgaggttcttatgagtgcatcaatactgggggccctgtgtctcttctcatctgtctgtgttgtatgcgccatttctgcattcactctccccatcgaaaccaaaggacgggccctccagcaaattaaatgaagacctgcaaagctatgtctaccagatgagaaaaatgaattctatcttcagaactgcggtgcatttttttaaaacttggttttacttctgtatgctactcggtaattagtaaagtgatttttttttaaaaggcatatatgggaatggggtaggtaactgtatattgatctcttccttgaggaacaatatataaagtacttttataaaatataatttaagctttcaaaggggtgtgagagggagatggtgggggggaagatggcttttcttcgttgaaatcaagtctgtaaacctttatatgaataaatactaaattttaaact

SEQ ID NO: 52562 - DNA, 683 bp, Homo sapiens
  misc_feature (73)..(73): n is a, c, g, or t
tccccccggctcctcgacctcatcaattacattttcatgacatcctgagtatgaatatcaggctctggccgancaaagggtggtgaaggaagacacactgcgtcttgcatttaagcagctccctttattccctccctagcagtgcagctatgacttgcttgtgggtcctggtaggataactcctgggcacctgcattacacagccctaatgcacctatccacttttcctcttatttctacattctcctgtttgttttgagcaatatgtccacaactctgaccttttgagaaatcctttcaatctggaactgactgtgctgcccagaggaaatgtggtttgggctgccggtgagcattggggaaggttgtgtggagggagtcctgtgatgaaatgccctgggtgtgtgtatgtacaacttcctctcaggctattgattttccctgattttagaatgcattttttattcttcctccttttcctggatcctttcacattcaaaaatgtactgaacaaataaatgagatttctttttttctaatttgtttttttgtggagtttcccattatatgtgtagtgataatttttacagtcattctatctagactgacaaaattctttatggaaacttttctctttgcaaggacattttacttctaaaaccaagggggataaaccgaattaa

SEQ ID NO: 52563 - DNA, 440 bp, Homo sapiens
taagaatgcttcctctgaacattatccctagcaatccaataactggatttttgtcttccatccttaccacttcagtttctgctggtctagacatctgggttccaaaagaagaatgcatctcccaggagacatgacaatgattccattcaacaggaagttgagactgccacctgaacactttgggctcctcatgcctctgaatcaacgggcaaagaagagagttatagatcctaaccacccaggagaaattcggtggccactacacaaacagagtaagaggagcatttctatgatgcgggagatcctctagaatgtttgttggtattcccaggtcctgtgattaaagtatgtggaaaactatagcagcccaattcaggatgtttccagatacttcagtaagtgagaactgtgtcactacgccacattgaccagttgagagg

SEQ ID NO: 52564 - DNA, 268 bp, Homo sapiens
ggatcggtgcatagtcaagtcctgccctgtggaaccacctataggaaaagtcagccctccatatatagagcttcacttccctctagtactatatttttcatttgtgtttggttggggaaaaagagccacatgtaagttgactcaggcagttcaaacctgtgtaattcaggggtcacctttgcttacaatgcttagtatgatgaatagctactgtttgttagcatgtctgtctatcccattacatttgaccacttggagggctaaaacc

SEQ ID NO: 52565 - DNA, 1612 bp, Homo sapiens
  misc_feature (1362)..(1362): n is a, c, g, or t
  misc_feature (1468)..(1468): n is a, c, g, or t
ctggtgaatgcaaacaacctgtcaaaggacagaattacagcaaatttaaaagatctcaattggctttctttatgattctggaattgagcaagacatcattccataaaatacagtaattgttccagtgagctgagcagaagaggttagacagaagggctaaagaaagcagaagcaaagaacagagtatattagttacttttcaattagttactttttcttataaggctgggagagggagacagaacaatagaaaaataactggttgattcatatggaggtcagagtggaagcaggtgtgagagggtcccacagaagaaaacatggcagccaaagtgtttgagtccacggtaagtttggcttggccttagctgttgcaggagacctgtgaactctgccttatataatgtggatgttgggcacagagctgtcatctttgactgattccaggacaaaaatgacaggacattgtggtaggggactcactttctcatcccatgggtacagaaaccaattatctttgcctttctccaccacgtaatgtaccaatcatcactggtagcaaagatttacagaatgtcaatatcacactgcgcatcatcttccagcctgttgctagccagcttcctcgcatcttcaccagcatcggagaggactatgatgagcctgtgctgacgtacatcacgaccgagatcctcaagtcagtggtggctcgctttgatgctggagaagttatcactcagagagagctggtctccaggcaggtgagcaacgaccttacggagcaagcagccacatttgggctcatcctggacgacgtgtccttgacatatctgacctttggaaaggagttcacagaagcagtggaagccaaacaggtggctcagcaggaagcagagagggccagatttgtgaaggaaaaggctgagcagcagaaaaaggctgagcagcagaaaaaggttgagcagcagaaaaaggcagccgtgatctctgctgagggcgactccaaggcaaccgagctgattgccaactcactggccaccgcgggggacggcctgatggagctgtgcaagttggaagccgcggaggctctcggaacatgacctacctgccggcggggcagtccgctcctccggctgccccatgagggcccaccctgcctgcacctccgcaggctgactgggccacagccccaatgattcttaacactgccttacccccctaccccagaaatcactgaaatttcataattggcttaaagtgaaggaaataaaagtaaaatcacttcagaactcttaaaaaaaaaagaagaagaagaaaagaaaaaaataaccaattagttgggccaggtggctcatgcctgtnattctagcactttgggaggctaagagagaagagcttgagctcaggagttcaagaccagtctgagcaacatgatgagaccccatctctacaaaaaatttaagaattngccagacatggtggtgcatacctgtagtcccagctacttgggaggctgaggctggaggatcccttgaacccaggaattgaaggcagcagtgagctttgatcacgccactgtaccccatcctgggtgacagagtgagaccccctc

SEQ ID NO: 52566 - DNA, 254 bp, Homo sapiens
atacatttattcataagtgactgactacagaaccttaatagtccacactggattcttcatgttactcccattttctaagggagggaaaggaatgttatgaaatgtattttgaggggaatattctactcttatgttttgagaatcctctgatggctcaatattagaaaatataccaatgtaaaagtattagtgaagtagtaaaactataaagactagttgtcagaaaccagtaataaatagtatcctaaacagtg

SEQ ID NO: 52567 - DNA, 396 bp, Homo sapiens
agccaaatcactgaccctcagaggcctgatgtgaatgcttatggcttcagtccattggattctgcagtaatctgccgatctacagtattaccacagtaaataaccgatagacctgaaaacgaatgcatgccttgtgccaaaattgcaggaaacctcaccaggagaaacaattttatatgagggaatgtactctctcctttgcattttccctcaaatctatatttttagcccctcacttgtctctacagagcctcagttgcttaatctaattgctgactgaacatctccaggaaactgtgtgtacgtgtttgtattcatagtatatttatttattatctgtttacttccatgggatatagtctccataagagagtagtcatcattgtatttgttgat

SEQ ID NO: 52568 - DNA, 664 bp, Homo sapiens
ctcctcacatcacccagtaaggaaataagcactgttatgttccccattttacccatgaagcagctaaggattaaagttaaggaacttccccaaagtcatccacacctagtaaacagagcctagacttaaaccagggcagtctgataccaagacccacaccctcaaataggtatgttagtgccagaatcaaatacatcaattccagaaactagcgggaacactgacggtgatttttcagatttctcaaatttagtgtgttccaaaaggaacccttgcctcctccttccgccaacatatactccatttcaagaaagggccccaccatcctccagtctctcgtccagtatgctctcacttaggtaagcgctacgaggacaaggctctatttactttctacctagctaagaccttacacaaagcagatgctcatatttattgaaggaataaatgagggtaagagtggggtgttgatggcgcccctgccactgagaaaagaggagctggggtagagaagtggtcattcctaactggggatggtcaggagagccggatgctaggtattcctaaagcttccaaggtgaaaggagaaacaactcacgccaaggtatctagcttcttactctgcaagaatgaggccataaaacccaatgagggaagggagaac

SEQ ID NO: 52569 - DNA, 406 bp, Homo sapiens
gtcaggagattgagaccatcctggataacatggtgaaaccccgtctctactaaaaatacaaaaaattagccaggcgcggcggagggtgcctatagtcccagctactcaggaggctaaggcaggagaatggcacgagcccgggaggcggagcttgcagtgagtgctaccgcactccagcctgggtgacagagcgagactccgtctcaaaaaaaaaccaaaaaaacaaaaaacaaaacaaaaacataaagcaatacactgtagtgacagctatgtctgtgctacaatatccagtgccttttcaagcagatgcaaaagcaatgattctccaagtggaatccccagccaacagcatgagcatcactttggaacttagtagaaatgtaaattttcaggccccagcctggag

SEQ ID NO: 52570 - DNA, 338 bp, Homo sapiens
cctttattatcaacaaagagtgtcccagaaaactcttaatacttaaataaatgaaaatattcagaaatgggatgactaaatataaaattccttttctatattggcctgataagaagtgctatgccagttttcctctagataagcattaactatctataaatcatttagcaaaaagaaatcttacctcttaaagtcattattcataaaaagaaaaagaaagaccatagtatggtgcctgcttgccttttagtagatccaaacttaaaatacagagcacgtggccgatgccacgagcaacataagacgccaccagcagctaacatcacagcacttaatta

SEQ ID NO: 52571 - DNA, 184 bp, Homo sapiens
gtcttcaaaatactggactacatgcatgacccattgtgactggtctcatgctttttgatgaatttaaaattttccctgtataggtaactgaaactttgaaacaaaaaatgcagttttaggtttccggaattccagtctgagtcgtccgtgttcgctacccactaaccagtttggttctggtgat

SEQ ID NO: 52572 - DNA, 98 bp, Homo sapiens
aataataatgaaagtggttaaacttgccaaagaagagaagagagaaggaagactatttgtacaaccctgggaaggcctccacatttactaagttaaag

SEQ ID NO: 52573 - DNA, 164 bp, Homo sapiens
taacagcctaatctttttgggtctttgaaaaatgctaggaactgttctgtaactgtcattgatttaattctcacaatagtttgatgaggtaggaactactactagtttcgttttacagacatagaatcttgccgtaatcctggacattcctatagcagatggtt

SEQ ID NO: 52574 - DNA, 623 bp, Homo sapiens
aatgctttgttttgcttgaaatcaccatatttaatacagggggtaaaatgttttccccactagtgagcatgggcttaaaaaggtagagacacactgctctgggtatttttggtcaagcatgagtcgctcagctgggttctctattcctggatacctgcaggtggtgctatggtaaatgcacagcattgaggttgcttcattccggactcaggctaagcctggcttttaaacaacggtctcatcattcacagccactcagtccccttcttcacacagagctttcagattggtcaaccttgaagtaataaccaacaaggatgatgaaaccatgatcatactttcccagcttatggaaggggcctttcagagggctgctgaagtcagcacacagagtcactgtagctgctgaaatgctgttactttaatatatctcgtttggtgtaccgttttgtacggaattagtcactgttatgtgggaaggtgcaactgaaaatgcaagtagctgtccttagcgaggatgctcacagtgggccaacagacccaggagggcttgacacagaatgccagggtttgaagcagaatggcagaacaggacatcaagccagagctacaccaggctgact

SEQ ID NO: 52575 - DNA, 457 bp, Homo sapiens
ccttaatctccttattctggttcctaggaaggcatggaggaaactctcctgcaggcatccccagtggggtatctgccctatctatttcaagagtgaggccaatggaaggttttctctcatgcagggtgtagagttggaagaccacacaggggcaggtgtgagatcatcttgtaagaaaacaagcttctcccttgtcacctggagaaacttttgcaaatcaatttgccatctattaatttgccatcacacttcatataaaaaaagcatcttctgtgggttaatagggcatcagtgggcatcattagagagaagttgggtgtgtgagtagcactcatgaacccaggactatctctgtatagaacacaagaagtaatttgttagcaaaaccttttgcagcatcttgtaacagagagcaatgatagtgcaagatggaaaatccaggaaaagcagtttcaca

SEQ ID NO: 52576 - DNA, 1080 bp, Homo sapiens
tgtaataagagcggggtctccgcggggaaggcgcccacagcaggtgtggtgttcatcccgggtcgaccggccgctcgcgctgccctgaaactctagtcgccagagaggcggcatgggtttccggaagttctcccccttcctggctctcagtatcttggtcctgtaccaggcgggcagcctccaggcggcgccattcaggtctgccctggagagcagcccagacccggccacactcagtaaagaggacgcgcgcctcctgctggctgcactggtgcaggactatgtgcagatgaaggccagtgagctgaagcaggagcaggagacacagggctccagctccgctgcccagaagagagcctgcaacactgccacctgtgtgactcatcggctggcaggcttgctgagcagatcagggggcatggtgaagagcaacttcgtgcccaccaatgtgggttccaaagcctttggcaggcgccgcagggaccttcaagcctgagcagatgaatgactccaggaagaaggttatcatgaaactgaactcaccatttctattaatttctgttggtaagaacttggtgagaatgccccgtggaagatacacatgtttgcatcctaagatactgaaaaaagggcacctttgtcacttgaaaggaatgaaactgaatgcaaaataagctaattccatatttgctgtgcatcatttttatatttaattctatgtccagtaaaagtgatggcatctctcattgacttatctggtagcaaactggttctttcggagccatcctgttgatcatgcagctccaccaaaccttagggggacgtgaaatcactgcctgttgtggtctccgaggacacatggtaatggtgatgctgtgccttgttatctaagaacatgattgtataatttgtttaagaaaatgtcaatattgtgccatttgtgaacttcatcaagattaaaagcatattttgggtacatttgtttcaaaaccttggtgatgcattacaacttgttttcttatgtaataataatgatgatgatgatgataataataaatatttttgagtgcttactatgta

SEQ ID NO: 52577 - DNA, 2100 bp, Homo sapiens
  misc_feature (1687)..(1687): n is a, c, g, or t
  misc_feature (2099)..(2100): n is a, c, g, or t
tgtaataagagcggggtctccgcggggaaggcgcccacagcaggtgtggtgttcatcccgggtcgaccggccgctcgcgctgccctgaaactctagtcgccagagaggcggcatgggtttccggaagttctcccccttcctggctctcagtatcttggtcctgtaccaggcgggcagcctccaggcggcgccattcaggtctgccctggagagcagcccagacccggccacactcagtaaagaggacgcgcgcctcctgctggctgcactggtgcaggactatgtgcagatgaaggccagtgagctgaagcaggagcaggagacacagggctccagctccgctgcccagaagagagcctgcaacactgccacctgtgtgactcatcggctggcaggcttgctgagcagatcagggggcatggtgaagagcaacttcgtgcccaccaatgtgggttccaaagcctttggcaggcgccgcagggaccttcaagcctgagcagatgaatgactccaggaagaaggtgtgtcctaaatccaatgacatatccttataagagattcactcagaagacacatgtggagaaggtgacatgacagaggcaaggaggcacaagccaaggaagtctgtgtctaccagaagccagaatcacagaacagtctctggaagaagagcagccctgctgacacctagagtttggacttccagcttccagaactgtgagagaataatttctgttgttttaagccacaaagtttgtggtaatttgttatgacagccctaggaaactaatacaatacattttcatttattttgggtaaatgccttggagtgggattgctgggttatttggaaagtgtgtatttaactctgtaagaaactgccaaactattttctgaagtgactgtaccacttcgccttcttgccagccacatatgagagctctagtatttccacaaataggtatgtagcagtatctcattgctgttttaatttgtatttccccaatgactaatgacgttgagcatctattttaccatatgtttatcacctttattgaagggtctgtttaaatcttctgctaaatttttgttggcttgcttgctttattagtgttgagtttttagagctctttatatgttgtggatgcaagattgttttcagatatatagtttggaaacttccttcccctgaatctgcggattgctttttcattttcttagcagtgtctctcacagagaaaaagttgtaatttgaataagatccaattcatctttttttttcttttatgtattgtgcttttagttcatgtctaagaactctttgcctaactaaggtcccaaggtcacaataaccttattctatactttcttgtaaaagttttatagttttatattttatatgtagattagtgatctattttgagttaatttttgtataaggtgagaggtgtaggttgaaattcatacctgtgaatatagatacccaattgtttcagtgccatttgttaaaaagactgttatttcaccatttaattgcccctgcacctttgtcaaaaagcaactgatcatatttgtgtgggtatatttctgggttctcaattctgtctcattgattgatttgaccattcttttgccaatgtcatactgccttgattagtgtagtgttaaagtgaatctcaaaaccagntaatgtgggtctaccaacattgttcattcttgttcaaaaagattttagctacatctaaaatattttctacatcttttatacattttagaatcagtgtgttactatctacaaaatttctgatgagatttttaatgggattgtgttaaatcagtgggttaattttgggagaattagcatattaataatattaagtcgttcaattcatgaacacaatacatgttttcacttatttaggttttctctgtttttttttttttaacagtgttctcagttttcaacagaaatattctacacatatcttgttagatttttaactattttattttttggtgctaatgtaaatggtacttaaacatttttgtttttaattgttcattgctagtagatagaaatacaatatttaaaatattann

SEQ ID NO: 52578 - DNA, 286 bp, Homo sapiens
ctcaaactcctgacctcaggtgatccggagcctcggccccccaaaatgctgggattacaggcgtgagccatggtgccctgcccccatctttaaataaaaggaaaattttagttgaaattttgttcagtattcagagtctgatttacaaatcgattttctatccctttcctgtttttttgggggggtacatttctattttaccttcatttttcatcttttgaagtctactatttagtacagtgtaatgtggctgggtgtggtggctcacacctgtaatcctggcact

SEQ ID NO: 52579 - DNA, 489 bp, Homo sapiens
atcaaggaaattgtaaaggagactcctgccctggataggaggtagctgagcaggtaaagtgaagcccagagagaggaaggaactgtccagagggtccatggtgcattgagggcaggaccagatctctgtctgcagagtcttagaggcatcatgaacgtggaggaaagtgacatgcaggtcactcttggcctgagtcaccacttgaattaacagctttgcatattctacctagtgtttcctcgcccagaccaaggcctcagatttgtaaagtggggggtggacaattgttaggcagtagggggttggaattcccttttgcaggccgggctgtgtgagccataaacatttgtcatagaaaccctggatttacagggacaaagagccctgagcacaggaacaaatggactcaaggcccataactcctctccatcaatcttttcttctggattgtgcaagactctggcgattgcatacagcggctcctggcag

SEQ ID NO: 52580 - DNA, 285 bp, Homo sapiens
acacaacgggaaggacaggcactgacgcacataaagatgaggaggctgagcgtggttccaggcaccactgcggtatagaaagtggcacctagagccagccaaggacataaagatggacttggagacactggagcagtgtgggtgcccctcagcccaggaatgttgcagagaggagtcatatgtgagattagggttgccccaagttacctctaagttctgtccaactcaactactctgtgagtctgtgacagtccctagctctgtgtcctaggacacagtgacacc

SEQ ID NO: 52581 - DNA, 418 bp, Homo sapiens
taccaattataaagataaaattataaatatttaaactgatttagatagcaggaatacttgatatttatatttctttctacctttcttcatattgtctatcattttaaaagtatgtaaattgggcgggttgcagtggtttatgcctgtaatcccagcactttgggaggctgaggcagtagaatcgcttgacaccaagagttgaagacgagcctggacaagatactgaggcctctatctctacagaaaataataataaaatttaaaaaattagttgggcataggagcacatgcctgtagtcctagctactccagaggctttggcaggaggatttcttgagcctggggtttggaggctgcagtgaactatgattccaccgcaggagtccagcctggggaacagagcaggatgcagtctctt

SEQ ID NO: 52582 - DNA, 570 bp, Homo sapiens
gcagcatctataagctaggaaggaggccctcaccagacttggaatctgctggcttcctgatcttggcctttctagcctccagaactgaacatggatgaagctggaggccattatccttagcaaactaacacaagaacagaaaaccaaataccgcatgttcttccttataagtgggagctacatgatgagatgagaacattgcccaaaggaaccaagtgaaattaccaaattagaagtgataagaggttgactctctccagaaatttattgtaattagaaagaggtaatggtgtctaaataagatgaaagaagatattttaaagatgataataacaaaaactactagaatgaggtgaagccagaaaggaagagtcataatcaaagaagagagtgatcaagaatccaaaatagacagagagagcaggctcttagagaaatgggagaactaccgcactgactctgcacgtaggagacaggcaggagaggagcgccccagccagagctcaacatgcgcaaacaggaagtgtgtccgaggttttctggagctcacaggagccggggacccacagc

SEQ ID NO: 52583 - DNA, 406 bp, Homo sapiens
attacaactgggggcaaggacattaagtttttggtcgatactggtgctgaacattcagtagtgaccccccaggtcacccccttatccaagaaaaccattgatataatctgagcaacaggagtttccactaagcaggctttctgtctaccacagacctgctcggtggggggatatgaaatagttcactagttcttgtatatgcctgactgtcccttgcccctgctgggaagagacttgcttagcaagctaagagccaccatctcctttacaaaacagggctctttacagctaaagttaccgggaacaggagttatcatggcccttacggtcccctgggaagaagaatggagactttttctaactgagccaggacaagagataaaaccagctctagctaagcgatggc

SEQ ID NO: 52584 - DNA, 353 bp, Homo sapiens
tgtacttccaactctgtaaaagaaagcacactattatgcttcagacataggcccatagtgagtgtaatagtatcccgtcaccatataaaatgtaagtgaggaacattctagaactttttcttcccatttaagctttttatatggaattttgtatctccattgaatggtctaatatgtaaattacacctaccacacctttactctttatatccagttttcatgagctaaaacaataaattccagtggagagttttatagagatttagaagccacccttgggaacaaaatgtagcttgccttagttgttatacaagcaggtgtatcatcagttttagagggagtcttttagaact

SEQ ID NO: 52585 - DNA, 280 bp, Homo sapiens
aatttatgggaaaaattctaaaatactttttataatgaaggacaacatcataactccctaataaaatgtgcatgtatatattcaaatttgctgtcattgatcctgcacctacaaaatccagtcctgggggctggcattcttactgcttgctgagggccagatgatatagattccagaatatctccatgtagattttggtgagaattactgtgctgaaaagaatgacagtattgcagttatacatgggggttttggtactttatattgtgactctgaattt

SEQ ID NO: 52586 - DNA, 527 bp, Homo sapiens
aacttaatgtaaaagtgcatacttggttacacttttaccaaacacataatcaatttattttctatttcagaaggcattattgtgtaagtgggtttaagggtgggtctggtatgattttagtaagcatgtttggacttagtactgtctgtgaagtgtaagtagttattgtactgaaataatctagggccctacagtgctgatgacgtcgtctcatggagtgtgtgggtgtgtgttccatacctgttatgtcggaaggcactctcatggcaggcccatttggctctttgactttgggaactaaccaggcacatctttatcattactgatttctgcagtttcaggaagttgagggtgcttgctgcttggaggccttcctcgacatatcaaaggctggctgggcgtggtggctcacacctgtaatcccagctttttgggaggccaaggtgggtggattgcctgagctcaggagttctagaccagcccggccaacatggtgaaacctcatctctacaaaaaaaaacaaacaa

SEQ ID NO: 52587 - DNA, 546 bp, Homo sapiens
ctggtaatacagtgttggccgccaaggtccctgggaaccaggctgctgttcagcgcattgtccagcccagccgaccagtaaagcagctggtcctccagccagttaagggttcagctcctgctggaaaccctggggccacagggcccccactgaagcctgcagttacactgacctctacacctacccagggtgaatcgaaacgcatcaccctggtcctccagcagccacagtctggaggtccccaaggacatcggcatgttgtgctagggagtctaccaggcaagatagtgttacagggcaaccagctggcagccctgactcaagccaagaatgcccaagggcagcctgccaaggtagtaactatccagctgcaggtgcagcagccacagcaaaaaatccagattgtaccacaaccaccatcatcgcagccacagccccagcagccaccctccacccagccagtgactctgtcctctgtacagcaggctcagataatgggacaggacaaagcccaggacaaagactttcagtaccagtcaaggtggt

SEQ ID NO: 52588 - DNA, 691 bp, Homo sapiens
acctcccaggagcaagggaccaccaggttgcctaaggagggatgaattggcccaggttggaaacggagcaggcagcacttcccttgctgatcagcagtagtgttgtgcctgtgaatagccactgcactctagcctgggcaatacagcgagaccctgtctaaaaataacaaaaaagattgcatcaagacagataggatgatgaacaaagtgagttgtactgtgtcttctgacctgtagtttttatgattctagcatgaagaaaactggtgtaaatatttcagagtataccattctttaatgttgtactcttgcaatttcctttcttcactttagggtgaatcgaaacgcatcaccctggtcctccagcagccacagtctggaggtccccaaggacatcggcatgttgtgctagggagtctaccaggcaagatagtgttacagggcaaccagctggcagccctgactcaagccaagaatgcccaagggcagcctgccaaggtagtaactatccagctgcaggtgcagcagccacagcaaaaaatccagattgtaccacaaccaccatcatcgcagccacagccccagcagccaccctccacccagccagtgactctgtcctctgtacagcaggctcagataatgggacaggacaaagcccaggacaaagactttcagtaccagtcaaggtggt

SEQ ID NO: 52589 - DNA, 668 bp, Homo sapiens
agggtgagttgaaacgctgcctggaaaggaagtaccaggacttgcacaggagttccaccatcttcctctgaagacgtagccatcttgctccatgaaggtcaggacaatctgacatgcacttgtttcttgcctctatacttgaagagtagtccccttccctccctagaccttggagaagtaccctccattactttcccaagatggcagaccccatcatggatctgttcgatgacccaaatttatttggcctggactctctgactgatgacagctttaaccaggtcacacaagaccccattgaggaagcccttggactgccaagctctctggactccttggatcagatgaaccaggatggtggaggtggtgatgtggggaattcatcagcaagtgaactggtccctccaccagaggaaacagctcccacagaactttccaaagaatccacagctccagctccagaatccataaccttgcatgattataccactcagcctgccagccaggagcagccagcccaacctgtcttacagacatcgacgccaacatcaggacttttgcaagtctccaagagccaggagatcctgagccaagggaatcctttcatgggtgtctctgccacagctgtctcctccagtagtgctggagggcagccacctcagtcagcc

SEQ ID NO: 52590 - DNA, 455 bp, Homo sapiens
agggtgagttgaaacgctgcctggaaaggaagtaccaggacttgcacaggagttccaccatcttcctctgaagacgtagccatcttgctccatgaagggtgaatcgaaacgcatcaccctggtcctccagcagccacagtctggaggtccccaaggacatcggcatgttgtgctagggagtctaccaggcaagatagtgttacagggcaaccagctggcagccctgactcaagccaagaatgcccaagggcagcctgccaaggtagtaactatccagctgcaggtgcagcagccacagcaaaaaatccagattgtaccacaaccaccatcatcgcagccacagccccagcagccaccctccacccagccagtgactctgtcctctgtacagcaggctcagataatgggacaggacaaagcccaggacaaagactttcagtaccagtcaaggtggt

SEQ ID NO: 52591 - DNA, 407 bp, Homo sapiens
taaactcccactttagataacctaaactacttcataaaagggaacaaaagcttaatacttgctatcagaggtatggcaaaagaatccttttcttcacaattagtttccaatttctgtcaaaaccagcaccctaccctctactgataatcagacttctggcagtagctcacacctgtaactccaacattcagaggccgaggcaggtggatcacttgagttcaggagtctgagatcagcctgggcaacatggtgaaaccctgtctctacaaaaaaatacaaaacttagccagacttggtggcatgtacctgtggtaccagctactcaggaggcggaggcaggaggatcgcttgagccctggaggcggaagttgcagtgagctgtaaattgcaccattgcacttcagctt

SEQ ID NO: 52592 - DNA, 306 bp, Homo sapiens
ctacttaggtggagacacgcatagaacctcacacactcaagacctccccatggcataccaaagaaccagtaacttacaagaaccgaaagagcaccgatgcacttgagattttctaagtcttcatttgattgtttttgtagagacttattctactggaagtatatgaatactaactcaatgacaagtcattaaactcgaactttataaaaatatgattctaagggccacaatgtccaacttcagtataaagacctctctaaaatattgaaagcaggtatctccaaatgtaaatatttcactagccac

SEQ ID NO: 52593 - DNA, 364 bp, Homo sapiens
gtcagcgaggtactaggagctcaggacactgaagtcacaaggcaccggcagcaacactgacacaatgctcaatgcctcccatataaggctactgagattaggtttgatcttagagtctgggacagatctcagcctgctaatctgagtaacgttggtgtggctgccaggctgctagacagagaaccaagtaggtaatttcaggtccataggcttgtgcaagtcagaggatagggcgtgtctacaaaggggaattagcaatgcagggcagcagcttactgacttccaaatggatgacaacattctagaagagatgtgacttagctgaactctgaagccagattcctcctttgtgggtatgtactca

SEQ ID NO: 52594 - DNA, 230 bp, Homo sapiens
agtacctgagggacatccttctccattcaggacctgaggatgtccttctctgtactcccttgggactgcaccctttcctgtgccatccttcagaatgctaggctgtcgctggttgtggattgaactctagcatcttatctctattctaggtgaatcccttcacatttatagtgatttaccatttaatcactgtgccattttccccaaaatatgtggggtttggggtttgg

SEQ ID NO: 52595 - DNA, 265 bp, Homo sapiens
gacaaaaaataggagtaatgccaagaaggtggttcataacttttttcaactatgttctgtagaatatttaaatatcccatattcttttctttttatttcaatattttttgtagagagtggggccttgctgtattgcccgggctggtcttgaacccctggcctcaagcagtcctcccaccttggcctcccaaagcattgggattataggtgtgagccaccactcccagccaattatcctatattcatatgatcaaagatgagtgtg

SEQ ID NO: 52596 - DNA, 285 bp, Homo sapiens
gcgcccaccaccatgcccagctaatttttatatttttagttagagacagcatttcactgtgttggccaggctggtctcaaactcctgacttcgtgatccacctgcctcggcctcccaaagtggtgggattacaagcatcagccaccgcgcctggcccactgctgactactagagttactcttcccttctctgaatttgcgatgtatttgtgattggccttctgttcctttgcacctgatcatatatttgctggtaatgttctctacacagtaatatgtctcctca

SEQ ID NO: 52597 - DNA, 369 bp, Homo sapiens
gtgagtggcctgtgtcatagtgggatgtctgactggtcggagcaaaggtacccaatcctccagcctgaccatgagctgggtggtgaactagccagccacaaacaagccagatgggcagacagaccaaaatagccacttgtccacctccttcctggaaatgcagaagggctgctccggaggtccaagaagacctaatttggtcagcaacccagcacttactctgaacaggaggtggagttgtgagcctggtataagttccctacctccgattctttacttttaccacacacgtttgcacatttcaaggagatgatcagccacactaccaactactgatgggtaacaaatactctttacgtcaaagctctt

SEQ ID NO: 52598 - DNA, 567 bp, Homo sapiens
  misc_feature (484)..(484): n is a, c, g, or t
  misc_feature (524)..(524): n is a, c, g, or t
cgcatcttgctcccatcaggtgcataaaaatcatttgacaaaataattgtccattcatgatttaaaaaaaacaaaactcagccaagcatagtggcgtgtgcctataatcccagctactcaggacgctgagggaggagaatcgcttgagcacaggaggcagaggttgcagtgagccaagagtgcgcctttgcactccagcctgggcaacagagcaagactccgtctcaaaaagggagttggagagagtaaatagaaaaaagatttatggctattggaatgtgctttcactggctttaaggattttataggatagtaagagggtaaagcactgttacaggcgtacctctgaacctgtttactgtaagtcagtttttataaattaaataattaaaaatgtattagggaacaccatagaacatggctgaaagaaattgtaaaagacctaaatgattacgggtgtgagccaccatgcctggccattctnaagatcaaatggctactaagttggtggctcaaggactgancctagacagttggaaccatataggttttgctcttattaatcgc

SEQ ID NO: 52599 - DNA, 1081 bp, Homo sapiens
cgcatcttgctcccatcaggtgcataaaaatcatttgacaaaataattgtccattcatgatttaaaaaaaacaaaactcagccaagcatagtggcgtgtgcctataatcccagctactcaggacgctgagggaggagaatcgcttgagcacaggaggcagaggttgcagtgagccaagagtgcgcctttgcactccagcctgggcaacagagcaagactccgtctcaaaaagggagttggagagagtaaatagaaaaaagatttatggctattggaatgtgctttcactggctttaaggattttataggatagtaagagggtaaagcactgttacaggcgtacctctgaacctgtttactgtaagtcagtttttataaattaaataattaaaaatgtattagggaacaccatagaacatggctgaaagaaattgtaaaagacctaaatgaggccgggtgcagtggcttatgcctgtaatcccagcactttgggaggccgaggtgggcagatcacctgaggtcaggagttcaagaccagccttaccaacaggaagaaaccccacctttactaaaaatacaaaattagcagggtatagtggcacatgcctgtaatcccagctactctggaggctgagacaggagaatcacctgaacccggggatggaggttgcggtgacccgagattgcaccattgcactccagcctgggcaacaagagtgagactgtatcaaaaaaaaaaaaaaaaaccctaaatgaaagacctctcatattcatggattggaagacttaatattgttgaatattaatattgttaatatacttcccaaaataagctatagatctaatataatccctatcaaaattccaactggctttttctcagaaatttattaagctgatgttaaaattcatatggaaatgcaagggatatagaatagccaaaacaatatttaaaagtagcaaaagtttggagaactcacattcctgatttcaaaacttactacagagctacagtaaacaagactgtgcttctgtcatgaggatacgtataaagactgatagagtagaattgagagtccag

SEQ ID NO: 52600 - DNA, 378 bp, Homo sapiens
gtggacatatccaaatgtgcttctgtttcctgcagtttcactgaccatgagctttctcctctcaacattgacatttcaagtcagatagccagtgtcaagaggtgccattgtgacagtgtgcatacatatttaattggatggctacatttcacatcagcttaaatggaaaagaaaacagagtgactttaccctaagccagtatttcccagtggctatggtgtcagtttccccaagaggctactaaagggcaagtatattttgttttcacatactctaataagcaacacgtttctttactaccaaaaaagttcagtactgctgaatggaccctcagatctgcagtcaggccaagaggcaaagctaaccagggacactgcc

SEQ ID NO: 52601 - DNA, 679 bp, Homo sapiens
ccagcttggattataaagtccatgctggctatttgtagaacagcagttctcaaaagctgctagacctgctgaatcaaactgttgtgttttgacaagctctccagaattctgatgcaggctaaagcttgagaactattgatgtagaggaatagaaaagaatatttcctcactgaaagtcacatactcttttgtaagggtccaaggcagaggcaaggaaagcctcaggaggggtctgtgtcagaaagcactggtcacaggcaggagtgactggcacacttttggtgtgttccagggagaccccttgggacctcccagtcagcatggcatggcatgggcatgggccaggctacactgtgtctgcatcataccacatctcacccagcttgtgtgggatgtagctaaccgttgttggagacagctgcctgggcatgcagcccggctgcagctacagaagccctgccccagggctagctcagctaggcagaacatcgggccacctgacaactgctgtttgcagtagctccacaggccctcagcccagcccagctccctgtgcacgtgtgaggctgagacaggcaagagggcacctcactgtagggaccttggagctggcagagcatggtcttgggattcacatgcaaaatgcaacttctcacagctcctctcagcaccctgcagc

SEQ ID NO: 52602 - DNA, 417 bp, Homo sapiens
tttgcaaaactgataataaaaatccaaattatagatcatatttatcttacatttattgtgctaagggctttgtattatttaatttatttagcctgcagaagtatgctctgaggagataaacatgaccatttatagaggtcacaggctagcgagtcctggatctactgattaatctcgctctgtctttgcagccctgagaggataagtgctttccaaagcagaggagcagtaaaggctgagcccgggaggcagaaacaacattggtccatgcaccataaaatgtaagcgccatgaaagaagacactgttatattcacttctccattcccagcacctaaaaaagccactaaaacatgataaaggtcaggaaatatgtgaggaaggaaggaactcacagagggagatgggtttggaaaaa

SEQ ID NO: 52603 - DNA, 349 bp, Homo sapiens
aaaagctatttgatttttactcagtttctcagtgggtaggagagtgtcatatattaaaacttggggccaggtgtggtggctcatgcctgtaatgccagcactttgggaggccaagccagaaggatcacttgaggtcaggagttcgagaccagcctgggcaacacggtgaaaccctgtctccactaaaaagacaaaaagcttagccgggtatggtgacacacacctatagtcccacccacttgagaggctgaggtgggaggatcgcttgaacccaggaggctgaggttgcagtgagctgagatcgtgccactgcactccaccctgggcgacagagtgagacttcatcttg

SEQ ID NO: 52604 - DNA, 449 bp, Homo sapiens
ctagcaggtttttaaaagacacggattatgtcttttagatggccaggaaaatacattattcaagtatttggagcattttaggaatacaaactaccaaataagacataaaattcagcattcccaccagacacatagggaactttttttctttttttaacagactgttgcctcctccaactcccttaggatgccgtgaacaatcactttctctgctacagccttagaacatgagcagacacagcacaaaaacagggcagtccaccagtggtttggcagcttaagtatccatcatcaacttttctggactttcttgaaaagtagttgccattcctgactagtggttttactcatttctattggaaactaaaatctgggtgggctggaatcctcaagagcatgttaagaagccagataaatcaatgtccccatggtataactaatcctaaaag

SEQ ID NO: 52605 - DNA, 697 bp, Homo sapiens
ctctctgccaaattctattttgcctgttagaaatattgctgcataagctttcttttaattgcgacttgtctggtatatctggaaacctgaatttaaatcctggctctgattttaactcgttatgcattaggtggaaggctgagacaagccactcaaccacaatttccttactggtgagattaaaatgctgggctggacagatcccaacacctccagctctgacatcctgttagcagcctgttcagcagtcaccacaggggctggttagcacctcctccctggcccttctcagccctgcagcaccaacctcctaccagagatgtctgcatggggtggtgtagtcatatattcttttctttgtaaggttaaactcctctgaaatggaactgggggaaactgtcttctacagcaggctcagggatctcctccttgacattatctagtcctcagtttcaacatattttattttctgactaatcttgtcttgatatggggggaaatcaaatttaccatgaagctccccagtttctgttagctcagtttgaacctctcctttaggttttaccaggctctttaaggcacagactgagtcttctgcagacactctagctatcagagacgctcctgtcttccgagcagccggctcacccatttctctgtcccaaatggcatctaggtgcagggaggcacatcccag

SEQ ID NO: 52606 - DNA, 207 bp, Homo sapiens
cgaggtagcaactaagtggctggaagagcatgttccagctgattatcagaacccccaagagtatgtgaggatccagctaccaggaactgacccttaataggatccaaacgagacagagggtatgcaaaggctaatgcggtatagggaagcactcttagaagggttgaggagaggagcccaaaaggccacaaacgtaaacaaggtctc

SEQ ID NO: 52607 - DNA, 6972 bp, Homo sapiens
cgcccccgcctctgagctcccttcccatggcggccctagtgttggaggacgggtcggtcctgcggggccagccctttggggccgccgtgtcgactgccggggaagtggtgtttcaaaccggcatggtcggctaccccgaggccctcactgatccctcctacaaggcacagatcttagtgctcacctatcctctgatcggcaactatggcatccccccagatgaaatggatgagttcggtctctgcaagtggtttgaatcctcgggcatccacgtagcagcactggtagtgggagagtgctgtcctactcccagccactggagtgccacccgcaccctgcatgagtggctgcagcagcatggcatccctggcttgcaaggagtagacactcgggagctgaccaagaagttgcgggaacaggggtctctgctggggaagctggtccagaatggaacagaaccttcatccctgccattcttggaccccaatgcccgccccctggtaccagaggtctccattaagactccacgggtattcaatacagggggtgcccctcggatccttgctttggactgtggcctcaagtataatcagatccgatgcctctgccagcgtggggctgaggtcactgtggtaccctgggaccatgcactagacagccaagagtatgagggtctcttcttaagtaatgggcctggtgaccctgcctcctatcccagtgtcgtatccacactgagccgtgttttatctgagcctaatccccgacctgtctttgggatctgcctgggacaccagctattggccttagccattggggccaagacttacaagatgagatatgggaaccgaggccataaccagccctgcttgttggtgggctctgggcgctgctttctgacatcccagaaccatgggtttgctgtggagacagactcactgccagcagactgggctcctctcttcaccaacgccaatgatggttccaatgaaggcattgtgcacaacagcttgcctttcttcagtgtccagtttcacccagagcaccaagctggcccttcagatatggaactgcttttcgatatctttctggaaactgtgaaagaggccacagctgggaaccctgggggccagacagttagagagcggctgactgagcgcctctgtccccctgggattcccactcccggctctggacttccaccaccacgaaaggttctgatcctgggctcagggggcctctccattggccaagctggagaatttgactactcgggctctcaggcaattaaggccctgaaggaggaaaacatccagacgttgctgatcaaccccaatattgccacagtgcagacctcccaggggctggccgacaaggtctattttcttcccataacacctcattatgtaacccaggtgatacgtaatgaacgccccgatggtgtgttactgacttttgggggccagactgctctgaactgtggtgtggagctgaccaaggccggggtgctggctcggtatggggtccgggtcctgggcacaacagtggagaccattgagctgaccgaggatcgacgggcctttgctgccagaatggcagagatcggagagcatgtggccccgagcgaggcaggaaattctcttgaacaggcccaggcagccgctgaacggctggggtaccctgtgctagtgcgtgcagcctttgccgtgggtggcctgggctctggctttgcctctaacagggaggagctctctgctctcgtggccccagcttttgcccataccagccaagtgctagtagacaagtctctgaagggatggaaggagattgagtacgaggtggtgagagacgcctatggcaactgtgtcacggtgtgtaacatggagaacttggacccactgggcatccacactggtgagtccatagtggtggcccctagccagacactgaatgacagggagtatcagctcctgaggcagacagctatcaaggtgacccagcacctgggaattgttggggagtgcaatgtgcagtatgccttgaaccctgagtctgagcagtattacatcattgaagtgaatgccaggctctctcgcagctctgccctggccagtaaggccacaggttatccactggcttatgtggcagccaagctagcattgggcatccctttgcctgagctcaggaactctgtgacagggggtacagcagcctttgaacccagcgtggattattgtgtggtgaagattcctcgatgggaccttagcaagttcctgcgagtcagcacaaagattgggagctgcatgaagagcgttggtgaagtcatgggcattgggcgttcatttgaggaggccttccagaaggccctgcgcatggtggatgagaactgtgtgggctttgatcacacagtgaaaccagtcagcgatatggagttggagactccaacagataagcggatttttgtggtggcagctgctttgtgggctggttattcagtggaccgcctgtatgagctcacacgcatcgaccgctggttcctgcaccgaatgaagcgtatcatcgcacatgcccagctgctagaacaacaccgtggacagcctttgccgccagacctgctgcaacaggccaagtgtcttggcttctcagacaaacagattgcccttgcagttctgagcacagagctggctgttcgcaagctgcgtcaggaactggggatctgtccagcagtgaaacagattgacacagttgcagctgagtggccagcccagacaaattacctatacctaacgtattggggcaccacccatgacctcacctttcgaacacctcatgtcctagtccttggctctggcgtctaccgtattggctctagcgttgaatttgactggtgtgctgtaggctgcatccagcagctccgaaagatgggatataagaccatcatggtgaactataacccagagacagtcagcaccgactatgacatgtgtgatcgactctactttgatgagatctcttttgaggtggtgatggacatctatgagctcgagaaccctgaaggtgtgatcctatccatgggtggacagctgcccaacaacatggccatggcgttgcatcggcagcagtgccgggtgctgggcacctcccctgaagccattgactcggctgagaaccgtttcaagttttcccggctccttgacaccattggtatcagccagcctcagtggagggagctcagtgacctcgagtctgctcgccaattctgccagaccgtggggtacccctgtgtggtgcgcccctcctatgtgctgagcggtgctgctatgaatgtggcctacacggatggagacctggagcgcttcctgagcagcgcagcagccgtctccaaagagcatcccgtggtcatctccaagttcatccaggaggctaaggagattgacgtggatgccgtggcctctgatggtgtggtggcagccatcgccatctctgagcatgtggagaatgcaggtgtgcattcaggtgatgcgacgctggtgacccccccacaagatatcactgccaaaaccctggagcggatcaaagccattgtgcatgctgtgggccaggagctacaggtcacaggacccttcaatctgcagctcattgccaaggatgaccagctgaaagttattgaatgcaacgtacgtgtctctcgctccttccccttcgtttccaagacactgggtgtggacctagtagccttggccacgcgggtcatcatgggggaagaagtggaacctgtggggctaatgactggttctggagtcgtgggagtaaaggtgcctcagttctccttctcccgcttggcgggtgctgacgtggtgttgggtgtggaaatgaccagtactggggaggtggccggctttggggagagccgctgtgaggcatacctcaaggccatgctaagcactggctttaagatccccaagaagaatatcctgctgaccattggcagctataagaacaaaagcgagctgctcccaactgtgcggctactggagagcctgggctacagcctctatgccagtctcggcacagctgacttctacactgagcatggcgtcaaggtaacagctgtggactggcactttgaggaggctgtggatggtgagtgcccaccacagcggagcatcctggagcagctagctgagaaaaactttgagctggtgattaacctgtcaatgcgtggagctgggggccggcgtctctcttcctttgtcaccaagggctaccgcacccgacgcttggccgctgacttctccgtgcccctaatcatcgatatcaagtgcaccaaactctttgtggaggccctaggccagatcgggccagcccctcctttgaaggtgcatgttgactgtatgacctcccaaaagcttgtgcgactgccgggattgattgatgtccatgtgcacctgcgggaaccaggtgggacacataaggaggactttgcttcaggcacagccgctgccctggctgggggtatcaccatggtgtgtgccatgcctaatacccggccccccatcattgacgcccctgctctggccctggcccagaagctggcagaggctggcgcccggtgcgactttgcgctattccttggggcctcgtctgaaaatgcaggaaccttgggcaccgtggccgggtctgcagccgggctgaagctttacctcaatgagaccttctctgagctgcggctggacagcgtggtccagtggatggagcatttcgagacatggccctcccacctccccattgtggctcacgcagagcagcaaaccgtggctgctgtcctcatggtggctcagctcactcagcgctcagtgcacatatgtcacgtggcacggaaggaggagatcctgctaattaaagctgcaaaggcacggggcttgccagtgacctgcgaggtggctccccaccacctgttcctaagccatgatgacctggagcgcctggggcctgggaagggggaggtccggcctgagcttggctcccgccaggatgtggaagccctgtgggagaacatggctgtcatcgactgctttgcctcagaccatgctccccataccttggaggagaagtgtgggtccaggcccccacctgggttcccagggttagagaccatgctgccactactcctgacggctgtaagcgagggccggctcagcctggacgacctgctgcagcgattgcaccacaatcctcggcgcatctttcacctgcctccgcaggaggacacctatgtggaggtggatctggagcatgagtggacaattcccagccacatgcccttctccaaggcccactggacaccttttgaagggcagaaagtgaagggcaccgtccgccgtgtggtcctgcgaggggaggttgcctatatcgatgggcaggttctggtacccccgggctatggacaggatgtacggaagtggccacagggggctgttcctcagctcccaccctcagcccctgccactagtgagatgaccacgacacctgaaagaccccgccgtggcatcccagggcttcctgatggccgcttccatctgccgccccgaatccatcgagcctccgacccaggtttgccagctgaggagccaaaggagaagtcctctcggaaggtagccgagccagagctgatgggaacccctgatggcacctgctaccctccaccaccagtaccgagacaggcatctccccagaacctggggacccctggcttgctgcacccccagacctcacccctgctgcactcattagtgggccaacatatcctgtccgtccagcagttcaccaaggatcagatgtctcacctgttcaatgtggcacacacactgcgtatgatggtgcagaaggagcggagcctcgacatcctgaaggggaaggtcatggcctccatgttctatgaagtgagcacacggaccagcagctcctttgcagcagccatggcccggctgggaggtgctgtgctcagcttctcggaagccacatcgtccgtccagaagggcgaatccctggctgactccgtgcagaccatgagctgctatgccgacgtcgtcgtgctccggcacccccagcctggagcagtggagctggccgccaagcactgccggaggccagtgatcaatgctggggatggggtcggagagcaccccacccaggccctgctggacatcttcaccatccgtgaggagctgggaactgtcaatggcatgacgatcacgatggtgggtgacctgaagcacggacgcacagtacattccctggcctgcctgctcacccagtatcgtgtcagcctgcgctacgtggcacctcccagcctgcgcatgccacccactgtgcgggccttcgtggcctcccgcggcaccaagcaggaggaattcgagagcattgaggaggcgctgcctgacactgatgtgctctacatgactcgaatccagaaggaacgatttggctctacccaggagtacgaagcttgctttggtcagttcatcctcactccccacatcatgacccgggccaagaagaagatggtggtgatgcacccgatgccccgtgtcaacgagataagcgtggaagtggactcggatccccgcgcagcctacttccgccaggctgagaacggcatgtacatccgcatggctctgttagccaccgtgctgggccgtttctagggcctggcttcctcagcctcttctctttaggcccagctgctgggcaaggaattccagtgcctcctacgggggcagcacacttagatattcctggacatccagatagctcacatgtgctgaccacacttcaggctctggactggagctctctggcatgggggtggggcctcagatgctggggcccagtctgccccatcttcattcctgcaccttaaacctgtacagtcatttttctactgacttaataaacagccgagctgtcccttga

SEQ ID NO: 52608 - DNA, 170 bp, Homo sapiens
gcggccgcctactactactactgctcgaattcaagcttctaacgatgtacggggacatgggggtggggcctcagatgctggggcccagtctgccccatcttcattcctgcaccttaaacctgtacagtcatttttctactgacttaataaacagccgagctgtcccttga

SEQ ID NO: 52609 - DNA, 6484 bp, Homo sapiens
ctgccgggtcgacgtctagaggagtccccagtatgtgtaacaacgacctatacagggggtgcccctcggatccttgctttggactgtggcctcaagtataatcagatccgatgcctctgccagcgtggggctgaggtcactgtggtaccctgggaccatgcactagacagccaagagtatgagggtctcttcttaagtaatgggcctggtgaccctgcctcctatcccagtgtcgtatccacactgagccgtgttttatctgagcctaatccccgacctgtctttgggatctgcctgggacaccagctattggccttagccattggggccaagacttacaagatgagatatgggaaccgaggccataaccagccctgcttgttggtgggctctgggcgctgctttctgacatcccagaaccatgggtttgctgtggagacagactcactgccagcagactgggctcctctcttcaccaacgccaatgatggttccaatgaaggcattgtgcacaacagcttgcctttcttcagtgtccagtttcacccagagcaccaagctggcccttcagatatggaactgcttttcgatatctttctggaaactgtgaaagaggccacagctgggaaccctgggggccagacagttagagagcggctgactgagcgcctctgtccccctgggattcccactcccggctctggacttccaccaccacgaaaggttctgatcctgggctcagggggcctctccattggccaagctggagaatttgactactcgggctctcaggcaattaaggccctgaaggaggaaaacatccagacgttgctgatcaaccccaatattgccacagtgcagacctcccaggggctggccgacaaggtctattttcttcccataacacctcattatgtaacccaggtgatacgtaatgaacgccccgatggtgtgttactgacttttgggggccagactgctctgaactgtggtgtggagctgaccaaggccggggtgctggctcggtatggggtccgggtcctgggcacaacagtggagaccattgagctgaccgaggatcgacgggcctttgctgccagaatggcagagatcggagagcatgtggccccgagcgaggcaggaaattctcttgaacaggcccaggcagccgctgaacggctggggtaccctgtgctagtgcgtgcagcctttgccgtgggtggcctgggctctggctttgcctctaacagggaggagctctctgctctcgtggccccagcttttgcccataccagccaagtgctagtagacaagtctctgaagggatggaaggagattgagtacgaggtggtgagagacgcctatggcaactgtgtcacggtgtgtaacatggagaacttggacccactgggcatccacactggtgagtccatagtggtggcccctagccagacactgaatgacagggagtatcagctcctgaggcagacagctatcaaggtgacccagcacctgggaattgttggggagtgcaatgtgcagtatgccttgaaccctgagtctgagcagtattacatcattgaagtgaatgccaggctctctcgcagctctgccctggccagtaaggccacaggttatccactggcttatgtggcagccaagctagcattgggcatccctttgcctgagctcaggaactctgtgacagggggtacagcagcctttgaacccagcgtggattattgtgtggtgaagattcctcgatgggaccttagcaagttcctgcgagtcagcacaaagattgggagctgcatgaagagcgttggtgaagtcatgggcattgggcgttcatttgaggaggccttccagaaggccctgcgcatggtggatgagaactgtgtgggctttgatcacacagtgaaaccagtcagcgatatggagttggagactccaacagataagcggatttttgtggtggcagctgctttgtgggctggttattcagtggaccgcctgtatgagctcacacgcatcgaccgctggttcctgcaccgaatgaagcgtatcatcgcacatgcccagctgctagaacaacaccgtggacagcctttgccgccagacctgctgcaacaggccaagtgtcttggcttctcagacaaacagattgcccttgcagttctgagcacagagctggctgttcgcaagctgcgtcaggaactggggatctgtccagcagtgaaacagattgacacagttgcagctgagtggccagcccagacaaattacctatacctaacgtattggggcaccacccatgacctcacctttcgaacacctcatgtcctagtccttggctctggcgtctaccgtattggctctagcgttgaatttgactggtgtgctgtaggctgcatccagcagctccgaaagatgggatataagaccatcatggtgaactataacccagagacagtcagcaccgactatgacatgtgtgatcgactctactttgatgagatctcttttgaggtggtgatggacatctatgagctcgagaaccctgaaggtgtgatcctatccatgggtggacagctgcccaacaacatggccatggcgttgcatcggcagcagtgccgggtgctgggcacctcccctgaagccattgactcggctgagaaccgtttcaagttttcccggctccttgacaccattggtatcagccagcctcagtggagggagctcagtgacctcgagtctgctcgccaattctgccagaccgtggggtacccctgtgtggtgcgcccctcctatgtgctgagcggtgctgctatgaatgtggcctacacggatggagacctggagcgcttcctgagcagcgcagcagccgtctccaaagagcatcccgtggtcatctccaagttcatccaggaggctaaggagattgacgtggatgccgtggcctctgatggtgtggtggcagccatcgccatctctgagcatgtggagaatgcaggtgtgcattcaggtgatgcgacgctggtgacccccccacaagatatcactgccaaaaccctggagcggatcaaagccattgtgcatgctgtgggccaggagctacaggtcacaggacccttcaatctgcagctcattgccaaggatgaccagctgaaagttattgaatgcaacgtacgtgtctctcgctccttccccttcgtttccaagacactgggtgtggacctagtagccttggccacgcgggtcatcatgggggaagaagtggaacctgtggggctaatgactggttctggagtcgtgggagtaaaggtgcctcagttctccttctcccgcttggcgggtgctgacgtggtgttgggtgtggaaatgaccagtactggggaggtggccggctttggggagagccgctgtgaggcatacctcaaggccatgctaagcactggctttaagatccccaagaagaatatcctgctgaccattggcagctataagaacaaaagcgagctgctcccaactgtgcggctactggagagcctgggctacagcctctatgccagtctcggcacagctgacttctacactgagcatggcgtcaaggtaacagctgtggactggcactttgaggaggctgtggatggtgagtgcccaccacagcggagcatcctggagcagctagctgagaaaaactttgagctggtgattaacctgtcaatgcgtggagctgggggccggcgtctctcttcctttgtcaccaagggctaccgcacccgacgcttggccgctgacttctccgtgcccctaatcatcgatatcaagtgcaccaaactctttgtggaggccctaggccagatcgggccagcccctcctttgaaggtgcatgttgactgtatgacctcccaaaagcttgtgcgactgccgggattgattgatgtccatgtgcacctgcgggaaccaggtgggacacataaggaggactttgcttcaggcacagccgctgccctggctgggggtatcaccatggtgtgtgccatgcctaatacccggccccccatcattgacgcccctgctctggccctggcccagaagctggcagaggctggcgcccggtgcgactttgcgctattccttggggcctcgtctgaaaatgcaggaaccttgggcaccgtggccgggtctgcagccgggctgaagctttacctcaatgagaccttctctgagctgcggctggacagcgtggtccagtggatggagcatttcgagacatggccctcccacctccccattgtggctcacgcagagcagcaaaccgtggctgctgtcctcatggtggctcagctcactcagcgctcagtgcacatatgtcacgtggcacggaaggaggagatcctgctaattaaagctgcaaaggcacggggcttgccagtgacctgcgaggtggctccccaccacctgttcctaagccatgatgacctggagcgcctggggcctgggaagggggaggtccggcctgagcttggctcccgccaggatgtggaagccctgtgggagaacatggctgtcatcgactgctttgcctcagaccatgctccccataccttggaggagaagtgtgggtccaggcccccacctgggttcccagggttagagaccatgctgccactactcctgacggctgtaagcgagggccggctcagcctggacgacctgctgcagcgattgcaccacaatcctcggcgcatctttcacctgcctccgcaggaggacacctatgtggaggtggatctggagcatgagtggacaattcccagccacatgcccttctccaaggcccactggacaccttttgaagggcagaaagtgaagggcaccgtccgccgtgtggtcctgcgaggggaggttgcctatatcgatgggcaggttctggtacccccgggctatggacaggatgtacggaagtggccacagggggctgttcctcagctcccaccctcagcccctgccactagtgagatgaccacgacacctgaaagaccccgccgtggcatcccagggcttcctgatggccgcttccatctgccgccccgaatccatcgagcctccgacccaggtttgccagctgaggagccaaaggagaagtcctctcggaaggtagccgagccagagctgatgggaacccctgatggcacctgctaccctccaccaccagtaccgagacaggcatctccccagaacctggggacccctggcttgctgcacccccagacctcacccctgctgcactcattagtgggccaacatatcctgtccgtccagcagttcaccaaggatcagatgtctcacctgttcaatgtggcacacacactgcgtatgatggtgcagaaggagcggagcctcgacatcctgaaggggaaggtcatggcctccatgttctatgaagtgagcacacggaccagcagctcctttgcagcagccatggcccggctgggaggtgctgtgctcagcttctcggaagccacatcgtccgtccagaagggcgaatccctggctgactccgtgcagaccatgagctgctatgccgacgtcgtcgtgctccggcacccccagcctggagcagtggagctggccgccaagcactgccggaggccagtgatcaatgctggggatggggtcggagagcaccccacccaggccctgctggacatcttcaccatccgtgaggagctgggaactgtcaatggcatgacgatcacgatggtgggtgacctgaagcacggacgcacagtacattccctggcctgcctgctcacccagtatcgtgtcagcctgcgctacgtggcacctcccagcctgcgcatgccacccactgtgcgggccttcgtggcctcccgcggcaccaagcaggaggaattcgagagcattgaggaggcgctgcctgacactgatgtgctctacatgactcgaatccagaaggaacgatttggctctacccaggagtacgaagcttgctttggtcagttcatcctcactccccacatcatgacccgggccaagaagaagatggtggtgatgcacccgatgccccgtgtcaacgagataagcgtggaagtggactcggatccccgcgcagcctacttccgccaggctgagaacggcatgtacatccgcatggctctgttagccaccgtgctgggccgtttctagggcctggcttcctcagcctcttctctttaggcccagctgctgggcaaggaattccagtgcctcctacgggggcagcacacttagatattcctggacatccagatagctcacatgtgctgaccacacttcaggctctggactggagctctctggcatgggggtggggcctcagatgctggggcccagtctgccccatcttcattcctgcaccttaaacctgtacagtcatttttctactgacttaataaacagccgagctgtcccttga

SEQ ID NO: 52610 - DNA, 3387 bp, Homo sapiens
ttagacggaccggcctccggttaaggtgagcgaccttcaatctgcatctcattgcggaggatgaccagctgaaagttattgaatgcaacgtacgtgtctctcgctccttccccttcgtttccaagacactgggtgtggacctagtagccttggccacgcgggtcatcatgggggaagaagtggaacctgtggggctaatgactggttctggagtcgtgggagtaaaggtgcctcagttctccttctcccgcttggcgggtgctgacgtggtgttgggtgtggaaatgaccagtactggggaggtggccggctttggggagagccgctgtgaggcatacctcaaggccatgctaagcactggctttaagatccccaagaagaatatcctgctgaccattggcagctataagaacaaaagcgagctgctcccaactgtgcggctactggagagcctgggctacagcctctatgccagtctcggcacagctgacttctacactgagcatggcgtcaaggtaacagctgtggactggcactttgaggaggctgtggatggtgagtgcccaccacagcggagcatcctggagcagctagctgagaaaaactttgagctggtgattaacctgtcaatgcgtggagctgggggccggcgtctctcttcctttgtcaccaagggctaccgcacccgacgcttggccgctgacttctccgtgcccctaatcatcgatatcaagtgcaccaaactctttgtggaggccctaggccagatcgggccagcccctcctttgaaggtgcatgttgactgtatgacctcccaaaagcttgtgcgactgccgggattgattgatgtccatgtgcacctgcgggaaccaggtgggacacataaggaggactttgcttcaggcacagccgctgccctggctgggggtatcaccatggtgtgtgccatgcctaatacccggccccccatcattgacgcccctgctctggccctggcccagaagctggcagaggctggcgcccggtgcgactttgcgctattccttggggcctcgtctgaaaatgcaggaaccttgggcaccgtggccgggtctgcagccgggctgaagctttacctcaatgagaccttctctgagctgcggctggacagcgtggtccagtggatggagcatttcgagacatggccctcccacctccccattgtggctcacgcagagcagcaaaccgtggctgctgtcctcatggtggctcagctcactcagcgctcagtgcacatatgtcacgtggcacggaaggaggagatcctgctaattaaagctgcaaaggcacggggcttgccagtgacctgcgaggtggctccccaccacctgttcctaagccatgatgacctggagcgcctggggcctgggaagggggaggtccggcctgagcttggctcccgccaggatgtggaagccctgtgggagaacatggctgtcatcgactgctttgcctcagaccatgctccccataccttggaggagaagtgtgggtccaggcccccacctgggttcccagggttagagaccatgctgccactactcctgacggctgtaagcgagggccggctcagcctggacgacctgctgcagcgattgcaccacaatcctcggcgcatctttcacctgcctccgcaggaggacacctatgtggaggtggatctggagcatgagtggacaattcccagccacatgcccttctccaaggcccactggacaccttttgaagggcagaaagtgaagggcaccgtccgccgtgtggtcctgcgaggggaggttgcctatatcgatgggcaggttctggtacccccgggctatggacaggatgtacggaagtggccacagggggctgttcctcagctcccaccctcagcccctgccactagtgagatgaccacgacacctgaaagaccccgccgtggcatcccagggcttcctgatggccgcttccatctgccgccccgaatccatcgagcctccgacccaggtttgccagctgaggagccaaaggagaagtcctctcggaaggtagccgagccagagctgatgggaacccctgatggcacctgctaccctccaccaccagtaccgagacaggcatctccccagaacctggggacccctggcttgctgcacccccagacctcacccctgctgcactcattagtgggccaacatatcctgtccgtccagcagttcaccaaggatcagatgtctcacctgttcaatgtggcacacacactgcgtatgatggtgcagaaggagcggagcctcgacatcctgaaggggaaggtcatggcctccatgttctatgaagtgagcacacggaccagcagctcctttgcagcagccatggcccggctgggaggtgctgtgctcagcttctcggaagccacatcgtccgtccagaagggcgaatccctggctgactccgtgcagaccatgagctgctatgccgacgtcgtcgtgctccggcacccccagcctggagcagtggagctggccgccaagcactgccggaggccagtgatcaatgctggggatggggtcggagagcaccccacccaggccctgctggacatcttcaccatccgtgaggagctgggaactgtcaatggcatgacgatcacgatggtgggtgacctgaagcacggacgcacagtacattccctggcctgcctgctcacccagtatcgtgtcagcctgcgctacgtggcacctcccagcctgcgcatgccacccactgtgcgggccttcgtggcctcccgcggcaccaagcaggaggaattcgagagcattgaggaggcgctgcctgacactgatgtgctctacatgactcgaatccagaaggaacgatttggctctacccaggagtacgaagcttgctttggtcagttcatcctcactccccacatcatgacccgggccaagaagaagatggtggtgatgcacccgatgccccgtgtcaacgagataagcgtggaagtggactcggatccccgcgcagcctacttccgccaggctgagaacggcatgtacatccgcatggctctgttagccaccgtgctgggccgtttctagggcctggcttcctcagcctcttctctttaggcccagctgctgggcaaggaattccagtgcctcctacgggggcagcacacttagatattcctggacatccagatagctcacatgtgctgaccacacttcaggctctggactggagctctctggcatgggggtggggcctcagatgctggggcccagtctgccccatcttcattcctgcaccttaaacctgtacagtcatttttctactgacttaataaacagccgagctgtcccttga

SEQ ID NO: 52611 - DNA, 3043 bp, Homo sapiens
taaggctaggtagaggctggtgttaatcggccgaggagaatatctgctgtcattggcagctataagaacaaaagcgagctgctcccaactgtgcggctactggagagcctgggctacagcctctatgccagtctcggcacagctgacttctacactgagcatggcgtcaaggtaacagctgtggactggcactttgaggaggctgtggatggtgagtgcccaccacagcggagcatcctggagcagctagctgagaaaaactttgagctggtgattaacctgtcaatgcgtggagctgggggccggcgtctctcttcctttgtcaccaagggctaccgcacccgacgcttggccgctgacttctccgtgcccctaatcatcgatatcaagtgcaccaaactctttgtggaggccctaggccagatcgggccagcccctcctttgaaggtgcatgttgactgtatgacctcccaaaagcttgtgcgactgccgggattgattgatgtccatgtgcacctgcgggaaccaggtgggacacataaggaggactttgcttcaggcacagccgctgccctggctgggggtatcaccatggtgtgtgccatgcctaatacccggccccccatcattgacgcccctgctctggccctggcccagaagctggcagaggctggcgcccggtgcgactttgcgctattccttggggcctcgtctgaaaatgcaggaaccttgggcaccgtggccgggtctgcagccgggctgaagctttacctcaatgagaccttctctgagctgcggctggacagcgtggtccagtggatggagcatttcgagacatggccctcccacctccccattgtggctcacgcagagcagcaaaccgtggctgctgtcctcatggtggctcagctcactcagcgctcagtgcacatatgtcacgtggcacggaaggaggagatcctgctaattaaagctgcaaaggcacggggcttgccagtgacctgcgaggtggctccccaccacctgttcctaagccatgatgacctggagcgcctggggcctgggaagggggaggtccggcctgagcttggctcccgccaggatgtggaagccctgtgggagaacatggctgtcatcgactgctttgcctcagaccatgctccccataccttggaggagaagtgtgggtccaggcccccacctgggttcccagggttagagaccatgctgccactactcctgacggctgtaagcgagggccggctcagcctggacgacctgctgcagcgattgcaccacaatcctcggcgcatctttcacctgcctccgcaggaggacacctatgtggaggtggatctggagcatgagtggacaattcccagccacatgcccttctccaaggcccactggacaccttttgaagggcagaaagtgaagggcaccgtccgccgtgtggtcctgcgaggggaggttgcctatatcgatgggcaggttctggtacccccgggctatggacaggatgtacggaagtggccacagggggctgttcctcagctcccaccctcagcccctgccactagtgagatgaccacgacacctgaaagaccccgccgtggcatcccagggcttcctgatggccgcttccatctgccgccccgaatccatcgagcctccgacccaggtttgccagctgaggagccaaaggagaagtcctctcggaaggtagccgagccagagctgatgggaacccctgatggcacctgctaccctccaccaccagtaccgagacaggcatctccccagaacctggggacccctggcttgctgcacccccagacctcacccctgctgcactcattagtgggccaacatatcctgtccgtccagcagttcaccaaggatcagatgtctcacctgttcaatgtggcacacacactgcgtatgatggtgcagaaggagcggagcctcgacatcctgaaggggaaggtcatggcctccatgttctatgaagtgagcacacggaccagcagctcctttgcagcagccatggcccggctgggaggtgctgtgctcagcttctcggaagccacatcgtccgtccagaagggcgaatccctggctgactccgtgcagaccatgagctgctatgccgacgtcgtcgtgctccggcacccccagcctggagcagtggagctggccgccaagcactgccggaggccagtgatcaatgctggggatggggtcggagagcaccccacccaggccctgctggacatcttcaccatccgtgaggagctgggaactgtcaatggcatgacgatcacgatggtgggtgacctgaagcacggacgcacagtacattccctggcctgcctgctcacccagtatcgtgtcagcctgcgctacgtggcacctcccagcctgcgcatgccacccactgtgcgggccttcgtggcctcccgcggcaccaagcaggaggaattcgagagcattgaggaggcgctgcctgacactgatgtgctctacatgactcgaatccagaaggaacgatttggctctacccaggagtacgaagcttgctttggtcagttcatcctcactccccacatcatgacccgggccaagaagaagatggtggtgatgcacccgatgccccgtgtcaacgagataagcgtggaagtggactcggatccccgcgcagcctacttccgccaggctgagaacggcatgtacatccgcatggctctgttagccaccgtgctgggccgtttctagggcctggcttcctcagcctcttctctttaggcccagctgctgggcaaggaattccagtgcctcctacgggggcagcacacttagatattcctggacatccagatagctcacatgtgctgaccacacttcaggctctggactggagctctctggcatgggggtggggcctcagatgctggggcccagtctgccccatcttcattcctgcaccttaaacctgtacagtcatttttctactgacttaataaacagccgagctgtcccttga

SEQ ID NO: 52612 - DNA, 6640 bp, Homo sapiens
ctgccgggtcgacgtctagaggagtccccagtatgtgtaacaacgacctatacagggggtgcccctcggatccttgctttggactgtggcctcaagtataatcagatccgatgcctctgccagcgtggggctgaggtcactgtggtaccctgggaccatgcactagacagccaagagtatgagggtctcttcttaagtaatgggcctggtgaccctgcctcctatcccagtgtcgtatccacactgagccgtgttttatctgagcctaatccccgacctgtctttgggatctgcctgggacaccagctattggccttagccattggggccaagacttacaagatgagatatgggaaccgaggccataaccagccctgcttgttggtgggctctgggcgctgctttctgacatcccagaaccatgggtttgctgtggagacagactcactgccagcagactgggctcctctcttcaccaacgccaatgatggttccaatgaaggcattgtgcacaacagcttgcctttcttcagtgtccagtttcacccagagcaccaagctggcccttcagatatggaactgcttttcgatatctttctggaaactgtgaaagaggccacagctgggaaccctgggggccagacagttagagagcggctgactgagcgcctctgtccccctgggattcccactcccggctctggacttccaccaccacgaaaggttctgatcctgggctcagggggcctctccattggccaagctggagaatttgactactcgggctctcaggcaattaaggccctgaaggaggaaaacatccagacgttgctgatcaaccccaatattgccacagtgcagacctcccaggggctggccgacaaggtctattttcttcccataacacctcattatgtaacccaggtgatacgtaatgaacgccccgatggtgtgttactgacttttgggggccagactgctctgaactgtggtgtggagctgaccaaggccggggtgctggctcggtatggggtccgggtcctgggcacaacagtggagaccattgagctgaccgaggatcgacgggcctttgctgccagaatggcagagatcggagagcatgtggccccgagcgaggcaggaaattctcttgaacaggcccaggcagccgctgaacggctggggtaccctgtgctagtgcgtgcagcctttgccgtgggtggcctgggctctggctttgcctctaacagggaggagctctctgctctcgtggccccagcttttgcccataccagccaagtgctagtagacaagtctctgaagggatggaaggagattgagtacgaggtggtgagagacgcctatggcaactgtgtcacggtgtgtaacatggagaacttggacccactgggcatccacactggtgagtccatagtggtggcccctagccagacactgaatgacagggagtatcagctcctgaggcagacagctatcaaggtgacccagcacctgggaattgttggggagtgcaatgtgcagtatgccttgaaccctgagtctgagcagtattacatcattgaagtgaatgccaggctctctcgcagctctgccctggccagtaaggccacaggttatccactggcttatgtggcagccaagctagcattgggcatccctttgcctgagctcaggaactctgtgacagggggtacagcagcctttgaacccagcgtggattattgtgtggtgaagattcctcgatgggaccttagcaagttcctgcgagtcagcacaaagattgggagctgcatgaagagcgttggtgaagtcatgggcattgggcgttcatttgaggaggccttccagaaggccctgcgcatggtggatgagaactgtgtgggctttgatcacacagtgaaaccagtcagcgatatggagttggagactccaacagataagcggatttttgtggtggcagctgctttgtgggctggttattcagtggaccgcctgtatgagctcacacgcatcgaccgctggttcctgcaccgaatgaagcgtatcatcgcacatgcccagctgctagaacaacaccgtggacagcctttgccgccagacctgctgcaacaggccaagtgtcttggcttctcagacaaacagattgcccttgcagttctgagcacagagctggctgttcgcaagctgcgtcaggaactggggatctgtccagcagtgaaacagattgacacagttgcagctgagtggccagcccagacaaattacctatacctaacgtattggggcaccacccatgacctcacctttcgaacacctcatgtcctagtccttggctctggcgtctaccgtattggctctagcgttgaatttgactggtgtgctgtaggctgcatccagcagctccgaaagatgggatataagaccatcatggtgaactataacccagagacagtcagcaccgactatgacatgtgtgatcgactctactttgatgagatctcttttgaggtggtgatggacatctatgagctcgagaaccctgaaggtgtgatcctatccatgggtggacagctgcccaacaacatggccatggcgttgcatcggcagcagtgccgggtgctgggcacctcccctgaagccattgactcggctgagaaccgtttcaagttttcccggctccttgacaccattggtatcagccagcctcagtggagggagctcagtgacctcgagtctgctcgccaattctgccagaccgtggggtacccctgtgtggtgcgcccctcctatgtgctgagcggtgctgctatgaatgtggcctacacggatggagacctggagcgcttcctgagcagcgcagcagccgtctccaaagagcatcccgtggtcatctccaagttcatccaggaggctaaggagattgacgtggatgccgtggcctctgatggtgtggtggcagccatcgccatctctgagcatgtggagaatgcaggtgtgcattcaggtgatgcgacgctggtgacccccccacaagatatcactgccaaaaccctggagcggatcaaagccattgtgcatgctgtgggccaggagctacaggtcacaggacccttcaatctgcagctcattgccaaggatgaccagctgaaagttattgaatgcaacgtacgtgtctctcgctccttccccttcgtttccaagacactgggtgtggacctagtagccttggccacgcgggtcatcatgggggaagaagtggaacctgtggggctaatgactggttctggagtcgtgggagtaaaggtgcctcagttctccttctcccgcttggcgggtgctgacgtggtgttgggtgtggaaatgaccagtactggggaggtggccggctttggggagagccgctgtgaggcatacctcaaggccatgctaagcactggctttaagatccccaagaagaatatcctgctgaccattggcagctataagaacaaaagcgagctgctcccaactgtgcggctactggagagcctgggctacagcctctatgccagtctcggcacagctgacttctacactgagcatggcgtcaaggtaacagctgtggactggcactttgaggaggctgtggatggtgagtgcccaccacagcggagcatcctggagcagctagctgagaaaaactttgagctggtgattaacctgtcaatgcgtggagctgggggccggcgtctctcttcctttgtcaccaagggctaccgcacccgacgcttggccgctgacttctccgtgcccctaatcatcgatatcaagtgcaccaaactctttgtggaggccctaggccagatcgggccagcccctcctttgaaggtgcatgttgactgtatgacctcccaaaagcttgtgcgactgccgggattgattgatgtccatgtgcacctgcgggaaccaggtgggacacataaggaggactttgcttcaggcacagccgctgccctggctgggggtatcaccatggtgtgtgccatgcctaatacccggccccccatcattgacgcccctgctctggccctggcccagaagctggcagaggctggcgcccggtgcgactttgcgctattccttggggcctcgtctgaaaatgcaggaaccttgggcaccgtggccgggtctgcagccgggctgaagctttacctcaatgagaccttctctgagctgcggctggacagcgtggtccagtggatggagcatttcgagacatggccctcccacctccccattgtggctcacgcagagcagcaaaccgtggctgctgtcctcatggtggctcagctcactcagcgctcagtgcacatatgtcacgtggcacggaaggaggagatcctgctaattaaagctgcaaaggcacggggcttgccagtgacctgcgaggtggctccccaccacctgttcctaagccatgatgacctggagcgcctggggcctgggaagggggaggtccggcctgagcttggctcccgccaggatgtggaagccctgtgggagaacatggctgtcatcgactgctttgcctcagaccatgctccccataccttggaggagaagtgtgggtccaggcccccacctgggttcccagggttagagaccatgctgccactactcctgacggctgtaagcgagggccggctcagcctggacgacctgctgcagcgattgcaccacaatcctcggcgcatctttcacctgcctccgcaggaggacacctatgtggaggtggatctggagcatgagtggacaattcccagccacatgcccttctccaaggcccactggacaccttttgaagggcagaaagtgaagggcaccgtccgccgtgtggtcctgcgaggggaggttgcctatatcgatgggcaggttctggtacccccgggctatggacaggatgtacggaagtggccacagggggctgttcctcagctcccaccctcagcccctgccactagtgagatgaccacgacacctgaaagaccccgccgtggcatcccagggcttcctgatggccgcttccatctgccgccccgaatccatcgagcctccgacccaggtttgccagctgaggagccaaaggagaagtcctctcggaaggtagccgagccagagctgatgggaacccctgatggcacctgctaccctccaccaccagtaccgagacaggcatctccccagaacctggggacccctggcttgctgcacccccagacctcacccctgctgcactcattagtgggccaacatatcctgtccgtccagcagttcaccaaggatcagatgtctcacctgttcaatgtggcacacacactgcgtatgatggtgcagaaggagcggagcctcgacatcctgaaggggaaggtcatggcctccatgttctatgaagtgagcacacggaccagcagctcctttgcagcagccatggcccggctgggaggtgctgtgctcagcttctcggaagccacatcgtccgtccagaagggcgaatccctggctgactccgtgcagaccatgagctgctatgccgacgtcgtcgtgctccggcacccccagcctggagcagtggagctggccgccaagcactgccggaggccagtgatcaatgctggggatggggtcggagagcaccccacccaggccctgctggacatcttcaccatccgtgaggagctgggaactgtcaatggcatgacgatcacgatggtgggtgacctgaagcacggacgcacagtacattccctggcctgcctgctcacccagtatcgtgtcagcctgcgctacgtggcacctcccagcctgcgcatgccacccactgtgcgggccttcgtggcctcccgcggcaccaagcaggaggaattcgagagcattgaggaggcgctgcctgacactgatgtgctctacatgactcgaatccagaaggaacgatttggctctacccaggagtacgaagcttgctttggtcagttcatcctcactccccacatcatgacccgggccaagaagaagatggtggtgatgcacccgatgccccgtgtcaacgagataagcgtggaagtggactcggatccccgcgcagcctacttccgccaggctgagaacggcatgtacatccgcatggctctgttagccaccgtgctgggccgtttctagggcctggcttcctcagcctcttctctttaggcccagctgctgggcaaggaattccagtgcctcctacgggggcagcacacttagatattcctggacatccagatagctcacatgtgctgaccacacttcaggctctggactggagctctctggcatgggggtggggcctcagatgctggggcccagtctgccccatcttcattcctgcaccttaaacctgtacagtcatttttctactgacttaataaacagccgagctgtcccttgatgctgagtgtagtagaacagagctttcttttagaaaattgagcagattcccaaattataagagcagcctcaccaggcagggctctggctagggctgcgtgcccacactcggcattttcacactcgtgactctttgggactcggcaggagcgtgtta

SEQ ID NO: 52613 - DNA, 2828 bp, Homo sapiens
tagtcttgggagacccactcacagcaggcgctggccgtgccgtcctcacacagcgatgcctggtcctcgcgggaggacagagtttcactcgtaggtagaagctcagcccagcaggtgctcagtggagacaccgtctcccaaatcaggttttgttgtgtgtgggttttgttcaagtgtgacttctgtctttaaggagtgttaaggccagctcgggccagcccctcctttgaaggtgcatgttgactgtatgacctcccaaaagcttgtgcgactgccgggattgattgatgtccatgtgcacctgcgggaaccaggtgggacacataaggaggactttgcttcaggcacagccgctgccctggctgggggtatcaccatggtgtgtgccatgcctaatacccggccccccatcattgacgcccctgctctggccctggcccagaagctggcagaggctggcgcccggtgcgactttgcgctattccttggggcctcgtctgaaaatgcaggaaccttgggcaccgtggccgggtctgcagccgggctgaagctttacctcaatgagaccttctctgagctgcggctggacagcgtggtccagtggatggagcatttcgagacatggccctcccacctccccattgtggctcacgcagagcagcaaaccgtggctgctgtcctcatggtggctcagctcactcagcgctcagtgcacatatgtcacgtggcacggaaggaggagatcctgctaattaaagctgcaaaggcacggggcttgccagtgacctgcgaggtggctccccaccacctgttcctaagccatgatgacctggagcgcctggggcctgggaagggggaggtccggcctgagcttggctcccgccaggatgtggaagccctgtgggagaacatggctgtcatcgactgctttgcctcagaccatgctccccataccttggaggagaagtgtgggtccaggcccccacctgggttcccagggttagagaccatgctgccactactcctgacggctgtaagcgagggccggctcagcctggacgacctgctgcagcgattgcaccacaatcctcggcgcatctttcacctgcctccgcaggaggacacctatgtggaggtggatctggagcatgagtggacaattcccagccacatgcccttctccaaggcccactggacaccttttgaagggcagaaagtgaagggcaccgtccgccgtgtggtcctgcgaggggaggttgcctatatcgatgggcaggttctggtacccccgggctatggacaggatgtacggaagtggccacagggggctgttcctcagctcccaccctcagcccctgccactagtgagatgaccacgacacctgaaagaccccgccgtggcatcccagggcttcctgatggccgcttccatctgccgccccgaatccatcgagcctccgacccaggtttgccagctgaggagccaaaggagaagtcctctcggaaggtagccgagccagagctgatgggaacccctgatggcacctgctaccctccaccaccagtaccgagacaggcatctccccagaacctggggacccctggcttgctgcacccccagacctcacccctgctgcactcattagtgggccaacatatcctgtccgtccagcagttcaccaaggatcagatgtctcacctgttcaatgtggcacacacactgcgtatgatggtgcagaaggagcggagcctcgacatcctgaaggggaaggtcatggcctccatgttctatgaagtgagcacacggaccagcagctcctttgcagcagccatggcccggctgggaggtgctgtgctcagcttctcggaagccacatcgtccgtccagaagggcgaatccctggctgactccgtgcagaccatgagctgctatgccgacgtcgtcgtgctccggcacccccagcctggagcagtggagctggccgccaagcactgccggaggccagtgatcaatgctggggatggggtcggagagcaccccacccaggccctgctggacatcttcaccatccgtgaggagctgggaactgtcaatggcatgacgatcacgatggtgggtgacctgaagcacggacgcacagtacattccctggcctgcctgctcacccagtatcgtgtcagcctgcgctacgtggcacctcccagcctgcgcatgccacccactgtgcgggccttcgtggcctcccgcggcaccaagcaggaggaattcgagagcattgaggaggcgctgcctgacactgatgtgctctacatgactcgaatccagaaggaacgatttggctctacccaggagtacgaagcttgctttggtcagttcatcctcactccccacatcatgacccgggccaagaagaagatggtggtgatgcacccgatgccccgtgtcaacgagataagcgtggaagtggactcggatccccgcgcagcctacttccgccaggctgagaacggcatgtacatccgcatggctctgttagccaccgtgctgggccgtttctagggcctggcttcctcagcctcttctctttaggcccagctgctgggcaaggaattccagtgcctcctacgggggcagcacacttagatattcctggacatccagatagctcacatgtgctgaccacacttcaggctctggactggagctctctggcatgggggtggggcctcagatgctggggcccagtctgccccatcttcattcctgcaccttaaacctgtacagtcatttttctactgacttaataaacagccgagctgtcccttga

SEQ ID NO: 52614 - DNA, 6421 bp, Homo sapiens
ctgccgggtcgacgtctagaggagtccccagtatgtgtaacaacgacctatacagggggtgcccctcggatccttgctttggactgtggcctcaagtataatcagatccgatgcctctgccagcgtggggctgaggtcactgtggtaccctgggaccatgcactagacagccaagagtatgagggtctcttcttaagtaatgggcctggtgaccctgcctcctatcccagtgtcgtatccacactgagccgtgttttatctgagcctaatccccgacctgtctttgggatctgcctgggacaccagctattggccttagccattggggccaagacttacaagatgagatatgggaaccgaggccataaccagccctgcttgttggtgggctctgggcgctgctttctgacatcccagaaccatgggtttgctgtggagacagactcactgccagcagactgggctcctctcttcaccaacgccaatgatggttccaatgaaggcattgtgcacaacagcttgcctttcttcagtgtccagtttcacccagagcaccaagctggcccttcagatatggaactgcttttcgatatctttctggaaactgtgaaagaggccacagctgggaaccctgggggccagacagttagagagcggctgactgagcgcctctgtccccctgggattcccactcccggctctggacttccaccaccacgaaaggttctgatcctgggctcagggggcctctccattggccaagctggagaatttgactactcgggctctcaggcaattaaggccctgaaggaggaaaacatccagacgttgctgatcaaccccaatattgccacagtgcagacctcccaggggctggccgacaaggtctattttcttcccataacacctcattatgtaacccaggtgatacgtaatgaacgccccgatggtgtgttactgacttttgggggccagactgctctgaactgtggtgtggagctgaccaaggccggggtgctggctcggtatggggtccgggtcctgggcacaacagtggagaccattgagctgaccgaggatcgacgggcctttgctgccagaatggcagagatcggagagcatgtggccccgagcgaggcaggaaattctcttgaacaggcccaggcagccgctgaacggctggggtaccctgtgctagtgcgtgcagcctttgccgtgggtggcctgggctctggctttgcctctaacagggaggagctctctgctctcgtggccccagcttttgcccataccagccaagtgctagtagacaagtctctgaagggatggaaggagattgagtacgaggtggtgagagacgcctatggcaactgtgtcacggtgtgtaacatggagaacttggacccactgggcatccacactggtgagtccatagtggtggcccctagccagacactgaatgacagggagtatcagctcctgaggcagacagctatcaaggtgacccagcacctgggaattgttggggagtgcaatgtgcagtatgccttgaaccctgagtctgagcagtattacatcattgaagtgaatgccaggctctctcgcagctctgccctggccagtaaggccacaggttatccactggcttatgtggcagccaagctagcattgggcatccctttgcctgagctcaggaactctgtgacagggggtacagcagcctttgaacccagcgtggattattgtgtggtgaagattcctcgatgggaccttagcaagttcctgcgagtcagcacaaagattgggagctgcatgaagagcgttggtgaagtcatgggcattgggcgttcatttgaggaggccttccagaaggccctgcgcatggtggatgagaactgtgtgggctttgatcacacagtgaaaccagtcagcgatatggagttggagactccaacagataagcggatttttgtggtggcagctgctttgtgggctggttattcagtggaccgcctgtatgagctcacacgcatcgaccgctggttcctgcaccgaatgaagcgtatcatcgcacatgcccagctgctagaacaacaccgtggacagcctttgccgccagacctgctgcaacaggccaagtgtcttggcttctcagacaaacagattgcccttgcagttctgagcacagagctggctgttcgcaagctgcgtcaggaactggggatctgtccagcagtgaaacagattgacacagttgcagctgagtggccagcccagacaaattacctatacctaacgtattggggcaccacccatgacctcacctttcgaacacctcatgtcctagtccttggctctggcgtctaccgtattggctctagcgttgaatttgactggtgtgctgtaggctgcatccagcagctccgaaagatgggatataagaccatcatggtgaactataacccagagacagtcagcaccgactatgacatgtgtgatcgactctactttgatgagatctcttttgaggtggtgatggacatctatgagctcgagaaccctgaaggtgtgatcctatccatgggtggacagctgcccaacaacatggccatggcgttgcatcggcagcagtgccgggtgctgggcacctcccctgaagccattgactcggctgagaaccgtttcaagttttcccggctccttgacaccattggtatcagccagcctcagtggagggagctcagtgacctcgagtctgctcgccaattctgccagaccgtggggtacccctgtgtggtgcgcccctcctatgtgctgagcggtgctgctatgaatgtggcctacacggatggagacctggagcgcttcctgagcagcgcagcagccgtctccaaagagcatcccgtggtcatctccaagttcatccaggaggctaaggagattgacgtggatgccgtggcctctgatggtgtggtggcagccatcgccatctctgagcatgtggagaatgcaggtgtgcattcaggtgatgcgacgctggtgacccccccacaagatatcactgccaaaaccctggagcggatcaaagccattgtgcatgctgtgggccaggagctacaggtcacaggacccttcaatctgcagctcattgccaaggatgaccagctgaaagttattgaatgcaacgtacgtgtctctcgctccttccccttcgtttccaagacactgggtgtggacctagtagccttggccacgcgggtcatcatgggggaagaagtggaacctgtggggctaatgactggttctggagtcgtgggagtaaaggtgcctcagttctccttctcccgcttggcgggtgctgacgtggtgttgggtgtggaaatgaccagtactggggaggtggccggctttggggagagccgctgtgaggcatacctcaaggccatgctaagcactggctttaagatccccaagaagaatatcctgctgaccattggcagctataagaacaaaagcgagctgctcccaactgtgcggctactggagagcctgggctacagcctctatgccagtctcggcacagctgacttctacactgagcatggcgtcaaggtaacagctgtggactggcactttgaggaggctgtggatggtgagtgcccaccacagcggagcatcctggagcagctagctgagaaaaactttgagctggtgattaacctgtcaatgcgtggagctgggggccggcgtctctcttcctttgtcaccaagggctaccgcacccgacgcttggccgctgacttctccgtgcccctaatcatcgatatcaagtgcaccaaactctttgtggaggccctaggccagatcgggccagcccctcctttgaaggtgcatgttgactgtatgacctcccaaaagcttgtgcgactgccgggattgattgatgtccatgtgcacctgcgggaaccaggtgggacacataaggaggactttgcttcaggcacagccgctgccctggctgggggtatcaccatggtgtgtgccatgcctaatacccggccccccatcattgacgcccctgctctggccctggcccagaagctggcagaggctggcgcccggtgcgactttgcgctattccttggggcctcgtctgaaaatgcaggaaccttgggcaccgtggccgggtctgcagccgggctgaagctttacctcaatgagaccttctctgagctgcggctggacagcgtggtccagtggatggagcatttcgagacatggccctcccacctccccattgtggctcacgcagagcagcaaaccgtggctgctgtcctcatggtggctcagctcactcagcgctcagtgcacatatgtcacgtggcacggaaggaggagatcctgctaattaaagctgcaaaggcacggggcttgccagtgacctgcgaggtggctccccaccacctgttcctaagccatgatgacctggagcgcctggggcctgggaagggggaggtccggcctgagcttggctcccgccaggatgtggaagccctgtgggagaacatggctgtcatcgactgctttgcctcagaccatgctccccataccttggaggagaagtgtgggtccaggcccccacctgggttcccagggttagagaccatgctgccactactcctgacggctgtaagcgagggccggctcagcctggacgacctgctgcagcgattgcaccacaatcctcggcgcatctttcacctgcctccgcaggaggacacctatgtggaggtggatctggagcatgagtggacaattcccagccacatgcccttctccaaggcccactggacaccttttgaagggcagaaagtgaagggcaccgtccgccgtgtggtcctgcgaggggaggttgcctatatcgatgggcaggttctggtacccccgggctatggacaggatgtacggaagtggccacagggggctgttcctcagctcccaccctcagcccctgccactagtgagatgaccacgacacctgaaagaccccgccgtggcatcccagggcttcctgatggccgcttccatctgccgccccgaatccatcgagcctccgacccaggtttgccagctgaggagccaaaggagaagtcctctcggaaggtagccgagccagagctgatgggaacccctgatggcacctgctaccctccaccaccagtaccgagacaggcatctccccagaacctggggacccctggcttgctgcacccccagacctcacccctgctgcactcattagtgggccaacatatcctgtccgtccagcagttcaccaaggatcagatgtctcacctgttcaatgtggcacacacactgcgtatgatggtgcagaaggagcggagcctcgacatcctgaaggggaaggtcatggcctccatgttctatgaagtgagcacacggaccagcagctcctttgcagcagccatggcccggctgggaggtgctgtgctcagcttctcggaagccacatcgtccgtccagaagggcgaatccctggctgactccgtgcagaccatgagctgctatgccgacgtcgtcgtgctccggcacccccagcctggagcagtggagctggccgccaagcactgccggaggccagtgatcaatgctggggatggggtcggagagcaccccacccaggccctgctggacatcttcaccatccgtgaggagctgggaactgtcaatggcatgacgatcacgatggtgggtgacctgaagcacggacgcacagtacattccctggcctgcctgctcacccagtatcgtgtcagcctgcgctacgtggcacctcccagcctgcgcatgccacccactgtgcgggccttcgtggcctcccgcggcaccaagcaggaggaattcgagagcattgaggaggcgctgcctgacactgatgtgctctacatgactcgaatccagaaggaacgatttggctctacccaggagtacgaagcttgctttggtcagttcatcctcactccccacatcatgacccgggccaagaagaagatggtggtgatgcacccgatgccccgtgtcaacgagataagcgtggaagtggactcggatccccgcgcagcctacttccgccaggctgagaacggcatgtacatccgcatggctctgttagccaccgtgctgggccgtttctagggcctggcttcctcagcctcttctctttaggcccagctgctgggcaaggaattccagtgcctcctacgggggcagcacacttagatattcctggacatccagatagctcacatgtgctgaccaaagcttaagctttggtcaggctggtctcaaactccctacctcaggtgatctgcccacctcagcctcccaaaatgctgggata

SEQ ID NO: 52615 - DNA, 5155 bp, Homo sapiens
ctgccgggtcgacgtctagaggagtccccagtatgtgtaacaacgacctatacagggggtgcccctcggatccttgctttggactgtggcctcaagtataatcagatccgatgcctctgccagcgtggggctgaggtcactgtggtaccctgggaccatgcactagacagccaagagtatgagggtctcttcttaagtaatgggcctggtgaccctgcctcctatcccagtgtcgtatccacactgagccgtgttttatctgagcctaatccccgacctgtctttgggatctgcctgggacaccagctattggccttagccattggggccaagacttacaagatgagatatgggaaccgaggccataaccagccctgcttgttggtgggctctgggcgctgctttctgacatcccagaaccatgggtttgctgtggagacagactcactgccagcagactgggctcctctcttcaccaacgccaatgatggttccaatgaaggcattgtgcacaacagcttgcctttcttcagtgtccagtttcacccagagcaccaagctggcccttcagatatggaactgcttttcgatatctttctggaaactgtgaaagaggccacagctgggaaccctgggggccagacagttagagagcggctgactgagcgcctctgtccccctgggattcccactcccggctctggacttccaccaccacgaaaggttctgatcctgggctcagggggcctctccattggccaagctggagaatttgactactcgggctctcaggcaattaaggccctgaaggaggaaaacatccagacgttgctgatcaaccccaatattgccacagtgcagacctcccaggggctggccgacaaggtctattttcttcccataacacctcattatgtaacccaggtgatacgtaatgaacgccccgatggtgtgttactgacttttgggggccagactgctctgaactgtggtgtggagctgaccaaggccggggtgctggctcggtatggggtccgggtcctgggcacaacagtggagaccattgagctgaccgaggatcgacgggcctttgctgccagaatggcagagatcggagagcatgtggccccgagcgaggcaggaaattctcttgaacaggcccaggcagccgctgaacggctggggtaccctgtgctagtgcgtgcagcctttgccgtgggtggcctgggctctggctttgcctctaacagggaggagctctctgctctcgtggccccagcttttgcccataccagccaagtgctagtagacaagtctctgaagggatggaaggagattgagtacgaggtggtgagagacgcctatggcaactgtgtcacggtgtgtaacatggagaacttggacccactgggcatccacactggtgagtccatagtggtggcccctagccagacactgaatgacagggagtatcagctcctgaggcagacagctatcaaggtgacccagcacctgggaattgttggggagtgcaatgtgcagtatgccttgaaccctgagtctgagcagtattacatcattgaagtgaatgccaggctctctcgcagctctgccctggccagtaaggccacaggttatccactggcttatgtggcagccaagctagcattgggcatccctttgcctgagctcaggaactctgtgacagggggtacagcagcctttgaacccagcgtggattattgtgtggtgaagattcctcgatgggaccttagcaagttcctgcgagtcagcacaaagattgggagctgcatgaagagcgttggtgaagtcatgggcattgggcgttcatttgaggaggccttccagaaggccctgcgcatggtggatgagaactgtgtgggctttgatcacacagtgaaaccagtcagcgatatggagttggagactccaacagataagcggatttttgtggtggcagctgctttgtgggctggttattcagtggaccgcctgtatgagctcacacgcatcgaccgctggttcctgcaccgaatgaagcgtatcatcgcacatgcccagctgctagaacaacaccgtggacagcctttgccgccagacctgctgcaacaggccaagtgtcttggcttctcagacaaacagattgcccttgcagttctgagcacagagctggctgttcgcaagctgcgtcaggaactggggatctgtccagcagtgaaacagattgacacagttgcagctgagtggccagcccagacaaattacctatacctaacgtattggggcaccacccatgacctcacctttcgaacacctcatgtcctagtccttggctctggcgtctaccgtattggctctagcgttgaatttgactggtgtgctgtaggctgcatccagcagctccgaaagatgggatataagaccatcatggtgaactataacccagagacagtcagcaccgactatgacatgtgtgatcgactctactttgatgagatctcttttgaggtggtgatggacatctatgagctcgagaaccctgaaggtgtgatcctatccatgggtggacagctgcccaacaacatggccatggcgttgcatcggcagcagtgccgggtgctgggcacctcccctgaagccattgactcggctgagaaccgtttcaagttttcccggctccttgacaccattggtatcagccagcctcagtggagggagctcagtgacctcgagtctgctcgccaattctgccagaccgtggggtacccctgtgtggtgcgcccctcctatgtgctgagcggtgctgctatgaatgtggcctacacggatggagacctggagcgcttcctgagcagcgcagcagccgtctccaaagagcatcccgtggtcatctccaagttcatccaggaggctaaggagattgacgtggatgccgtggcctctgatggtgtggtggcagccatcgccatctctgagcatgtggagaatgcaggtgtgcattcaggtgatgcgacgctggtgacccccccacaagatatcactgccaaaaccctggagcggatcaaagccattgtgcatgctgtgggccaggagctacaggtcacaggacccttcaatctgcagctcattgccaaggatgaccagctgaaagttattgaatgcaacgtacgtgtctctcgctccttccccttcgtttccaagacactgggtgtggacctagtagccttggccacgcgggtcatcatgggggaagaagtggaacctgtggggctaatgactggttctggagtcgtgggagtaaaggtgcctcagttctccttctcccgcttggcgggtgctgacgtggtgttgggtgtggaaatgaccagtactggggaggtggccggctttggggagagccgctgtgaggcatacctcaaggccatgctaagcactggctttaagatccccaagaagaatatcctgctgaccattggcagctataagaacaaaagcgagctgctcccaactgtgcggctactggagagcctgggctacagcctctatgccagtctcggcacagctgacttctacactgagcatggcgtcaaggtaacagctgtggactggcactttgaggaggctgtggatggtgagtgcccaccacagcggagcatcctggagcagctagctgagaaaaactttgagctggtgattaacctgtcaatgcgtggagctgggggccggcgtctctcttcctttgtcaccaagggctaccgcacccgacgcttggccgctgacttctccgtgcccctaatcatcgatatcaagtgcaccaaactctttgtggaggccctaggccagatcgggccagcccctcctttgaaggtgcatgttgactgtatgacctcccaaaagcttgtgcgactgccgggattgattgatgtccatgtgcacctgcgggaaccaggtgggacacataaggaggactttgcttcaggcacagccgctgccctggctgggggtatcaccatggtgtgtgccatgcctaatacccggccccccatcattgacgcccctgctctggccctggcccagaagctggcagaggctggcgcccggtgcgactttgcgctattccttggggcctcgtctgaaaatgcaggaaccttgggcaccgtggccgggtctgcagccgggctgaagctttacctcaatgagaccttctctgagctgcggctggacagcgtggtccagtggatggagcatttcgagacatggccctcccacctccccattgtggctcacgcagagcagcaaaccgtggctgctgtcctcatggtggctcagctcactcagcgctcagtgcacatatgtcacgtggcacggaaggaggagatcctgctaattaaagctgcaaaggcacggggcttgccagtgacctgcgaggtggctccccaccacctgttcctaagccatgatgacctggagcgcctggggcctgggaagggggaggtccggcctgagcttggctcccgccaggatgtggaagccctgtgggagaacatggctgtcatcgactgctttgcctcagaccatgctccccataccttggaggagaagtgtgggtccaggcccccacctgggttcccagggttagagaccatgctgccactactcctgacggctgtaagcgagggccggctcagcctggacgacctgctgcagcgattgcaccacaatcctcggcgcatctttcacctgcctccgcaggaggacacctatgtggaggtggatctggagcatgagtggacaattcccagccacatgcccttctccaaggcccactggacaccttttgaagggcagaaagtgaagggcaccgtccgccgtgtggtcctgcgaggggaggttgcctatatcgatgggcaggttctggtacccccgggctatggacaggatgtacggaagtggccacagggggctgttcctcagctcccaccctcagcccctgccactagtgagatgaccacgacacctgaaagaccccgccgtggcatcccagggcttcctgatggccgcttccatctgccgccccgaatccatcgagcctccgacccaggtttgccagctgtgttcctccgcccaggagctg

SEQ ID NO: 52616 - DNA, 5157 bp, Homo sapiens
ctgccgggtcgacgtctagaggagtccccagtatgtgtaacaacgacctatacagggggtgcccctcggatccttgctttggactgtggcctcaagtataatcagatccgatgcctctgccagcgtggggctgaggtcactgtggtaccctgggaccatgcactagacagccaagagtatgagggtctcttcttaagtaatgggcctggtgaccctgcctcctatcccagtgtcgtatccacactgagccgtgttttatctgagcctaatccccgacctgtctttgggatctgcctgggacaccagctattggccttagccattggggccaagacttacaagatgagatatgggaaccgaggccataaccagccctgcttgttggtgggctctgggcgctgctttctgacatcccagaaccatgggtttgctgtggagacagactcactgccagcagactgggctcctctcttcaccaacgccaatgatggttccaatgaaggcattgtgcacaacagcttgcctttcttcagtgtccagtttcacccagagcaccaagctggcccttcagatatggaactgcttttcgatatctttctggaaactgtgaaagaggccacagctgggaaccctgggggccagacagttagagagcggctgactgagcgcctctgtccccctgggattcccactcccggctctggacttccaccaccacgaaaggttctgatcctgggctcagggggcctctccattggccaagctggagaatttgactactcgggctctcaggcaattaaggccctgaaggaggaaaacatccagacgttgctgatcaaccccaatattgccacagtgcagacctcccaggggctggccgacaaggtctattttcttcccataacacctcattatgtaacccaggtgatacgtaatgaacgccccgatggtgtgttactgacttttgggggccagactgctctgaactgtggtgtggagctgaccaaggccggggtgctggctcggtatggggtccgggtcctgggcacaacagtggagaccattgagctgaccgaggatcgacgggcctttgctgccagaatggcagagatcggagagcatgtggccccgagcgaggcaggaaattctcttgaacaggcccaggcagccgctgaacggctggggtaccctgtgctagtgcgtgcagcctttgccgtgggtggcctgggctctggctttgcctctaacagggaggagctctctgctctcgtggccccagcttttgcccataccagccaagtgctagtagacaagtctctgaagggatggaaggagattgagtacgaggtggtgagagacgcctatggcaactgtgtcacggtgtgtaacatggagaacttggacccactgggcatccacactggtgagtccatagtggtggcccctagccagacactgaatgacagggagtatcagctcctgaggcagacagctatcaaggtgacccagcacctgggaattgttggggagtgcaatgtgcagtatgccttgaaccctgagtctgagcagtattacatcattgaagtgaatgccaggctctctcgcagctctgccctggccagtaaggccacaggttatccactggcttatgtggcagccaagctagcattgggcatccctttgcctgagctcaggaactctgtgacagggggtacagcagcctttgaacccagcgtggattattgtgtggtgaagattcctcgatgggaccttagcaagttcctgcgagtcagcacaaagattgggagctgcatgaagagcgttggtgaagtcatgggcattgggcgttcatttgaggaggccttccagaaggccctgcgcatggtggatgagaactgtgtgggctttgatcacacagtgaaaccagtcagcgatatggagttggagactccaacagataagcggatttttgtggtggcagctgctttgtgggctggttattcagtggaccgcctgtatgagctcacacgcatcgaccgctggttcctgcaccgaatgaagcgtatcatcgcacatgcccagctgctagaacaacaccgtggacagcctttgccgccagacctgctgcaacaggccaagtgtcttggcttctcagacaaacagattgcccttgcagttctgagcacagagctggctgttcgcaagctgcgtcaggaactggggatctgtccagcagtgaaacagattgacacagttgcagctgagtggccagcccagacaaattacctatacctaacgtattggggcaccacccatgacctcacctttcgaacacctcatgtcctagtccttggctctggcgtctaccgtattggctctagcgttgaatttgactggtgtgctgtaggctgcatccagcagctccgaaagatgggatataagaccatcatggtgaactataacccagagacagtcagcaccgactatgacatgtgtgatcgactctactttgatgagatctcttttgaggtggtgatggacatctatgagctcgagaaccctgaaggtgtgatcctatccatgggtggacagctgcccaacaacatggccatggcgttgcatcggcagcagtgccgggtgctgggcacctcccctgaagccattgactcggctgagaaccgtttcaagttttcccggctccttgacaccattggtatcagccagcctcagtggagggagctcagtgacctcgagtctgctcgccaattctgccagaccgtggggtacccctgtgtggtgcgcccctcctatgtgctgagcggtgctgctatgaatgtggcctacacggatggagacctggagcgcttcctgagcagcgcagcagccgtctccaaagagcatcccgtggtcatctccaagttcatccaggaggctaaggagattgacgtggatgccgtggcctctgatggtgtggtggcagccatcgccatctctgagcatgtggagaatgcaggtgtgcattcaggtgatgcgacgctggtgacccccccacaagatatcactgccaaaaccctggagcggatcaaagccattgtgcatgctgtgggccaggagctacaggtcacaggacccttcaatctgcagctcattgccaaggatgaccagctgaaagttattgaatgcaacgtacgtgtctctcgctccttccccttcgtttccaagacactgggtgtggacctagtagccttggccacgcgggtcatcatgggggaagaagtggaacctgtggggctaatgactggttctggagtcgtgggagtaaaggtgcctcagttctccttctcccgcttggcgggtgctgacgtggtgttgggtgtggaaatgaccagtactggggaggtggccggctttggggagagccgctgtgaggcatacctcaaggccatgctaagcactggctttaagatccccaagaagaatatcctgctgaccattggcagctataagaacaaaagcgagctgctcccaactgtgcggctactggagagcctgggctacagcctctatgccagtctcggcacagctgacttctacactgagcatggcgtcaaggtaacagctgtggactggcactttgaggaggctgtggatggtgagtgcccaccacagcggagcatcctggagcagctagctgagaaaaactttgagctggtgattaacctgtcaatgcgtggagctgggggccggcgtctctcttcctttgtcaccaagggctaccgcacccgacgcttggccgctgacttctccgtgcccctaatcatcgatatcaagtgcaccaaactctttgtggaggccctaggccagatcgggccagcccctcctttgaaggtgcatgttgactgtatgacctcccaaaagcttgtgcgactgccgggattgattgatgtccatgtgcacctgcgggaaccaggtgggacacataaggaggactttgcttcaggcacagccgctgccctggctgggggtatcaccatggtgtgtgccatgcctaatacccggccccccatcattgacgcccctgctctggccctggcccagaagctggcagaggctggcgcccggtgcgactttgcgctattccttggggcctcgtctgaaaatgcaggaaccttgggcaccgtggccgggtctgcagccgggctgaagctttacctcaatgagaccttctctgagctgcggctggacagcgtggtccagtggatggagcatttcgagacatggccctcccacctccccattgtggctcacgcagagcagcaaaccgtggctgctgtcctcatggtggctcagctcactcagcgctcagtgcacatatgtcacgtggcacggaaggaggagatcctgctaattaaagctgcaaaggcacggggcttgccagtgacctgcgaggtggctccccaccacctgttcctaagccatgatgacctggagcgcctggggcctgggaagggggaggtccggcctgagcttggctcccgccaggatgtggaagccctgtgggagaacatggctgtcatcgactgctttgcctcagaccatgctccccataccttggaggagaagtgtgggtccaggcccccacctgggttcccagggttagagaccatgctgccactactcctgacggctgtaagcgagggccggctcagcctggacgacctgctgcagcgattgcaccacaatcctcggcgcatctttcacctgcctccgcaggaggacacctatgtggaggtggatctggagcatgagtggacaattcccagccacatgcccttctccaaggcccactggacaccttttgaagggcagaaagtgaagggcaccgtccgccgtgtggtcctgcgaggggaggttgcctatatcgatgggcaggttctggtacccccgggctatggacaggatgtacggaagtggccacagggggctgttcctcagctcccaccctcagcccctgccactagtgagatgaccacgccaggcgtggtggtgcacatctgtaatcccagctacttgggaggctgaggcaggagaattgcttgaacccagaaggtcacgccactgcactccagcctgagcgacagaacgagactccgtctc

SEQ ID NO: 52617 - DNA, 3848 bp, Homo sapiens
ctgccgggtcgacgtctagaggagtccccagtatgtgtaacaacgacctatacagggggtgcccctcggatccttgctttggactgtggcctcaagtataatcagatccgatgcctctgccagcgtggggctgaggtcactgtggtaccctgggaccatgcactagacagccaagagtatgagggtctcttcttaagtaatgggcctggtgaccctgcctcctatcccagtgtcgtatccacactgagccgtgttttatctgagcctaatccccgacctgtctttgggatctgcctgggacaccagctattggccttagccattggggccaagacttacaagatgagatatgggaaccgaggccataaccagccctgcttgttggtgggctctgggcgctgctttctgacatcccagaaccatgggtttgctgtggagacagactcactgccagcagactgggctcctctcttcaccaacgccaatgatggttccaatgaaggcattgtgcacaacagcttgcctttcttcagtgtccagtttcacccagagcaccaagctggcccttcagatatggaactgcttttcgatatctttctggaaactgtgaaagaggccacagctgggaaccctgggggccagacagttagagagcggctgactgagcgcctctgtccccctgggattcccactcccggctctggacttccaccaccacgaaaggttctgatcctgggctcagggggcctctccattggccaagctggagaatttgactactcgggctctcaggcaattaaggccctgaaggaggaaaacatccagacgttgctgatcaaccccaatattgccacagtgcagacctcccaggggctggccgacaaggtctattttcttcccataacacctcattatgtaacccaggtgatacgtaatgaacgccccgatggtgtgttactgacttttgggggccagactgctctgaactgtggtgtggagctgaccaaggccggggtgctggctcggtatggggtccgggtcctgggcacaacagtggagaccattgagctgaccgaggatcgacgggcctttgctgccagaatggcagagatcggagagcatgtggccccgagcgaggcaggaaattctcttgaacaggcccaggcagccgctgaacggctggggtaccctgtgctagtgcgtgcagcctttgccgtgggtggcctgggctctggctttgcctctaacagggaggagctctctgctctcgtggccccagcttttgcccataccagccaagtgctagtagacaagtctctgaagggatggaaggagattgagtacgaggtggtgagagacgcctatggcaactgtgtcacggtgtgtaacatggagaacttggacccactgggcatccacactggtgagtccatagtggtggcccctagccagacactgaatgacagggagtatcagctcctgaggcagacagctatcaaggtgacccagcacctgggaattgttggggagtgcaatgtgcagtatgccttgaaccctgagtctgagcagtattacatcattgaagtgaatgccaggctctctcgcagctctgccctggccagtaaggccacaggttatccactggcttatgtggcagccaagctagcattgggcatccctttgcctgagctcaggaactctgtgacagggggtacagcagcctttgaacccagcgtggattattgtgtggtgaagattcctcgatgggaccttagcaagttcctgcgagtcagcacaaagattgggagctgcatgaagagcgttggtgaagtcatgggcattgggcgttcatttgaggaggccttccagaaggccctgcgcatggtggatgagaactgtgtgggctttgatcacacagtgaaaccagtcagcgatatggagttggagactccaacagataagcggatttttgtggtggcagctgctttgtgggctggttattcagtggaccgcctgtatgagctcacacgcatcgaccgctggttcctgcaccgaatgaagcgtatcatcgcacatgcccagctgctagaacaacaccgtggacagcctttgccgccagacctgctgcaacaggccaagtgtcttggcttctcagacaaacagattgcccttgcagttctgagcacagagctggctgttcgcaagctgcgtcaggaactggggatctgtccagcagtgaaacagattgacacagttgcagctgagtggccagcccagacaaattacctatacctaacgtattggggcaccacccatgacctcacctttcgaacacctcatgtcctagtccttggctctggcgtctaccgtattggctctagcgttgaatttgactggtgtgctgtaggctgcatccagcagctccgaaagatgggatataagaccatcatggtgaactataacccagagacagtcagcaccgactatgacatgtgtgatcgactctactttgatgagatctcttttgaggtggtgatggacatctatgagctcgagaaccctgaaggtgtgatcctatccatgggtggacagctgcccaacaacatggccatggcgttgcatcggcagcagtgccgggtgctgggcacctcccctgaagccattgactcggctgagaaccgtttcaagttttcccggctccttgacaccattggtatcagccagcctcagtggagggagctcagtgacctcgagtctgctcgccaattctgccagaccgtggggtacccctgtgtggtgcgcccctcctatgtgctgagcggtgctgctatgaatgtggcctacacggatggagacctggagcgcttcctgagcagcgcagcagccgtctccaaagagcatcccgtggtcatctccaagttcatccaggaggctaaggagattgacgtggatgccgtggcctctgatggtgtggtggcagccatcgccatctctgagcatgtggagaatgcaggtgtgcattcaggtgatgcgacgctggtgacccccccacaagatatcactgccaaaaccctggagcggatcaaagccattgtgcatgctgtgggccaggagctacaggtcacaggacccttcaatctgcagctcattgccaaggatgaccagctgaaagttattgaatgcaacgtacgtgtctctcgctccttccccttcgtttccaagacactgggtgtggacctagtagccttggccacgcgggtcatcatgggggaagaagtggaacctgtggggctaatgactggttctggagtcgtgggagtaaaggtgcctcagttctccttctcccgcttggcgggtgctgacgtggtgttgggtgtggaaatgaccagtactggggaggtggccggctttggggagagccgctgtgaggcatacctcaaggccatgctaagcactggctttaagatccccaagaagaatatcctgctgaccattggcagctataagaacaaaagcgagctgctcccaactgtgcggctactggagagcctgggctacagcctctatgccagtctcggcacagctgacttctacactgagcatggcgtcaaggtgcaggaactctggcaacctaccccactgctgcccttccccaagggggtgaaaatactgcaccaaagaattatctgggctgggcacggtggcatatacctgtagtcccagatactcaggaggctaaggcaggagaatctcttgagcccaggaggtagaggctgcagtgagctgcgagtgtgcagtgagtgcaccactgcactccagcttgggaaacagtgagatgctgtctcaaa

SEQ ID NO: 52618 - DNA, 637 bp, Homo sapiens
tgcccttctccaaggcccactggacaccttttgaagggcagaaagtgaagggcaccgtccgccgtgtggtcctgcgaggggaggttgcctatatcgatgggcaggtacgcaagtagcccctgcctgatctcagtagtgccctcttctgcaccacgttcatttcttcccttcccagcacatctacactgtcccactatgtgcaccactgccctggaccaggggttggggcacagctcccccaaggtgctttttgtccttgctgacatctacccctttaggacctgagttctctctgctccctcctgagtgccctgccttctgcctgcaggttctggtacccccgggctatggacaggatgtacggaagtggccacagggggctgttcctcagctcccaccctcagcccctgccactagtgagatgaccacggtatccacactactgggctagggggctgggaggtgttagtctcagggcaggatgaacagcttgaacattttcattggtggttcaggaacaattggggttttcttgagggactgaatttgaagtggggttgggtcaattatttttttaaaatgctgggccaggccagatgtggtggctcacacttgtaatcccagcactttgggaggc

SEQ ID NO: 52619 - DNA, 6573 bp, Homo sapiens
ctgccgggtcgacgtctagaggagtccccagtatgtgtaacaacgacctatacagggggtgcccctcggatccttgctttggactgtggcctcaagtataatcagatccgatgcctctgccagcgtggggctgaggtcactgtggtaccctgggaccatgcactagacagccaagagtatgagggtctcttcttaagtaatgggcctggtgaccctgcctcctatcccagtgtcgtatccacactgagccgtgttttatctgagcctaatccccgacctgtctttgggatctgcctgggacaccagctattggccttagccattggggccaagacttacaagatgagatatgggaaccgaggccataaccagccctgcttgttggtgggctctgggcgctgctttctgacatcccagaaccatgggtttgctgtggagacagactcactgccagcagactgggctcctctcttcaccaacgccaatgatggttccaatgaaggcattgtgcacaacagcttgcctttcttcagtgtccagtttcacccagagcaccaagctggcccttcagatatggaactgcttttcgatatctttctggaaactgtgaaagaggccacagctgggaaccctgggggccagacagttagagagcggctgactgagcgcctctgtccccctgggattcccactcccggctctggacttccaccaccacgaaaggttctgatcctgggctcagggggcctctccattggccaagctggagaatttgactactcgggctctcaggcaattaaggccctgaaggaggaaaacatccagacgttgctgatcaaccccaatattgccacagtgcagacctcccaggggctggccgacaaggtctattttcttcccataacacctcattatgtaacccaggtgatacgtaatgaacgccccgatggtgtgttactgacttttgggggccagactgctctgaactgtggtgtggagctgaccaaggccggggtgctggctcggtatggggtccgggtcctgggcacaacagtggagaccattgagctgaccgaggatcgacgggcctttgctgccagaatggcagagatcggagagcatgtggccccgagcgaggcaggaaattctcttgaacaggcccaggcagccgctgaacggctggggtaccctgtgctagtgcgtgcagcctttgccgtgggtggcctgggctctggctttgcctctaacagggaggagctctctgctctcgtggccccagcttttgcccataccagccaagtgctagtagacaagtctctgaagggatggaaggagattgagtacgaggtggtgagagacgcctatggcaactgtgtcacggtgtgtaacatggagaacttggacccactgggcatccacactggtgagtccatagtggtggcccctagccagacactgaatgacagggagtatcagctcctgaggcagacagctatcaaggtgacccagcacctgggaattgttggggagtgcaatgtgcagtatgccttgaaccctgagtctgagcagtattacatcattgaagtgaatgccaggctctctcgcagctctgccctggccagtaaggccacaggttatccactggcttatgtggcagccaagctagcattgggcatccctttgcctgagctcaggaactctgtgacagggggtacagcagcctttgaacccagcgtggattattgtgtggtgaagattcctcgatgggaccttagcaagttcctgcgagtcagcacaaagattgggagctgcatgaagagcgttggtgaagtcatgggcattgggcgttcatttgaggaggccttccagaaggccctgcgcatggtggatgagaactgtgtgggctttgatcacacagtgaaaccagtcagcgatatggagttggagactccaacagataagcggatttttgtggtggcagctgctttgtgggctggttattcagtggaccgcctgtatgagctcacacgcatcgaccgctggttcctgcaccgaatgaagcgtatcatcgcacatgcccagctgctagaacaacaccgtggacagcctttgccgccagacctgctgcaacaggccaagtgtcttggcttctcagacaaacagattgcccttgcagttctgagcacagagctggctgttcgcaagctgcgtcaggaactggggatctgtccagcagtgaaacagattgacacagttgcagctgagtggccagcccagacaaattacctatacctaacgtattggggcaccacccatgacctcacctttcgaacacctcatgtcctagtccttggctctggcgtctaccgtattggctctagcgttgaatttgactggtgtgctgtaggctgcatccagcagctccgaaagatgggatataagaccatcatggtgaactataacccagagacagtcagcaccgactatgacatgtgtgatcgactctactttgatgagatctcttttgaggtggtgatggacatctatgagctcgagaaccctgaaggtgtgatcctatccatgggtggacagctgcccaacaacatggccatggcgttgcatcggcagcagtgccgggtgctgggcacctcccctgaagccattgactcggctgagaaccgtttcaagttttcccggctccttgacaccattggtatcagccagcctcagtggagggagctcagtgacctcgaggtgggctgggacctggtgggttacccggaggctggatgatgcttgggggaaagtgtgaacaactcagctaagctccctgcctcctgtagtctgctcgccaattctgccagaccgtggggtacccctgtgtggtgcgcccctcctatgtgctgagcggtgctgctatgaatgtggcctacacggatggagacctggagcgcttcctgagcagcgcagcagccgtctccaaagagcatcccgtggtcatctccaagttcatccaggaggctaaggagattgacgtggatgccgtggcctctgatggtgtggtggcagccatcgccatctctgagcatgtggagaatgcaggtgtgcattcaggtgatgcgacgctggtgacccccccacaagatatcactgccaaaaccctggagcggatcaaagccattgtgcatgctgtgggccaggagctacaggtcacaggacccttcaatctgcagctcattgccaaggatgaccagctgaaagttattgaatgcaacgtacgtgtctctcgctccttccccttcgtttccaagacactgggtgtggacctagtagccttggccacgcgggtcatcatgggggaagaagtggaacctgtggggctaatgactggttctggagtcgtgggagtaaaggtgcctcagttctccttctcccgcttggcgggtgctgacgtggtgttgggtgtggaaatgaccagtactggggaggtggccggctttggggagagccgctgtgaggcatacctcaaggccatgctaagcactggctttaagatccccaagaagaatatcctgctgaccattggcagctataagaacaaaagcgagctgctcccaactgtgcggctactggagagcctgggctacagcctctatgccagtctcggcacagctgacttctacactgagcatggcgtcaaggtaacagctgtggactggcactttgaggaggctgtggatggtgagtgcccaccacagcggagcatcctggagcagctagctgagaaaaactttgagctggtgattaacctgtcaatgcgtggagctgggggccggcgtctctcttcctttgtcaccaagggctaccgcacccgacgcttggccgctgacttctccgtgcccctaatcatcgatatcaagtgcaccaaactctttgtggaggccctaggccagatcgggccagcccctcctttgaaggtgcatgttgactgtatgacctcccaaaagcttgtgcgactgccgggattgattgatgtccatgtgcacctgcgggaaccaggtgggacacataaggaggactttgcttcaggcacagccgctgccctggctgggggtatcaccatggtgtgtgccatgcctaatacccggccccccatcattgacgcccctgctctggccctggcccagaagctggcagaggctggcgcccggtgcgactttgcgctattccttggggcctcgtctgaaaatgcaggaaccttgggcaccgtggccgggtctgcagccgggctgaagctttacctcaatgagaccttctctgagctgcggctggacagcgtggtccagtggatggagcatttcgagacatggccctcccacctccccattgtggctcacgcagagcagcaaaccgtggctgctgtcctcatggtggctcagctcactcagcgctcagtgcacatatgtcacgtggcacggaaggaggagatcctgctaattaaagctgcaaaggcacggggcttgccagtgacctgcgaggtggctccccaccacctgttcctaagccatgatgacctggagcgcctggggcctgggaagggggaggtccggcctgagcttggctcccgccaggatgtggaagccctgtgggagaacatggctgtcatcgactgctttgcctcagaccatgctccccataccttggaggagaagtgtgggtccaggcccccacctgggttcccagggttagagaccatgctgccactactcctgacggctgtaagcgagggccggctcagcctggacgacctgctgcagcgattgcaccacaatcctcggcgcatctttcacctgcctccgcaggaggacacctatgtggaggtggatctggagcatgagtggacaattcccagccacatgcccttctccaaggcccactggacaccttttgaagggcagaaagtgaagggcaccgtccgccgtgtggtcctgcgaggggaggttgcctatatcgatgggcaggttctggtacccccgggctatggacaggatgtacggaagtggccacagggggctgttcctcagctcccaccctcagcccctgccactagtgagatgaccacgacacctgaaagaccccgccgtggcatcccagggcttcctgatggccgcttccatctgccgccccgaatccatcgagcctccgacccaggtttgccagctgaggagccaaaggagaagtcctctcggaaggtagccgagccagagctgatgggaacccctgatggcacctgctaccctccaccaccagtaccgagacaggcatctccccagaacctggggacccctggcttgctgcacccccagacctcacccctgctgcactcattagtgggccaacatatcctgtccgtccagcagttcaccaaggatcagatgtctcacctgttcaatgtggcacacacactgcgtatgatggtgcagaaggagcggagcctcgacatcctgaaggggaaggtcatggcctccatgttctatgaagtgagcacacggaccagcagctcctttgcagcagccatggcccggctgggaggtgctgtgctcagcttctcggaagccacatcgtccgtccagaagggcgaatccctggctgactccgtgcagaccatgagctgctatgccgacgtcgtcgtgctccggcacccccagcctggagcagtggagctggccgccaagcactgccggaggccagtgatcaatgctggggatggggtcggagagcaccccacccaggccctgctggacatcttcaccatccgtgaggagctgggaactgtcaatggcatgacgatcacgatggtgggtgacctgaagcacggacgcacagtacattccctggcctgcctgctcacccagtatcgtgtcagcctgcgctacgtggcacctcccagcctgcgcatgccacccactgtgcgggccttcgtggcctcccgcggcaccaagcaggaggaattcgagagcattgaggaggcgctgcctgacactgatgtgctctacatgactcgaatccagaaggaacgatttggctctacccaggagtacgaagcttgctttggtcagttcatcctcactccccacatcatgacccgggccaagaagaagatggtggtgatgcacccgatgccccgtgtcaacgagataagcgtggaagtggactcggatccccgcgcagcctacttccgccaggctgagaacggcatgtacatccgcatggctctgttagccaccgtgctgggccgtttctagggcctggcttcctcagcctcttctctttaggcccagctgctgggcaaggaattccagtgcctcctacgggggcagcacacttagatattcctggacatccagatagctcacatgtgctgaccacacttcaggctctggactggagctctctggcatgggggtggggcctcagatgctggggcccagtctgccccatcttcattcctgcaccttaaacctgtacagtcatttttctactgacttaataaacagccgagctgtcccttga

SEQ ID NO: 52620 - DNA, 6728 bp, Homo sapiens
ctgccgggtcgacgtctagaggagtccccagtatgtgtaacaacgacctatacagggggtgcccctcggatccttgctttggactgtggcctcaagtataatcagatccgatgcctctgccagcgtggggctgaggtcactgtggtaccctgggaccatgcactagacagccaagagtatgagggtctcttcttaagtaatgggcctggtgaccctgcctcctatcccagtgtcgtatccacactgagccgtgttttatctgagcctaatccccgacctgtctttgggatctgcctgggacaccagctattggccttagccattggggccaagacttacaagatgagatatgggaaccgaggccataaccagccctgcttgttggtgggctctgggcgctgctttctgacatcccagaaccatgggtttgctgtggagacagactcactgccagcagactgggctcctctcttcaccaacgccaatgatggttccaatgaaggcattgtgcacaacagcttgcctttcttcagtgtccagtttcacccagagcaccaagctggcccttcagatatggaactgcttttcgatatctttctggaaactgtgaaagaggccacagctgggaaccctgggggccagacagttagagagcggctgactgagcgcctctgtccccctgggattcccactcccggctctggacttccaccaccacgaaaggttctgatcctgggctcagggggcctctccattggccaagctggagaatttgactactcgggctctcaggcaattaaggccctgaaggaggaaaacatccagacgttgctgatcaaccccaatattgccacagtgcagacctcccaggggctggccgacaaggtctattttcttcccataacacctcattatgtaacccaggtgatacgtaatgaacgccccgatggtgtgttactgacttttgggggccagactgctctgaactgtggtgtggagctgaccaaggccggggtgctggctcggtatggggtccgggtcctgggcacaacagtggagaccattgagctgaccgaggatcgacgggcctttgctgccagaatggcagagatcggagagcatgtggccccgagcgaggcaggaaattctcttgaacaggcccaggcagccgctgaacggctggggtaccctgtgctagtgcgtgcagcctttgccgtgggtggcctgggctctggctttgcctctaacagggaggagctctctgctctcgtggccccagcttttgcccataccagccaagtgctagtagacaagtctctgaagggatggaaggagattgagtacgaggtggtgagagacgcctatggcaactgtgtcacggtgtgtaacatggagaacttggacccactgggcatccacactggtgagtccatagtggtggcccctagccagacactgaatgacagggagtatcagctcctgaggcagacagctatcaaggtgacccagcacctgggaattgttggggagtgcaatgtgcagtatgccttgaaccctgagtctgagcagtattacatcattgaagtgaatgccaggctctctcgcagctctgccctggccagtaaggccacaggttatccactggcttatgtggcagccaagctagcattgggcatccctttgcctgagctcaggaactctgtgacagggggtacagcagcctttgaacccagcgtggattattgtgtggtgaagattcctcgatgggaccttagcaagttcctgcgagtcagcacaaagattgggagctgcatgaagagcgttggtgaagtcatgggcattgggcgttcatttgaggaggccttccagaaggccctgcgcatggtggatgagaactgtgtgggctttgatcacacagtgaaaccagtcagcgatatggagttggagactccaacagataagcggatttttgtggtggcagctgctttgtgggctggttattcagtggaccgcctgtatgagctcacacgcatcgaccgctggttcctgcaccgaatgaagcgtatcatcgcacatgcccagctgctagaacaacaccgtggacagcctttgccgccagacctgctgcaacaggccaagtgtcttggcttctcagacaaacagattgcccttgcagttctgagcacagagctggctgttcgcaagctgcgtcaggaactggggatctgtccagcagtgaaacagattgacacagttgcagctgagtggccagcccagacaaattacctatacctaacgtattggggcaccacccatgacctcacctttcgaacacctcatgtcctagtccttggctctggcgtctaccgtattggctctagcgttgaatttgactggtgtgctgtaggctgcatccagcagctccgaaagatgggatataagaccatcatggtgaactataacccagagacagtcagcaccgactatgacatgtgtgatcgactctactttgatgagatctcttttgaggtggtgatggacatctatgagctcgagaaccctgaaggtgtgatcctatccatgggtggacagctgcccaacaacatggccatggcgttgcatcggcagcagtgccgggtgctgggcacctcccctgaagccattgactcggctgagaaccgtttcaagttttcccggctccttgacaccattggtatcagccagcctcagtggagggagctcagtgacctcgagtctgctcgccaattctgccagaccgtggggtacccctgtgtggtgcgcccctcctatgtgctgagcggtgctgctatgaatgtggcctacacggatggagacctggagcgcttcctgagcagcgcagcagccgtctccaaagagcatcccgtggtcatctccaagttcatccaggaggctaaggagattgacgtggatgccgtggcctctgatggtgtggtggcagccatcgccatctctgagcatgtggagaatgcaggtgtgcattcaggtgatgcgacgctggtgacccccccacaagatatcactgccaaaaccctggagcggatcaaagccattgtgcatgctgtgggccaggagctacaggtcacaggacccttcaatctgcagctcattgccaaggatgaccagctgaaagttattgaatgcaacgtacgtgtctctcgctccttccccttcgtttccaagacactgggtgtggacctagtagccttggccacgcgggtcatcatgggggaagaagtggaacctgtggggctaatgactggttctggagtcgtgggagtaaaggtgcctcagttctccttctcccgcttggcgggtgctgacgtggtgttgggtgtggaaatgaccagtactggggaggtggccggctttggggagagccgctgtgaggcatacctcaaggccatgctaagcactggctttaagatccccaagaagaatatcctgctgaccattggcagctataagaacaaaagcgagctgctcccaactgtgcggctactggagagcctgggctacagcctctatgccagtctcggcacagctgacttctacactgagcatggcgtcaaggtaacagctgtggactggcactttgaggaggctgtggatggtgagtgcccaccacagcggagcatcctggagcagctagctgagaaaaactttgagctggtgattaacctgtcaatgcgtggagctgggggccggcgtctctcttcctttgtcaccaagggctaccgcacccgacgcttggccgctgacttctccgtgcccctaatcatcgatatcaagtgcaccaaactctttgtggaggccctaggccagatcgggccagcccctcctttgaaggtgcatgttgactgtatgacctcccaaaagcttgtgcgactgccgggattgattgatgtccatgtgcacctgcgggaaccaggtgggacacataaggaggactttgcttcaggcacagccgctgccctggctgggggtatcaccatggtgtgtgccatgcctaatacccggccccccatcattgacgcccctgctctggccctggcccagaagctggcagaggctggcgcccggtgcgactttgcgctattccttggggcctcgtctgaaaatgcaggaaccttgggcaccgtggccgggtctgcagccgggctgaagctttacctcaatgagaccttctctgagctgcggctggacagcgtggtccagtggatggagcatttcgagacatggccctcccacctccccattgtggctcacgcagagcagcaaaccgtggctgctgtcctcatggtggctcagctcactcagcgctcagtgcacatatgtcacgtggcacggaaggaggaggtaagagtacacctgagatcctgctgtccctgttgctttcccagtaacaccaaaggtcagggtagtccttaggggcaggagacagcaggaggagagtctggagacagcaggaggagggtctcgagccagcacccttgcaggtctacatcatcatttttttgagcagggatgttggccattgggactttgtgtagggcaaggcatatgggtggtgcctcttctggatcttcccattgttccccagatcctgctaattaaagctgcaaaggcacggggcttgccagtgacctgcgaggtggctccccaccacctgttcctaagccatgatgacctggagcgcctggggcctgggaagggggaggtccggcctgagcttggctcccgccaggatgtggaagccctgtgggagaacatggctgtcatcgactgctttgcctcagaccatgctccccataccttggaggagaagtgtgggtccaggcccccacctgggttcccagggttagagaccatgctgccactactcctgacggctgtaagcgagggccggctcagcctggacgacctgctgcagcgattgcaccacaatcctcggcgcatctttcacctgcctccgcaggaggacacctatgtggaggtggatctggagcatgagtggacaattcccagccacatgcccttctccaaggcccactggacaccttttgaagggcagaaagtgaagggcaccgtccgccgtgtggtcctgcgaggggaggttgcctatatcgatgggcaggttctggtacccccgggctatggacaggatgtacggaagtggccacagggggctgttcctcagctcccaccctcagcccctgccactagtgagatgaccacgacacctgaaagaccccgccgtggcatcccagggcttcctgatggccgcttccatctgccgccccgaatccatcgagcctccgacccaggtttgccagctgaggagccaaaggagaagtcctctcggaaggtagccgagccagagctgatgggaacccctgatggcacctgctaccctccaccaccagtaccgagacaggcatctccccagaacctggggacccctggcttgctgcacccccagacctcacccctgctgcactcattagtgggccaacatatcctgtccgtccagcagttcaccaaggatcagatgtctcacctgttcaatgtggcacacacactgcgtatgatggtgcagaaggagcggagcctcgacatcctgaaggggaaggtcatggcctccatgttctatgaagtgagcacacggaccagcagctcctttgcagcagccatggcccggctgggaggtgctgtgctcagcttctcggaagccacatcgtccgtccagaagggcgaatccctggctgactccgtgcagaccatgagctgctatgccgacgtcgtcgtgctccggcacccccagcctggagcagtggagctggccgccaagcactgccggaggccagtgatcaatgctggggatggggtcggagagcaccccacccaggccctgctggacatcttcaccatccgtgaggagctgggaactgtcaatggcatgacgatcacgatggtgggtgacctgaagcacggacgcacagtacattccctggcctgcctgctcacccagtatcgtgtcagcctgcgctacgtggcacctcccagcctgcgcatgccacccactgtgcgggccttcgtggcctcccgcggcaccaagcaggaggaattcgagagcattgaggaggcgctgcctgacactgatgtgctctacatgactcgaatccagaaggaacgatttggctctacccaggagtacgaagcttgctttggtcagttcatcctcactccccacatcatgacccgggccaagaagaagatggtggtgatgcacccgatgccccgtgtcaacgagataagcgtggaagtggactcggatccccgcgcagcctacttccgccaggctgagaacggcatgtacatccgcatggctctgttagccaccgtgctgggccgtttctagggcctggcttcctcagcctcttctctttaggcccagctgctgggcaaggaattccagtgcctcctacgggggcagcacacttagatattcctggacatccagatagctcacatgtgctgaccacacttcaggctctggactggagctctctggcatgggggtggggcctcagatgctggggcccagtctgccccatcttcattcctgcaccttaaacctgtacagtcatttttctactgacttaataaacagccgagctgtcccttga

SEQ ID NO: 52621 - DNA, 6844 bp, Homo sapiens
ctgccgggtcgacgtctagaggagtccccagtatgtgtaacaacgacctatacagggggtgcccctcggatccttgctttggactgtggcctcaagtataatcagatccgatgcctctgccagcgtggggctgaggtcactgtggtaccctgggaccatgcactagacagccaagagtatgagggtctcttcttaagtaatgggcctggtgaccctgcctcctatcccagtgtcgtatccacactgagccgtgttttatctgagcctaatccccgacctgtctttgggatctgcctgggacaccagctattggccttagccattggggccaagacttacaagatgagatatgggaaccgaggccataaccagccctgcttgttggtgggctctgggcgctgctttctgacatcccagaaccatgggtttgctgtggagacagactcactgccagcagactgggctcctctcttcaccaacgccaatgatggttccaatgaaggcattgtgcacaacagcttgcctttcttcagtgtccagtttcacccagagcaccaagctggcccttcagatatggaactgcttttcgatatctttctggaaactgtgaaagaggccacagctgggaaccctgggggccagacagttagagagcggctgactgagcgcctctgtccccctgggattcccactcccggctctggacttccaccaccacgaaaggttctgatcctgggctcagggggcctctccattggccaagctggagaatttgactactcgggctctcaggcaattaaggccctgaaggaggaaaacatccagacgttgctgatcaaccccaatattgccacagtgcagacctcccaggggctggccgacaaggtctattttcttcccataacacctcattatgtaacccaggtgatacgtaatgaacgccccgatggtgtgttactgacttttgggggccagactgctctgaactgtggtgtggagctgaccaaggccggggtgctggctcggtatggggtccgggtcctgggcacaacagtggagaccattgagctgaccgaggatcgacgggcctttgctgccagaatggcagagatcggagagcatgtggccccgagcgaggcaggaaattctcttgaacaggcccaggcagccgctgaacggctggggtaccctgtgctagtgcgtgcagcctttgccgtgggtggcctgggctctggctttgcctctaacagggaggagctctctgctctcgtggccccagcttttgcccataccagccaagtgctagtagacaagtctctgaagggatggaaggagattgagtacgaggtggtgagagacgcctatggcaactgtgtcacggtgtgtaacatggagaacttggacccactgggcatccacactggtgagtccatagtggtggcccctagccagacactgaatgacagggagtatcagctcctgaggcagacagctatcaaggtgacccagcacctgggaattgttggggagtgcaatgtgcagtatgccttgaaccctgagtctgagcagtattacatcattgaagtgaatgccaggctctctcgcagctctgccctggccagtaaggccacaggttatccactggcttatgtggcagccaagctagcattgggcatccctttgcctgagctcaggaactctgtgacagggggtacagcagcctttgaacccagcgtggattattgtgtggtgaagattcctcgatgggaccttagcaagttcctgcgagtcagcacaaagattgggagctgcatgaagagcgttggtgaagtcatgggcattgggcgttcatttgaggaggccttccagaaggccctgcgcatggtggatgagaactgtgtgggctttgatcacacagtgaaaccagtcagcgatatggagttggagactccaacagataagcggatttttgtggtggcagctgctttgtgggctggttattcagtggaccgcctgtatgagctcacacgcatcgaccgctggttcctgcaccgaatgaagcgtatcatcgcacatgcccagctgctagaacaacaccgtggacagcctttgccgccagacctgctgcaacaggccaagtgtcttggcttctcagacaaacagattgcccttgcagttctgagcacagagctggctgttcgcaagctgcgtcaggaactggggatctgtccagcagtgaaacagattgacacagttgcagctgagtggccagcccagacaaattacctatacctaacgtattggggcaccacccatgacctcacctttcgaacacctcatgtcctagtccttggctctggcgtctaccgtattggctctagcgttgaatttgactggtgtgctgtaggctgcatccagcagctccgaaagatgggatataagaccatcatggtgaactataacccagagacagtcagcaccgactatgacatgtgtgatcgactctactttgatgagatctcttttgaggtggtgatggacatctatgagctcgagaaccctgaaggtgtgatcctatccatgggtggacagctgcccaacaacatggccatggcgttgcatcggcagcagtgccgggtgctgggcacctcccctgaagccattgactcggctgagaaccgtttcaagttttcccggctccttgacaccattggtatcagccagcctcagtggagggagctcagtgacctcgagtctgctcgccaattctgccagaccgtggggtacccctgtgtggtgcgcccctcctatgtgctgagcggtgctgctatgaatgtggcctacacggatggagacctggagcgcttcctgagcagcgcagcagccgtctccaaagagcatcccgtggtcatctccaagttcatccaggaggctaaggagattgacgtggatgccgtggcctctgatggtgtggtggcagccatcgccatctctgagcatgtggagaatgcaggtgtgcattcaggtgatgcgacgctggtgacccccccacaagatatcactgccaaaaccctggagcggatcaaagccattgtgcatgctgtgggccaggagctacaggtcacaggacccttcaatctgcagctcattgccaaggatgaccagctgaaagttattgaatgcaacgtacgtgtctctcgctccttccccttcgtttccaagacactgggtgtggacctagtagccttggccacgcgggtcatcatgggggaagaagtggaacctgtggggctaatgactggttctggagtcgtgggagtaaaggtgcctcagttctccttctcccgcttggcgggtgctgacgtggtgttgggtgtggaaatgaccagtactggggaggtggccggctttggggagagccgctgtgaggcatacctcaaggccatgctaagcactggctttaagatccccaagaagaatatcctgctgaccattggcagctataagaacaaaagcgagctgctcccaactgtgcggctactggagagcctgggctacagcctctatgccagtctcggcacagctgacttctacactgagcatggcgtcaaggtaacagctgtggactggcactttgaggaggctgtggatggtgagtgcccaccacagcggagcatcctggagcagctagctgagaaaaactttgagctggtgattaacctgtcaatgcgtggagctgggggccggcgtctctcttcctttgtcaccaagggctaccgcacccgacgcttggccgctgacttctccgtgcccctaatcatcgatatcaagtgcaccaaactctttgtggaggccctaggccagatcgggccagcccctcctttgaaggtgcatgttgactgtatgacctcccaaaagcttgtgcgactgccgggattgattgatgtccatgtgcacctgcgggaaccaggtgggacacataaggaggactttgcttcaggcacagccgctgccctggctgggggtatcaccatggtgtgtgccatgcctaatacccggccccccatcattgacgcccctgctctggccctggcccagaagctggcagaggctggcgcccggtgcgactttgcgctattccttggggcctcgtctgaaaatgcaggaaccttgggcaccgtggccgggtctgcagccgggctgaagctttacctcaatgagaccttctctgagctgcggctggacagcgtggtccagtggatggagcatttcgagacatggccctcccacctccccattgtggctcacgcagagcagcaaaccgtggctgctgtcctcatggtggctcagctcactcagcgctcagtgcacatatgtcacgtggcacggaaggaggagatcctgctaattaaagctgcaaaggcacggggcttgccagtgacctgcgaggtggctccccaccacctgttcctaagccatgatgacctggagcgcctggggcctgggaagggggaggtccggcctgagcttggctcccgccaggatgtggaagccctgtgggagaacatggctgtcatcgactgctttgcctcagaccatgctccccataccttggaggagaagtgtgggtccaggcccccacctgggttcccagggttagagaccatgctgccactactcctgacggctgtaagcgagggccggctcagcctggacgacctgctgcagcgattgcaccacaatcctcggcgcatctttcacctgcctccgcaggaggacacctatgtggaggtggatctggagcatgagtggacaattcccagccacatgcccttctccaaggcccactggacaccttttgaagggcagaaagtgaagggcaccgtccgccgtgtggtcctgcgaggggaggttgcctatatcgatgggcaggttctggtacccccgggctatggacaggatgtacggaagtggccacagggggctgttcctcagctcccaccctcagcccctgccactagtgagatgaccacgacacctgaaagaccccgccgtggcatcccagggcttcctgatggccgcttccatctgccgccccgaatccatcgagcctccgacccaggtttgccagctgaggagccaaaggagaagtcctctcggaaggtagccgagccagagctgatgggaacccctgatggcacctgctaccctccaccaccagtaccgagacaggcatctccccagaacctggggacccctggcttgctgcacccccagacctcacccctgctgcactcattagtgggccaacatatcctgtccgtccagcagttcaccaaggatcagatgtctcacctgttcaatgtggcacacacactgcgtatgatggtgcagaaggagcggagcctcgacatcctgaaggggaaggtcatggcctccatgttctatgaagtgagcacacggaccagcagctcctttgcagcagccatggcccggctgggaggtgctgtgctcagcttctcggaagccacatcgtccgtccagaagggcgaatccctggctgactccgtgcagaccatgagctgctatgccgacgtcgtcgtgctccggcacccccagcctggagcagtggagctggccgccaagcactgccggaggccagtgatcaatgctggggatggggtcggagagcaccccacccaggccctgctggacatcttcaccatccgtgaggagctgggaactgtcaatggcatgacgatcacgatggtgggtgacctgaagcacggacgcacagtacattccctggcctgcctgctcacccagtatcgtgtcagcctgcgctacgtggcacctcccagcctgcgcatgccacccactgtgcgggccttcgtggcctcccgcggcaccaagcaggaggaattcgagagcattgaggaggcgctgcctgacactgatgtgctctacatgactcgaatccagaaggaacgatttggctctacccaggagtacgaagcttgctttggtcagttcatcctcactccccacatcatgacccgggccaagaagaagatggtggtgatgcacccgatgccccgtgtcaacgagataagcgtggaagtggactcggatccccgcgcagcctacttccgccaggctgagaacggcatgtacatccgcatggctctgttagccaccgtgctgggccgtttctagggcctggcttcctcagcctcttctctttaggcccagctgctgggcaaggaattccagtgcctcctacgggggcagcacacttagatattcctggacatccagatagctcacatgtgctgaccacacttcaggctctggactggagctctctggcatgggggtggggcctcagatgctggggcccagtctgccccatcttcattcctgcaccttaaacctgtacagtcatttttctactgacttaataaacagccgagctgtcccttgaaaaaaaaaaaaaaaaaaaaaaaaaaaaatttttgggccccctggcccccaaaagagcttttttaggacgcatttctcgtgtggggccgcgcgcgggcccccttgtgttctaggtggaaacttgggcccttaagctctggttcccctagaggaagactcctcgggctactggcactagagtgcgccgtggtgtttcctccccctattaaaaaaaagccccgggggggaaaaccgcggagcgtttttcggaaccacttcccagtatgggggagttccagaaggtccctaaagggggagttctatcacgccgggtgtcccaggggagtcccgatatatatttagcgcgcgccgggggggcggg

SEQ ID NO: 52622 - DNA, 1306 bp, Homo sapiens
ccacgcgtccgcggacgcgtgggctgctaccctccaccaccagtaccgagacaggcatctccccagaacctggggacccctggcttgctgcacccccagacctcacccctgctgcactcattagtgggccaacatatcctgtccgtccagcagttcaccaaggatcagatgtctcacctgttcaatgtggcacacacactgcgtatgatggtgcagaaggagcggagcctcgacatcctgaaggggaaggtcatggcctccatgttctatgaagtgagcacacggaccagcagctcctttgcagcagccatggcccggctgggaggtgctgtgctcagcttctcggaagccacatcgtccgtccagaagggcgaatccctggctgactccgtgcagaccatgagctgctatgccgacgtcgtcgtgctccggcacccccagcctggagcagtggagctggccgccaagcactgccggaggccagtgatcaatgctggggatggggtcggagagcaccccacccaggccctgctggacatcttcaccatccgtgaggagctgggaactgtcaatggcatgacgatcacgatggtgggtgacctgaagcacggacgcacagtacattccctggcctgcctgctcacccagtatcgtgtcagcctgcgctacgtggcacctcccagcctgcgcatgccacccactgtgcgggccttcgtggcctcccgcggcaccaagcaggaggaattcgagagcattgaggaggcgctgcctgacactgatgtgctctacatgactcgaatccagaaggaacgatttggctctacccaggagtacgaagcttgctttggtcagttcatcctcactccccacatcatgacccgggccaagaagaagatggtggtgatgcacccgatgccccgtgtcaacgagataagcgtggaagtggactcggatccccgcgcagcctacttccgccaggctgagaacggcatgtacatccgcatggctctgttagccaccgtgctgggccgtttctagggcctggcttcctcagcctcttctctttaggcccagctgctgggcaaggaattccagtgcctcctacgggggcagcacacttagatattcctggacatccagatagctcacatgtgctgaccacacttcaggctctggactggagctctctggcatgggggtggggcctcagatgctggggcccagtctgccccatcttcattcctgcaccttaaacctgtacagtcatttttctactgacttaataaacagccgagctgtcccttga

SEQ ID NO: 52623 - DNA, 5314 bp, Homo sapiens
ctgccgggtcgacgtctagaggagtccccagtatgtgtaacaacgacctatacagggggtgcccctcggatccttgctttggactgtggcctcaagtataatcagatccgatgcctctgccagcgtggggctgaggtcactgtggtaccctgggaccatgcactagacagccaagagtatgagggtctcttcttaagtaatgggcctggtgaccctgcctcctatcccagtgtcgtatccacactgagccgtgttttatctgagcctaatccccgacctgtctttgggatctgcctgggacaccagctattggccttagccattggggccaagacttacaagatgagatatgggaaccgaggccataaccagccctgcttgttggtgggctctgggcgctgctttctgacatcccagaaccatgggtttgctgtggagacagactcactgccagcagactgggctcctctcttcaccaacgccaatgatggttccaatgaaggcattgtgcacaacagcttgcctttcttcagtgtccagtttcacccagagcaccaagctggcccttcagatatggaactgcttttcgatatctttctggaaactgtgaaagaggccacagctgggaaccctgggggccagacagttagagagcggctgactgagcgcctctgtccccctgggattcccactcccggctctggacttccaccaccacgaaaggttctgatcctgggctcagggggcctctccattggccaagctggagaatttgactactcgggctctcaggcaattaaggccctgaaggaggaaaacatccagacgttgctgatcaaccccaatattgccacagtgcagacctcccaggggctggccgacaaggtctattttcttcccataacacctcattatgtaacccaggtgatacgtaatgaacgccccgatggtgtgttactgacttttgggggccagactgctctgaactgtggtgtggagctgaccaaggccggggtgctggctcggtatggggtccgggtcctgggcacaacagtggagaccattgagctgaccgaggatcgacgggcctttgctgccagaatggcagagatcggagagcatgtggccccgagcgaggcaggaaattctcttgaacaggcccaggcagccgctgaacggctggggtaccctgtgctagtgcgtgcagcctttgccgtgggtggcctgggctctggctttgcctctaacagggaggagctctctgctctcgtggccccagcttttgcccataccagccaagtgctagtagacaagtctctgaagggatggaaggagattgagtacgaggtggtgagagacgcctatggcaactgtgtcacggtgtgtaacatggagaacttggacccactgggcatccacactggtgagtccatagtggtggcccctagccagacactgaatgacagggagtatcagctcctgaggcagacagctatcaaggtgacccagcacctgggaattgttggggagtgcaatgtgcagtatgccttgaaccctgagtctgagcagtattacatcattgaagtgaatgccaggctctctcgcagctctgccctggccagtaaggccacaggttatccactggcttatgtggcagccaagctagcattgggcatccctttgcctgagctcaggaactctgtgacagggggtacagcagcctttgaacccagcgtggattattgtgtggtgaagattcctcgatgggaccttagcaagttcctgcgagtcagcacaaagattgggagctgcatgaagagcgttggtgaagtcatgggcattgggcgttcatttgaggaggccttccagaaggccctgcgcatggtggatgagaactgtgtgggctttgatcacacagtgaaaccagtcagcgatatggagttggagactccaacagataagcggatttttgtggtggcagctgctttgtgggctggttattcagtggaccgcctgtatgagctcacacgcatcgaccgctggttcctgcaccgaatgaagcgtatcatcgcacatgcccagctgctagaacaacaccgtggacagcctttgccgccagacctgctgcaacaggccaagtgtcttggcttctcagacaaacagattgcccttgcagttctgagcacagagctggctgttcgcaagctgcgtcaggaactggggatctgtccagcagtgaaacagattgacacagttgcagctgagtggccagcccagacaaattacctatacctaacgtattggggcaccacccatgacctcacctttcgaacacctcatgtcctagtccttggctctggcgtctaccgtattggctctagcgttgaatttgactggtgtgctgtaggctgcatccagcagctccgaaagatgggatataagaccatcatggtgaactataacccagagacagtcagcaccgactatgacatgtgtgatcgactctactttgatgagatctcttttgaggtggtgatggacatctatgagctcgagaaccctgaaggtgtgatcctatccatgggtggacagctgcccaacaacatggccatggcgttgcatcggcagcagtgccgggtgctgggcacctcccctgaagccattgactcggctgagaaccgtttcaagttttcccggctccttgacaccattggtatcagccagcctcagtggagggagctcagtgacctcgagtctgctcgccaattctgccagaccgtggggtacccctgtgtggtgcgcccctcctatgtgctgagcggtgctgctatgaatgtggcctacacggatggagacctggagcgcttcctgagcagcgcagcagccgtctccaaagagcatcccgtggtcatctccaagttcatccaggaggctaaggagattgacgtggatgccgtggcctctgatggtgtggtggcagccatcgccatctctgagcatgtggagaatgcaggtgtgcattcaggtgatgcgacgctggtgacccccccacaagatatcactgccaaaaccctggagcggatcaaagccattgtgcatgctgtgggccaggagctacaggtcacaggacccttcaatctgcagctcattgccaaggatgaccagctgaaagttattgaatgcaacgtacgtgtctctcgctccttccccttcgtttccaagacactgggtgtggacctagtagccttggccacgcgggtcatcatgggggaagaagtggaacctgtggggctaatgactggttctggagtcgtgggagtaaaggtgcctcagttctccttctcccgcttggcgggtgctgacgtggtgttgggtgtggaaatgaccagtactggggaggtggccggctttggggagagccgctgtgaggcatacctcaaggccatgctaagcactggctttaagatccccaagaagaatatcctgctgaccattggcagctataagaacaaaagcgagctgctcccaactgtgcggctactggagagcctgggctacagcctctatgccagtctcggcacagctgacttctacactgagcatggcgtcaaggtaacagctgtggactggcactttgaggaggctgtggatggtgagtgcccaccacagcggagcatcctggagcagctagctgagaaaaactttgagctggtgattaacctgtcaatgcgtggagctgggggccggcgtctctcttcctttgtcaccaagggctaccgcacccgacgcttggccgctgacttctccgtgcccctaatcatcgatatcaagtgcaccaaactctttgtggaggccctaggccagatcgggccagcccctcctttgaaggtgcatgttgactgtatgacctcccaaaagcttgtgcgactgccgggattgattgatgtccatgtgcacctgcgggaaccaggtgggacacataaggaggactttgcttcaggcacagccgctgccctggctgggggtatcaccatggtgtgtgccatgcctaatacccggccccccatcattgacgcccctgctctggccctggcccagaagctggcagaggctggcgcccggtgcgactttgcgctattccttggggcctcgtctgaaaatgcaggaaccttgggcaccgtggccgggtctgcagccgggctgaagctttacctcaatgagaccttctctgagctgcggctggacagcgtggtccagtggatggagcatttcgagacatggccctcccacctccccattgtggctcacgcagagcagcaaaccgtggctgctgtcctcatggtggctcagctcactcagcgctcagtgcacatatgtcacgtggcacggaaggaggagatcctgctaattaaagctgcaaaggcacggggcttgccagtgacctgcgaggtggctccccaccacctgttcctaagccatgatgacctggagcgcctggggcctgggaagggggaggtccggcctgagcttggctcccgccaggatgtggaagccctgtgggagaacatggctgtcatcgactgctttgcctcagaccatgctccccataccttggaggagaagtgtgggtccaggcccccacctgggttcccagggttagagaccatgctgccactactcctgacggctgtaagcgagggccggctcagcctggacgacctgctgcagcgattgcaccacaatcctcggcgcatctttcacctgcctccgcaggaggacacctatgtggaggtggatctggagcatgagtggacaattcccagccacatgcccttctccaaggcccactggacaccttttgaagggcagaaagtgaagggcaccgtccgccgtgtggtcctgcgaggggaggttgcctatatcgatgggcaggttctggtacccccgggctatggacaggatgtacggaagtggccacagggggctgttcctcagctcccaccctcagcccctgccactagtgagatgaccacggtatccacactactgggctagggggctgggaggtgttagtctcagggcaggatgaacagcttgaacattttcattggtggttcaggaacaattggggttttcttgagggactgaatttgaagtggggttgggtcaattatttttttaaaatgctgggccaggccagatgtggtggctcacacttgtaatcccagcactttgggaggccaaggcaggcggatcatctgaggtcaggagtttaagaccagcctagccaacatggtgaaaccccatctctact

SEQ ID NO: 52624 - DNA, 3556 bp, Homo sapiens
ctgccgggtcgacgtctagaggagtccccagtatgtgtaacaacgacctatacagggggtgcccctcggatccttgctttggactgtggcctcaagtataatcagatccgatgcctctgccagcgtggggctgaggtcactgtggtaccctgggaccatgcactagacagccaagagtatgagggtctcttcttaagtaatgggcctggtgaccctgcctcctatcccagtgtcgtatccacactgagccgtgttttatctgagcctaatccccgacctgtctttgggatctgcctgggacaccagctattggccttagccattggggccaagacttacaagatgagatatgggaaccgaggccataaccagccctgcttgttggtgggctctgggcgctgctttctgacatcccagaaccatgggtttgctgtggagacagactcactgccagcagactgggctcctctcttcaccaacgccaatgatggttccaatgaaggcattgtgcacaacagcttgcctttcttcagtgtccagtttcacccagagcaccaagctggcccttcagatatggaactgcttttcgatatctttctggaaactgtgaaagaggccacagctgggaaccctgggggccagacagttagagagcggctgactgagcgcctctgtccccctgggattcccactcccggctctggacttccaccaccacgaaaggttctgatcctgggctcagggggcctctccattggccaagctggagaatttgactactcgggctctcaggcaattaaggccctgaaggaggaaaacatccagacgttgctgatcaaccccaatattgccacagtgcagacctcccaggggctggccgacaaggtctattttcttcccataacacctcattatgtaacccaggtgatacgtaatgaacgccccgatggtgtgttactgacttttgggggccagactgctctgaactgtggtgtggagctgaccaaggccggggtgctggctcggtatggggtccgggtcctgggcacaacagtggagaccattgagctgaccgaggatcgacgggcctttgctgccagaatggcagagatcggagagcatgtggccccgagcgaggcaggaaattctcttgaacaggcccaggcagccgctgaacggctggggtaccctgtgctagtgcgtgcagcctttgccgtgggtggcctgggctctggctttgcctctaacagggaggagctctctgctctcgtggccccagcttttgcccataccagccaagtgctagtagacaagtctctgaagggatggaaggagattgagtacgaggtggtgagagacgcctatggcaactgtgtcacggtgtgtaacatggagaacttggacccactgggcatccacactggtgagtccatagtggtggcccctagccagacactgaatgacagggagtatcagctcctgaggcagacagctatcaaggtgacccagcacctgggaattgttggggagtgcaatgtgcagtatgccttgaaccctgagtctgagcagtattacatcattgaagtgaatgccaggctctctcgcagctctgccctggccagtaaggccacaggttatccactggcttatgtggcagccaagctagcattgggcatccctttgcctgagctcaggaactctgtgacagggggtacagcagcctttgaacccagcgtggattattgtgtggtgaagattcctcgatgggaccttagcaagttcctgcgagtcagcacaaagattgggagctgcatgaagagcgttggtgaagtcatgggcattgggcgttcatttgaggaggccttccagaaggccctgcgcatggtggatgagaactgtgtgggctttgatcacacagtgaaaccagtcagcgatatggagttggagactccaacagataagcggatttttgtggtggcagctgctttgtgggctggttattcagtggaccgcctgtatgagctcacacgcatcgaccgctggttcctgcaccgaatgaagcgtatcatcgcacatgcccagctgctagaacaacaccgtggacagcctttgccgccagacctgctgcaacaggccaagtgtcttggcttctcagacaaacagattgcccttgcagttctgagcacagagctggctgttcgcaagctgcgtcaggaactggggatctgtccagcagtgaaacagattgacacagttgcagctgagtggccagcccagacaaattacctatacctaacgtattggggcaccacccatgacctcacctttcgaacacctcatgtcctagtccttggctctggcgtctaccgtattggctctagcgttgaatttgactggtgtgctgtaggctgcatccagcagctccgaaagatgggatataagaccatcatggtgaactataacccagagacagtcagcaccgactatgacatgtgtgatcgactctactttgatgagatctcttttgaggtggtgatggacatctatgagctcgagaaccctgaaggtgtgatcctatccatgggtggacagctgcccaacaacatggccatggcgttgcatcggcagcagtgccgggtgctgggcacctcccctgaagccattgactcggctgagaaccgtttcaagttttcccggctccttgacaccattggtatcagccagcctcagtggagggagctcagtgacctcgagtctgctcgccaattctgccagaccgtggggtacccctgtgtggtgcgcccctcctatgtgctgagcggtgctgctatgaatgtggcctacacggatggagacctggagcgcttcctgagcagcgcagcagccgtctccaaagagcatcccgtggtcatctccaagttcatccaggaggctaaggagattgacgtggatgccgtggcctctgatggtgtggtggcagccatcgccatctctgagcatgtggagaatgcaggtgtgcattcaggtgatgcgacgctggtgacccccccacaagatatcactgccaaaaccctggagcggatcaaagccattgtgcatgctgtgggccaggagctacaggtcacaggacccttcaatctgcagctcattgccaaggatgaccagctgaaagttattgaatgcaacgtacgtgtctctcgctccttccccttcgtttccaagacactgggtgtggacctagtagccttggccacgcgggtcatcatgggggaagaagtggaacctgtggggctaatgactggttctggagtcgtgggagtaaaggtgcctcagttctccttctcccgcttggcgggtgctgacgtggtgttgggtgtggaaatgaccagtactggggaggtggccggctttggggagagccgctgtgaggcatacctcaaggccatgctaagcactggctttaagatccccaagaagaaaccaaccctgccaacaccttgatcttggacttccagcctccaaaactatgagaaataaatttctattgtttaagtca

SEQ ID NO: 52625 - DNA, 7193 bp, Homo sapiens
  misc_feature (3216)..(3216): n is a, c, g, or t
gcgcccgcccgccggggtctcggcgatcgctgctcctcctcctccttctcctcctcttttttctcctccgcctcctccccccgccgcctcgccaccgccgcggctagggctggaggcgccgctgtcattcctgtgccggaggaaccggcgctgccggtgcctgggggtcggggcgcgggcgaagccgggccgcggaggacacaacaggtagagccgggggtgcccggccgcgcgccccccgcgcatcatgcagctctttgtcacctctctcgcccccaggccaaaatcctgagcatgatggaagacaataagcagctcgcgctccgcatcgatggggcggtccagtcggccagccaggaggtgaccaacctgcgagccgaactcacggccaccaaccggagactggcggaactgagcggcggcggcggccccggcccgggcccgggagccgcggccagcgcctcggcggcgggggactcggcggcgacgaacatggagaacccccagcttggagcgcaagtgctcctgcgggaagaagtgtcgcggctccaggaggaagttcaccttctccggcagatgaaggagatgttggcgaaggacctggaggagtcgcagggcggcaagtcctctgaggtcctctcggccaccgagctcagggtccagctggcccagaaggagcaggagctagccagagccaaagaagccttgcaggccatgaaagctgatcggaagcgcttaaagggcgagaagacagacctggtgagccagatgcagcagctgtatgccacactggagagccgcgaggagcagctccgagacttcatccgcaactatgagcagcaccgcaaggagagcgaggatgcggtcaaagcgctggccaaggagaaggacctgctggagcgtgagaagtgggagctgcggcgccaagccaaggaggccacagaccacgccacggcactgcgctcccagctggacctcaaggacaaccggatgaaggagctggaggccgagctggccatggccaaacagtccttagctacgctgaccaaggacgtccccaagcggcattccctcgccatgccgggcgagacggtgctcaatggcaaccaggagtgggtggtgcaggcggacctcccgctgaccgcagccatccggcagagtcaacagactctctaccactcacacccccctcaccctgcggaccggcaagcggtcagggtgagcccctgccactcccggcagccctctgtcatctccgacgcatctgccgccgaaggcgaccggtcgtccacaccgagcgacatcaactcccctcgacaccggacacactccctctgcaacgtaaggccagcagcagcggggcctgggcccctgggccctgcccagaaactgcaggggcgggggtggcggggtgaagccatactcgctgtttcctctcgtccacccagggagcactctggcgaatgcatttcctgttctgttctttccttttgcaagaagcgatggatgtggggagaaaaaggaatgaggcccgtttgctccttgtgtccgggagggtgaggagaatccagaggaagcgggcctgggtcggccgcaggcacagcctggaactctgccccagtgggccctgtctgggaccgtgggcttctcctcccacacattaccttccagagctcagggcctccccagcacctcctcatttccctttagagccagctctctatcctgacccaggagtcttggcatgaattgcctctggagaggcttgtgaatatggtctaagtttgtttcctttgtttatttcatcaaacactttttgattgcatactgggcaccagctcccaggaggcaaaggccctagctgcctagctcttgatgactagtggggcagacagatgggctctgcaacagtgtgggagtaaattgaaggtgggttgagcttctgaggacagttggaagccatgtcgaggctctaacatgaaatattggggtctgggtgtggggaccaccttgaatttttgttttatcacacagttggtaatgcagaggctcccctctgccatatcctgaagacagacatcatagggttagatcctcaaatgcacgagacggctttttccaaaactcagttaatgtcactttattaaccagcgaaatagataataaaaaagaaatgaggtgaacacattggacaaaaccattacttgccagtgacatgattctctacctggagaactcaagagaataacttgaaaagctattagaatgaataataagcatgtacataacagtgttgcttggaaatcagtgtgtaaaaatcaatcactttcctatagatgagtcgtaattatggaaccatttttttcaatccacaataatgaaaagtgcttataaaaatagctaagagtaaacttcagagaagctgcctcagtctgctcaggtgggcggcagagattgctggcccggggactttagatggcctcctcagagtaggaaggtcatttgcagcctggggccctgctcaggcctgggattctcttttttattgttttattttatttatttgtatgtgtgtgtgatggagtttcactcttgtcacccaggatggagtgcagtgacgcagtctcagctcactgcaaccaacaccttccaggctcaaacaattctcctgcctcagcctcccgagcagctggcattacagatgcctgccatcacacccggctaatttttgtatttttagtagagatgagatttcaccatgttggccaggctggtcttcaactcctgacctcaggcgatctgcccacctcagtctcccaaagtgctgggattatagacatgagccactgcacctggcgggattctctgttttatactggtgctttgaggaagcagtatgttcttctcttgtccccagaagagaatcctagtgacaaagtctatcttgactaacagaaccaaggcaaggaaggtgggccactggaggggtctctgacatccattccctgatcctgaaggaccactgtggagttatacctacagccagcagtgtccctgcaccattctcatcccagttgagaataccttccccccacggccatattttgtcttctcgtggtgggcccatggggactctggcagcagaaatgctgctggaaaaaccccattctgcagaaggagttctccaaaggcctcttgaattgcatttgacccagncctagtcttttgcccaccatagccttggcacattcctgctgccaggaaatgggtgctttgataagccagttgtctgcatacaggcgtttcagtgagcaggccccattctctttacccatagatttggcaaagatgttcctatccagagtggaactatcttagctgccttcagaatggattctgtttgcaaaccttgagactaaagactaaactaccattcattaattccctcacttcctcaaccctttttatccccccatctcaacaggtgtgcatgcaggtaagccaggaagagcccaaaaatagctacaggtaaccctttgccttgggcatctgacgtccaccagcaagaatagtgcagcctggactaatgactgcctcatcctctcacactctggccactaatttagagcaaaagtaggaactcagcatagagaggttggagaaggttgacggaccttggcattatgcttgcaattccagaaataaccaccaggagtctccctagtaatgactgttttgatccaaaggatctgtgggctccagacagggcagactgattctgggatgtagtgaaggcttttgtacacctgtaggctattaagggttccctccacacccacgtaaggcagggctggcaacacaatggaaatgtcctacctgcccatcctagggacctgtcgtctgaggctccctaggaaaaagggaaggagttcagacccctcctggggcagcccaaagctcaggaccaagtatgcagttaccctggagctcctgcctggaaggagcactgtgccaggaggaatctgacagcccccaattggagctgtagctctgcatccaattagctccacggtagtggactgtctgctgcctctcttgatatctgtgaatagggctaacgagtcctgcctgcccctgcgcaaactaagagattcattgtgtcggttgtgggggaagctagaggctacgtggtctcccaagtttgtttctgtcccaaaattctctattttgtgctttttctataaaagtacatttctttatgaaaagcaccaagtctaaccaagctctagctctaactcagaggacagactgggacaggaacttagacgccctggagtggctaatttgttggtcagaagatgctgggggttgagaggccagactgggcaggagaggaccccaggaactctagggaaactccaggccccatcaataagccatctgggggtatctgcttcaggagatggggggtgggctccccactgcagaggcagggtggcccctgagagatggcatccttccacggaaggccccacaccgcacgggccgcctctgctctcctgtgtcacctgtctctgctgtttcatcttcctcttctcctctggctacagggcgacagtcccggcccagttcagaagaacctgcacaaccctattgtacagtcactagaggatcttgaagaccaaaaacggaaaaagaagaaagagaagatgggattcggctccatctcccgcgtcttcgccagagggaagcagcggaagtccctcgaccccggcctctttgatggtaccgcccctgattattacatagaggaggacgcggactggtgatacgcgctcccctgcgcctgctgcccgcaggcgtgtctgtgcgtgtgggcgtgtgtgcaagcgagcgtgggtgcgcgtgtggccgtgcgtggggtgcgtgtgcacgtgtgcgctggcacacatgggtgctgggtgtggccgagcgcctctaacaagtgaaaacacgagtgtgaacctctctcccctgcgtcgccacctctgtaattgatgtacataccgcaaaccgtgtgtgaacctgtcaactctctgtcgtctttggagcgatacagttgtgttgttaatctggtttattatttttcttcagtgtttggtttttctttttctttttgtttggttcgtcggtttgtttttgtttttgtttttttccccctttctcctcccctcctcctttttatgaaacttgaaaacttgaaggactgctgtgtatttgtaaataacaaaactattgtgcactctgtgcttgtaaatgtccctcgtccaaaccgctactcctggagcccgtctggcagaggatgtggtctgtttttgatgtcccccctcccgcccccctggtgtgaacgtgtgggaccagaccctgtcctgggggtgcgcccaagtcactttaaccacaaaacgccatcgtcgtcagggtaagctctgctctctacaaagactcgcgagccgggccaaggggccttgtcttggctgggtttgtcagaggtcaaaccggctcttttaaacggcctaccagtttttaaattgcattgccgtttctttctttatgaaaaaaaagaaaaaaagaaaattgtttcatttaatttatttgcacaaatgctgaaaacttattctatctaaattattacataaatattggaatgtctatttttccatggggtgggcgggaggtgggtgtctctgttgacttgtctgttctgttaccatgctgctacccaactgtgcaaagtagtttagggtggccagaacccagggaccattggatttcaaagcttgctttttctgttggttcttctctctccttctctctctgtctctcccattctcctgcccatgcatgaaaggatcctccaccttcttcccacccagagctccctccaggcctttctctatatatttatttatctgacatacagaacacgactttagtgagcagagtgctgacagtcatggtccccttctttgggtctgtcttttgagagaggttgagttcagggcaagacagcctgccacacatccaagggtacgaccagtgggaccctggcctgagtctgttctccgaggggcctccagcagcttctgttcctccctgcagctgtgtctttcttgtcctgggtttaggatgcaggtgggccaggcaggtgttgttaggggaggcacccacttcaaaaggagggccacagtggggacacagagtccagcacctgagccctccaccctccccattctggttggttccatcagccacacttagaatctcccaggatcccttggactccgtcccccaacttgtcacagcagcctgagcctacccaccccaggagacaagagctggcaggaacatctgcctatatggggggtggcgttggccccaaagaggcttcaccagcaaaggaactgtgtgtattttaatgccaggggacggaggatgtgtgagctgttcagcaaggtctgcccaaggcctaaaactcaatttccttattcttttgcttctgctcgtccttaacaactaacagctcaacccacacctctagacaacagtagtcgtgctttctgctaacggtgacattttcagctcttaaaaagaagcaaggagattttcaaatgctagagtatctctatcagaaggcataggacattgtgtccaaagtctcaagaacaaacaacactttccttctgacctggtccaaaagtcagcaaacagcaagcaggcagaggccctcataaggacttttctgtcctcctttgaccaaactgtttaaccgagcctaggggtgacggggagcgacccaagctggcatctttctctacggagacagattttagaaaatacttttcttgcccatgaatttcttttctggttgatttttatcattttccctttacttacaagaaaataagattgcaaccactcctgctaatgatttagtagttccttttcatttcagtttttgtaaattaggagataattctaagagttactaaaggatgatttatttaagagaactacgtcaaatagcgaatgagttatgggtaacattagacgaaaataacctttcccgtgggaaaggtttctcgaaggcatggatgcaaatataaaatattaaaaaaaatctaaataaagcttattttaaaatatgaaaaaaaaaa

SEQ ID NO: 52626 - DNA, 7140 bp, Homo sapiens
  misc_feature (3216)..(3216): n is a, c, g, or t
gcgcccgcccgccggggtctcggcgatcgctgctcctcctcctccttctcctcctcttttttctcctccgcctcctccccccgccgcctcgccaccgccgcggctagggctggaggcgccgctgtcattcctgtgccggaggaaccggcgctgccggtgcctgggggtcggggcgcgggcgaagccgggccgcggaggacacaacaggtagagccgggggtgcccggccgcgcgccccccgcgcatcatgcagctctttgtcacctctctcgcccccaggccaaaatcctgagcatgatggaagacaataagcagctcgcgctccgcatcgatggggcggtccagtcggccagccaggaggtgaccaacctgcgagccgaactcacggccaccaaccggagactggcggaactgagcggcggcggcggccccggcccgggcccgggagccgcggccagcgcctcggcggcgggggactcggcggcgacgaacatggagaacccccagcttggagcgcaagtgctcctgcgggaagaagtgtcgcggctccaggaggaagttcaccttctccggcagatgaaggagatgttggcgaaggacctggaggagtcgcagggcggcaagtcctctgaggtcctctcggccaccgagctcagggtccagctggcccagaaggagcaggagctagccagagccaaagaagccttgcaggccatgaaagctgatcggaagcgcttaaagggcgagaagacagacctggtgagccagatgcagcagctgtatgccacactggagagccgcgaggagcagctccgagacttcatccgcaactatgagcagcaccgcaaggagagcgaggatgcggtcaaagcgctggccaaggagaaggacctgctggagcgtgagaagtgggagctgcggcgccaagccaaggaggccacagaccacgccacggcactgcgctcccagctggacctcaaggacaaccggatgaaggagctggaggccgagctggccatggccaaacagtccttagctacgctgaccaaggacgtccccaagcggcattccctcgccatgccgggcgagacggtgctcaatggcaaccaggagtgggtggtgcaggcggacctcccgctgaccgcagccatccggcagagtcaacagactctctaccactcacacccccctcaccctgcggaccggcaagcggtcagggtgagcccctgccactcccggcagccctctgtcatctccgacgcatctgccgccgaaggcgaccggtcgtccacaccgagcgacatcaactcccctcgacaccggacacactccctctgcaacgtaaggccagcagcagcggggcctgggcccctgggccctgcccagaaactgcaggggcgggggtggcggggtgaagccatactcgctgtttcctctcgtccacccagggagcactctggcgaatgcatttcctgttctgttctttccttttgcaagaagcgatggatgtggggagaaaaaggaatgaggcccgtttgctccttgtgtccgggagggtgaggagaatccagaggaagcgggcctgggtcggccgcaggcacagcctggaactctgccccagtgggccctgtctgggaccgtgggcttctcctcccacacattaccttccagagctcagggcctccccagcacctcctcatttccctttagagccagctctctatcctgacccaggagtcttggcatgaattgcctctggagaggcttgtgaatatggtctaagtttgtttcctttgtttatttcatcaaacactttttgattgcatactgggcaccagctcccaggaggcaaaggccctagctgcctagctcttgatgactagtggggcagacagatgggctctgcaacagtgtgggagtaaattgaaggtgggttgagcttctgaggacagttggaagccatgtcgaggctctaacatgaaatattggggtctgggtgtggggaccaccttgaatttttgttttatcacacagttggtaatgcagaggctcccctctgccatatcctgaagacagacatcatagggttagatcctcaaatgcacgagacggctttttccaaaactcagttaatgtcactttattaaccagcgaaatagataataaaaaagaaatgaggtgaacacattggacaaaaccattacttgccagtgacatgattctctacctggagaactcaagagaataacttgaaaagctattagaatgaataataagcatgtacataacagtgttgcttggaaatcagtgtgtaaaaatcaatcactttcctatagatgagtcgtaattatggaaccatttttttcaatccacaataatgaaaagtgcttataaaaatagctaagagtaaacttcagagaagctgcctcagtctgctcaggtgggcggcagagattgctggcccggggactttagatggcctcctcagagtaggaaggtcatttgcagcctggggccctgctcaggcctgggattctcttttttattgttttattttatttatttgtatgtgtgtgtgatggagtttcactcttgtcacccaggatggagtgcagtgacgcagtctcagctcactgcaaccaacaccttccaggctcaaacaattctcctgcctcagcctcccgagcagctggcattacagatgcctgccatcacacccggctaatttttgtatttttagtagagatgagatttcaccatgttggccaggctggtcttcaactcctgacctcaggcgatctgcccacctcagtctcccaaagtgctgggattatagacatgagccactgcacctggcgggattctctgttttatactggtgctttgaggaagcagtatgttcttctcttgtccccagaagagaatcctagtgacaaagtctatcttgactaacagaaccaaggcaaggaaggtgggccactggaggggtctctgacatccattccctgatcctgaaggaccactgtggagttatacctacagccagcagtgtccctgcaccattctcatcccagttgagaataccttccccccacggccatattttgtcttctcgtggtgggcccatggggactctggcagcagaaatgctgctggaaaaaccccattctgcagaaggagttctccaaaggcctcttgaattgcatttgacccagncctagtcttttgcccaccatagccttggcacattcctgctgccaggaaatgggtgctttgataagccagttgtctgcatacaggcgtttcagtgagcaggccccattctctttacccatagatttggcaaagatgttcctatccagagtggaactatcttagctgccttcagaatggattctgtttgcaaaccttgagactaaagactaaactaccattcattaattccctcacttcctcaaccctttttatccccccatctcaacaggtgtgcatgcaggtaagccaggaagagcccaaaaatagctacaggtaaccctttgccttgggcatctgacgtccaccagcaagaatagtgcagcctggactaatgactgcctcatcctctcacactctggccactaatttagagcaaaagtaggaactcagcatagagaggttggagaaggttgacggaccttggcattatgcttgcaattccagaaataaccaccaggagtctccctagtaatgactgttttgatccaaaggatctgtgggctccagacagggcagactgattctgggatgtagtgaaggcttttgtacacctgtaggctattaagggttccctccacacccacgtaaggcagggctggcaacacaatggaaatgtcctacctgcccatcctagggacctgtcgtctgaggctccctaggaaaaagggaaggagttcagacccctcctggggcagcccaaagctcaggaccaagtatgcagttaccctggagctcctgcctggaaggagcactgtgccaggaggaatctgacagcccccaattggagctgtagctctgcatccaattagctccacggtagtggactgtctgctgcctctcttgatatctgtgaatagggctaacgagtcctgcctgcccctgcgcaaactaagagattcattgtgtcggttgtgggggaagctagaggctacgtggtctcccaagtttgtttctgtcccaaaattctctattttgtgctttttctataaaagtacatttctttatgaaaagcaccaagtctaaccaagctctagctctaactcagaggacagactgggacaggaacttagacgccctggagtggctaatttgttggtcagaagatgctgggggttgagaggccagactgggcaggagaggaccccaggaactctagggaaactccaggccccatcaataagccatctgggggtatctgcttcaggagatggggggtgggctccccactgcagaggcagggtggcccctgagagatggcatccttccacggaaggccccacaccgcacgggccgcctctgctctcctgtgtcacctgtctctgctgtttcatcttcctcttctcctctggctacagggcgacagtcccggcccagttcagaagaacctgcacaaccctattgtacagtcactagaggatcttgaagaccaaaaacggaaaaagaagaaagagaagatgggattcggctccatctcccgcgtcttcgccagagggaagcagcggaagtccctcgaccccggcctctttgatggtaccgcccctgattattacatagaggaggacgcggactggtgatacgcgctcccctgcgcctgctgcccgcaggcgtgtctgtgcgtgtgggcgtgtgtgcaagcgagcgtgggtgcgcgtgtggccgtgcgtggggtgcgtgtgcacgtgtgcgctggcacacatgggtgctgggtgtggccgagcgcctctaacaagtgaaaacacgagtgtgaacctctctcccctgcgtcgccacctctgtaattgatgtacataccgcaaaccgtgtgtgaacctgtcaactctctgtcgtctttggagcgatacagttgtgttgttaatctggtttattatttttcttcagtgtttggtttttctttttctttttgtttggttcgtcggtttgtttttgtttttgtttttttccccctttctcctcccctcctcctttttatgaaacttgaaaacttgaaggactgctgtgtatttgtaaataacaaaactattgtgcactctgtgcttgtaaatgtccctcgtccaaaccgctactcctggagcccgtctggcagaggatgtggtctgtttttgatgtcccccctcccgcccccctggtgtgaacgtgtgggaccagaccctgtcctgggggtgcgcccaagtcactttaaccacaaaacgccatcgtcgtcagggtaagctctgctctctacaaagactcgcgagccgggccaaggggccttgtcttggctgggtttgtcagaggtcaaaccggctcttttaaacggcctaccagtttttaaattgcattgccgtttctttctttatgaaaaaaaagaaaaaaagaaaattgtttcatttaatttatttgcacaaatgctgaaaacttattctatctaaattattacataaatattggaatgtctatttttccatggggtgggcgggaggtgggtgtctctgttgacttgtctgttctgttaccatgctgctacccaactgtgcaaagtagtttagggtggccagaacccagggaccattggatttcaaagcttgctttttctgttggttcttctctctccttctctctctgtctctcccattctcctgcccatgcatgaaaggatcctccaccttcttcccacccagagctccctccaggcctttctctatatatttatttatctgacatacagaacacgactttagtgagcagagtgctgacagtcatggtccccttctttgggtctgtcttttgagagaggttgagttcagggcaagacagcctgccacacatccaagggtacgaccagtgggaccctggcctgagtctgttctccgaggggcctccagcagcttctgttcctccctgcagctgtgtctttcttgtcctgggtttaggatgcaggtgggccaggcaggtgttgttaggggaggcacccacttcaaaaggagggccacagtggggacacagagtccagcacctgagccctccaccctccccattctggttggttccatcagccacacttagaatctcccaggatcccttggactccgtcccccaacttgtcacagcagcctgagcctacccaccccaggagacaagagctggcaggaacatctgcctatatggggggtggcgttggccccaaagaggcttcaccagcaaaggaactgtgtgtattttaatgccaggggacggaggatgtgtgagctgttcagcaaggtctgcccaaggcctaaaactcaatttccttattcttttgcttctgctcgtccttaacaactaacagctcaacccacacctctagacaacagtagtcgtgctttctgctaacggtgacattttcagctcttaaaaattgtgtccaaagtctcaagaacaaacaacactttccttctgacctggtccaaaagtcagcaaacagcaagcaggcagaggccctcataaggacttttctgtcctcctttgaccaaactgtttaaccgagcctaggggtgacggggagcgacccaagctggcatctttctctacggagacagattttagaaaatacttttcttgcccatgaatttcttttctggttgatttttatcattttccctttacttacaagaaaataagattgcaaccactcctgctaatgatttagtagttccttttcatttcagtttttgtaaattaggagataattctaagagttactaaaggatgatttatttaagagaactacgtcaaatagcgaatgagttatgggtaacattagacgaaaataacctttcccgtgggaaaggtttctcgaaggcatggatgcaaatataaaatattaaaaaaaatctaaataaagcttattttaaaatatgaaaaaaaaaa

SEQ ID NO: 52627 - DNA, 3650 bp, Homo sapiens
agggagagggaaggtcaggcttgcctcctgttcacaaggacaacctctgtctcccttgtggcggcttctatgaaggtggggactccaggctttctctcgtctgctttttggatgccttcaagagaggccagttagaggatatcaattgtggcaattccccagagccctcatcagatggcattagcccgtcatgtgctgcagtggcacccagtttggaggaaattcggaaccagaagagtgtgacagtgctcctgcgggaagaagtgtcgcggctccaggaggaagttcaccttctccggcagatgaaggagatgttggcgaaggacctggaggagtcgcagggcggcaagtcctctgaggtcctctcggccaccgagctcagggtccagctggcccagaaggagcaggagctagccagagccaaagaagccttgcaggccatgaaagctgatcggaagcgcttaaagggcgagaagacagacctggtgagccagatgcagcagctgtatgccacactggagagccgcgaggagcagctccgagacttcatccgcaactatgagcagcaccgcaaggagagcgaggatgcggtcaaagcgctggccaaggagaaggacctgctggagcgtgagaagtgggagctgcggcgccaagccaaggaggccacagaccacgccacggcactgcgctcccagctggacctcaaggacaaccggatgaaggagctggaggccgagctggccatggccaaacagtccttagctacgctgaccaaggacgtccccaagcggcattccctcgccatgccgggcgagacggtgctcaatggcaaccaggagtgggtggtgcaggcggacctcccgctgaccgcagccatccggcagagtcaacagactctctaccactcacacccccctcaccctgcggaccggcaagcggtcagggtgagcccctgccactcccggcagccctctgtcatctccgacgcatctgccgccgaaggcgaccggtcgtccacaccgagcgacatcaactcccctcgacaccggacacactccctctgcaacggcgacagtcccggcccagttcagaagaacctgcacaaccctattgtacagtcactagaggatcttgaagaccaaaaacggaaaaagaagaaagagaagatgggattcggctccatctcccgcgtcttcgccagagggaagcagcggaagtccctcgaccccggcctctttgatggtaccgcccctgattattacatagaggaggacgcggactggtgatacgcgctcccctgcgcctgctgcccgcaggcgtgtctgtgcgtgtgggcgtgtgtgcaagcgagcgtgggtgcgcgtgtggccgtgcgtggggtgcgtgtgcacgtgtgcgctggcacacatgggtgctgggtgtggccgagcgcctctaacaagtgaaaacacgagtgtgaacctctctcccctgcgtcgccacctctgtaattgatgtacataccgcaaaccgtgtgtgaacctgtcaactctctgtcgtctttggagcgatacagttgtgttgttaatctggtttattatttttcttcagtgtttggtttttctttttctttttgtttggttcgtcggtttgtttttgtttttgtttttttccccctttctcctcccctcctcctttttatgaaacttgaaaacttgaaggactgctgtgtatttgtaaataacaaaactattgtgcactctgtgcttgtaaatgtccctcgtccaaaccgctactcctggagcccgtctggcagaggatgtggtctgtttttgatgtcccccctcccgcccccctggtgtgaacgtgtgggaccagaccctgtcctgggggtgcgcccaagtcactttaaccacaaaacgccatcgtcgtcagggtaagctctgctctctacaaagactcgcgagccgggccaaggggccttgtcttggctgggtttgtcagaggtcaaaccggctcttttaaacggcctaccagtttttaaattgcattgccgtttctttctttatgaaaaaaaagaaaaaaagaaaattgtttcatttaatttatttgcacaaatgctgaaaacttattctatctaaattattacataaatattggaatgtctatttttccatggggtgggcgggaggtgggtgtctctgttgacttgtctgttctgttaccatgctgctacccaactgtgcaaagtagtttagggtggccagaacccagggaccattggatttcaaagcttgctttttctgttggttcttctctctccttctctctctgtctctcccattctcctgcccatgcatgaaaggatcctccaccttcttcccacccagagctccctccaggcctttctctatatatttatttatctgacatacagaacacgactttagtgagcagagtgctgacagtcatggtccccttctttgggtctgtcttttgagagaggttgagttcagggcaagacagcctgccacacatccaagggtacgaccagtgggaccctggcctgagtctgttctccgaggggcctccagcagcttctgttcctccctgcagctgtgtctttcttgtcctgggtttaggatgcaggtgggccaggcaggtgttgttaggggaggcacccacttcaaaaggagggccacagtggggacacagagtccagcacctgagccctccaccctccccattctggttggttccatcagccacacttagaatctcccaggatcccttggactccgtcccccaacttgtcacagcagcctgagcctacccaccccaggagacaagagctggcaggaacatctgcctatatggggggtggcgttggccccaaagaggcttcaccagcaaaggaactgtgtgtattttaatgccaggggacggaggatgtgtgagctgttcagcaaggtctgcccaaggcctaaaactcaatttccttattcttttgcttctgctcgtccttaacaactaacagctcaacccacacctctagacaacagtagtcgtgctttctgctaacggtgacattttcagctcttaaaaagaagcaaggagattttcaaatgctagagtatctctatcagaaggcataggacattgtgtccaaagtctcaagaacaaacaacactttccttctgacctggtccaaaagtcagcaaacagcaagcaggcagaggccctcataaggacttttctgtcctcctttgaccaaactgtttaaccgagcctaggggtgacggggagcgacccaagctggcatctttctctacggagacagattttagaaaatacttttcttgcccatgaatttcttttctggttgatttttatcattttccctttacttacaagaaaataagattgcaaccactcctgctaatgatttagtagttccttttcatttcagtttttgtaaattaggagataattctaagagttactaaaggatgatttatttaagagaactacgtcaaatagcgaatgagttatgggtaacattagacgaaaataacctttcccgtgggaaaggtttctcgaaggcatggatgcaaatataaaatattaaaaaaaatctaaataaagcttattttaaaatatgaaaaaaaaaa

SEQ ID NO: 52628 - DNA, 3870 bp, Homo sapiens
gcgcccgcccgccggggtctcggcgatcgctgctcctcctcctccttctcctcctcttttttctcctccgcctcctccccccgccgcctcgccaccgccgcggctagggctggaggcgccgctgtcattcctgtgccggaggaaccggcgctgccggtgcctgggggtcggggcgcgggcgaagccgggccgcggaggacacaacaggtagagccgggggtgcccggccgcgcgccccccgcgcatcatgcagctctttgtcacctctctcgcccccaggccaaaatcctgagcatgatggaagacaataagcagctcgcgctccgcatcgatggggcggtccagtcggccagccaggaggtgaccaacctgcgagccgaactcacggccaccaaccggagactggcggaactgagcggcggcggcggccccggcccgggcccgggagccgcggccagcgcctcggcggcgggggactcggcggcgacgaacatggagaacccccagcttggagcgcaagtgctcctgcgggaagaagtgtcgcggctccaggaggaagttcaccttctccggcagatgaaggagatgttggcgaaggacctggaggagtcgcagggcggcaagtcctctgaggtcctctcggccaccgagctcagggtccagctggcccagaaggagcaggagctagccagagccaaagaagccttgcaggccatgaaagctgatcggaagcgcttaaagggcgagaagacagacctggtgagccagatgcagcagctgtatgccacactggagagccgcgaggagcagctccgagacttcatccgcaactatgagcagcaccgcaaggagagcgaggatgcggtcaaagcgctggccaaggagaaggacctgctggagcgtgagaagtgggagctgcggcgccaagccaaggaggccacagaccacgccacggcactgcgctcccagctggacctcaaggacaaccggatgaaggagctggaggccgagctggccatggccaaacagtccttagctacgctgaccaaggacgtccccaagcggcattccctcgccatgccgggcgagacggtgctcaatggcaaccaggagtgggtggtgcaggcggacctcccgctgaccgcagccatccggcagagtcaacagactctctaccactcacacccccctcaccctgcggaccggcaagcggtcagggtgagcccctgccactcccggcagccctctgtcatctccgacgcatctgccgccgaaggcgaccggtcgtccacaccgagcgacatcaactcccctcgacaccggacacactccctctgcaacggcgacagtcccggcccagttcagaagaacctgcacaaccctattgtacagtcactagaggatcttgaagaccaaaaacggaggaagcagcggaagtccctcgaccccggcctctttgatggtaccgcccctgattattacatagaggaggacgcggactggtgatacgcgctcccctgcgcctgctgcccgcaggcgtgtctgtgcgtgtgggcgtgtgtgcaagcgagcgtgggtgcgcgtgtggccgtgcgtggggtgcgtgtgcacgtgtgcgctggcacacatgggtgctgggtgtggccgagcgcctctaacaagtgaaaacacgagtgtgaacctctctcccctgcgtcgccacctctgtaattgatgtacataccgcaaaccgtgtgtgaacctgtcaactctctgtcgtctttggagcgatacagttgtgttgttaatctggtttattatttttcttcagtgtttggtttttctttttctttttgtttggttcgtcggtttgtttttgtttttgtttttttccccctttctcctcccctcctcctttttatgaaacttgaaaacttgaaggactgctgtgtatttgtaaataacaaaactattgtgcactctgtgcttgtaaatgtccctcgtccaaaccgctactcctggagcccgtctggcagaggatgtggtctgtttttgatgtcccccctcccgcccccctggtgtgaacgtgtgggaccagaccctgtcctgggggtgcgcccaagtcactttaaccacaaaacgccatcgtcgtcagggtaagctctgctctctacaaagactcgcgagccgggccaaggggccttgtcttggctgggtttgtcagaggtcaaaccggctcttttaaacggcctaccagtttttaaattgcattgccgtttctttctttatgaaaaaaaagaaaaaaagaaaattgtttcatttaatttatttgcacaaatgctgaaaacttattctatctaaattattacataaatattggaatgtctatttttccatggggtgggcgggaggtgggtgtctctgttgacttgtctgttctgttaccatgctgctacccaactgtgcaaagtagtttagggtggccagaacccagggaccattggatttcaaagcttgctttttctgttggttcttctctctccttctctctctgtctctcccattctcctgcccatgcatgaaaggatcctccaccttcttcccacccagagctccctccaggcctttctctatatatttatttatctgacatacagaacacgactttagtgagcagagtgctgacagtcatggtccccttctttgggtctgtcttttgagagaggttgagttcagggcaagacagcctgccacacatccaagggtacgaccagtgggaccctggcctgagtctgttctccgaggggcctccagcagcttctgttcctccctgcagctgtgtctttcttgtcctgggtttaggatgcaggtgggccaggcaggtgttgttaggggaggcacccacttcaaaaggagggccacagtggggacacagagtccagcacctgagccctccaccctccccattctggttggttccatcagccacacttagaatctcccaggatcccttggactccgtcccccaacttgtcacagcagcctgagcctacccaccccaggagacaagagctggcaggaacatctgcctatatggggggtggcgttggccccaaagaggcttcaccagcaaaggaactgtgtgtattttaatgccaggggacggaggatgtgtgagctgttcagcaaggtctgcccaaggcctaaaactcaatttccttattcttttgcttctgctcgtccttaacaactaacagctcaacccacacctctagacaacagtagtcgtgctttctgctaacggtgacattttcagctcttaaaaagaagcaaggagattttcaaatgctagagtatctctatcagaaggcataggacattgtgtccaaagtctcaagaacaaacaacactttccttctgacctggtccaaaagtcagcaaacagcaagcaggcagaggccctcataaggacttttctgtcctcctttgaccaaactgtttaaccgagcctaggggtgacggggagcgacccaagctggcatctttctctacggagacagattttagaaaatacttttcttgcccatgaatttcttttctggttgatttttatcattttccctttacttacaagaaaataagattgcaaccactcctgctaatgatttagtagttccttttcatttcagtttttgtaaattaggagataattctaagagttactaaaggatgatttatttaagagaactacgtcaaatagcgaatgagttatgggtaacattagacgaaaataacctttcccgtgggaaaggtttctcgaaggcatggatgcaaatataaaatattaaaaaaaatctaaataaagcttattttaaaatatgaaaaaaaaaa

SEQ ID NO: 52629 - DNA, 1839 bp, Homo sapiens
tagtttagaagttcaatagcacctagtttagaagttcaatagcacattcctgtcctgggggtgcgcccaagtcactttaaccacaaaacgccatcgtcgtcagggtaagctctgctctctacaaagactcgcgagccgggccaaggggccttgtcttggctgggtttgtcagaggtcaaaccggctcttttaaacggcctaccagtttttaaattgcattgccgtttctttctttatgaaaaaaaagaaaaaaagaaaattgtttcatttaatttatttgcacaaatgctgaaaacttattctatctaaattattacataaatattggaatgtctatttttccatggggtgggcgggaggtgggtgtctctgttgacttgtctgttctgttaccatgctgctacccaactgtgcaaagtagtttagggtggccagaacccagggaccattggatttcaaagcttgctttttctgttggttcttctctctccttctctctctgtctctcccattctcctgcccatgcatgaaaggatcctccaccttcttcccacccagagctccctccaggcctttctctatatatttatttatctgacatacagaacacgactttagtgagcagagtgctgacagtcatggtccccttctttgggtctgtcttttgagagaggttgagttcagggcaagacagcctgccacacatccaagggtacgaccagtgggaccctggcctgagtctgttctccgaggggcctccagcagcttctgttcctccctgcagctgtgtctttcttgtcctgggtttaggatgcaggtgggccaggcaggtgttgttaggggaggcacccacttcaaaaggagggccacagtggggacacagagtccagcacctgagccctccaccctccccattctggttggttccatcagccacacttagaatctcccaggatcccttggactccgtcccccaacttgtcacagcagcctgagcctacccaccccaggagacaagagctggcaggaacatctgcctatatggggggtggcgttggccccaaagaggcttcaccagcaaaggaactgtgtgtattttaatgccaggggacggaggatgtgtgagctgttcagcaaggtctgcccaaggcctaaaactcaatttccttattcttttgcttctgctcgtccttaacaactaacagctcaacccacacctctagacaacagtagtcgtgctttctgctaacggtgacattttcagctcttaaaaagaagcaaggagattttcaaatgctagagtatctctatcagaaggcataggacattgtgtccaaagtctcaagaacaaacaacactttccttctgacctggtccaaaagtcagcaaacagcaagcaggcagaggccctcataaggacttttctgtcctcctttgaccaaactgtttaaccgagcctaggggtgacggggagcgacccaagctggcatctttctctacggagacagattttagaaaatacttttcttgcccatgaatttcttttctggttgatttttatcattttccctttacttacaagaaaataagattgcaaccactcctgctaatgatttagtagttccttttcatttcagtttttgtaaattaggagataattctaagagttactaaaggatgatttatttaagagaactacgtcaaatagcgaatgagttatgggtaacattagacgaaaataacctttcccgtgggaaaggtttctcgaaggcatggatgcaaatataaaatattaaaaaaaatctaaataaagcttattttaaaatatgaaaaaaaaaa

SEQ ID NO: 52630 - DNA, 3924 bp, Homo sapiens
gcgcccgcccgccggggtctcggcgatcgctgctcctcctcctccttctcctcctcttttttctcctccgcctcctccccccgccgcctcgccaccgccgcggctagggctggaggcgccgctgtcattcctgtgccggaggaaccggcgctgccggtgcctgggggtcggggcgcgggcgaagccgggccgcggaggacacaacaggtagagccgggggtgcccggccgcgcgccccccgcgcatcatgcagctctttgtcacctctctcgcccccaggccaaaatcctgagcatgatggaagacaataagcagctcgcgctccgcatcgatggggcggtccagtcggccagccaggaggtgaccaacctgcgagccgaactcacggccaccaaccggagactggcggaactgagcggcggcggcggccccggcccgggcccgggagccgcggccagcgcctcggcggcgggggactcggcggcgacgaacatggagaacccccagcttggagcgcaagtgctcctgcgggaagaagtgtcgcggctccaggaggaagttcaccttctccggcagatgaaggagatgttggcgaaggacctggaggagtcgcagggcggcaagtcctctgaggtcctctcggccaccgagctcagggtccagctggcccagaaggagcaggagctagccagagccaaagaagccttgcaggccatgaaagctgatcggaagcgcttaaagggcgagaagacagacctggtgagccagatgcagcagctgtatgccacactggagagccgcgaggagcagctccgagacttcatccgcaactatgagcagcaccgcaaggagagcgaggatgcggtcaaagcgctggccaaggagaaggacctgctggagcgtgagaagtgggagctgcggcgccaagccaaggaggccacagaccacgccacggcactgcgctcccagctggacctcaaggacaaccggatgaaggagctggaggccgagctggccatggccaaacagtccttagctacgctgaccaaggacgtccccaagcggcattccctcgccatgccgggcgagacggtgctcaatggcaaccaggagtgggtggtgcaggcggacctcccgctgaccgcagccatccggcagagtcaacagactctctaccactcacacccccctcaccctgcggaccggcaagcggtcagggtgagcccctgccactcccggcagccctctgtcatctccgacgcatctgccgccgaaggcgaccggtcgtccacaccgagcgacatcaactcccctcgacaccggacacactccctctgcaacggcgacagtcccggcccagttcagaagaacctgcacaaccctattgtacagtcactagaggatcttgaagaccaaaaacggaaaaagaagaaagagaagatgggattcggctccatctcccgcgtcttcgccagagggaagcagcggaagtccctcgaccccggcctctttgatggtaccgcccctgattattacatagaggaggacgcggactggtgatacgcgctcccctgcgcctgctgcccgcaggcgtgtctgtgcgtgtgggcgtgtgtgcaagcgagcgtgggtgcgcgtgtggccgtgcgtggggtgcgtgtgcacgtgtgcgctggcacacatgggtgctgggtgtggccgagcgcctctaacaagtgaaaacacgagtgtgaacctctctcccctgcgtcgccacctctgtaattgatgtacataccgcaaaccgtgtgtgaacctgtcaactctctgtcgtctttggagcgatacagttgtgttgttaatctggtttattatttttcttcagtgtttggtttttctttttctttttgtttggttcgtcggtttgtttttgtttttgtttttttccccctttctcctcccctcctcctttttatgaaacttgaaaacttgaaggactgctgtgtatttgtaaataacaaaactattgtgcactctgtgcttgtaaatgtccctcgtccaaaccgctactcctggagcccgtctggcagaggatgtggtctgtttttgatgtcccccctcccgcccccctggtgtgaacgtgtgggaccagaccctgtcctgggggtgcgcccaagtcactttaaccacaaaacgccatcgtcgtcagggtaagctctgctctctacaaagactcgcgagccgggccaaggggccttgtcttggctgggtttgtcagaggtcaaaccggctcttttaaacggcctaccagtttttaaattgcattgccgtttctttctttatgaaaaaaaagaaaaaaagaaaattgtttcatttaatttatttgcacaaatgctgaaaacttattctatctaaattattacataaatattggaatgtctatttttccatggggtgggcgggaggtgggtgtctctgttgacttgtctgttctgttaccatgctgctacccaactgtgcaaagtagtttagggtggccagaacccagggaccattggatttcaaagcttgctttttctgttggttcttctctctccttctctctctgtctctcccattctcctgcccatgcatgaaaggatcctccaccttcttcccacccagagctccctccaggcctttctctatatatttatttatctgacatacagaacacgactttagtgagcagagtgctgacagtcatggtccccttctttgggtctgtcttttgagagaggttgagttcagggcaagacagcctgccacacatccaagggtacgaccagtgggaccctggcctgagtctgttctccgaggggcctccagcagcttctgttcctccctgcagctgtgtctttcttgtcctgggtttaggatgcaggtgggccaggcaggtgttgttaggggaggcacccacttcaaaaggagggccacagtggggacacagagtccagcacctgagccctccaccctccccattctggttggttccatcagccacacttagaatctcccaggatcccttggactccgtcccccaacttgtcacagcagcctgagcctacccaccccaggagacaagagctggcaggaacatctgcctatatggggggtggcgttggccccaaagaggcttcaccagcaaaggaactgtgtgtattttaatgccaggggacggaggatgtgtgagctgttcagcaaggtctgcccaaggcctaaaactcaatttccttattcttttgcttctgctcgtccttaacaactaacagctcaacccacacctctagacaacagtagtcgtgctttctgctaacggtgacattttcagctcttaaaaagaagcaaggagattttcaaatgctagagtatctctatcagaaggcataggacattgtgtccaaagtctcaagaacaaacaacactttccttctgacctggtccaaaagtcagcaaacagcaagcaggcagaggccctcataaggacttttctgtcctcctttgaccaaactgtttaaccgagcctaggggtgacggggagcgacccaagctggcatctttctctacggagacagattttagaaaatacttttcttgcccatgaatttcttttctggttgatttttatcattttccctttacttacaagaaaataagattgcaaccactcctgctaatgatttagtagttccttttcatttcagtttttgtaaattaggagataattctaagagttactaaaggatgatttatttaagagaactacgtcaaatagcgaatgagttatgggtaacattagacgaaaataacctttcccgtgggaaaggtttctcgaaggcatggatgcaaatataaaatattaaaaaaaatctaaataaagcttattttaaaatatgaaaaaaaaaa

SEQ ID NO: 52631 - DNA, 3853 bp, Homo sapiens
gagccgttcccacgtgagaggctccgcggccgaattcaattcctcgcgtgcagcaggcgcggaccgcccggcgtccggccggactgagagccctggtccggcgcgcgccgccggccgggcgggaggcgggggcgggctcggctgcgccccgatgcggcggcgacctccgggtctgtgagcccggcgcgcgccgtcggagcccctcgcgcagccgctggtagcgtccccccgggcacccggcatgcgggcggccgactcgggctcgtgggagcgcgtccgccagctcgcggcgcagggcgagccggcgccttcctgcggggcgggggccgggcccgcgcggcccccgggacccgcagcctgcgagcagtgcgtggacgcggcggggcccggcgatcggccccgcgccggggttccccgggtccgagcggatggcgactgcagccagcccgtgctcctgcgggaagaagtgtcgcggctccaggaggaagttcaccttctccggcagatgaaggagatgttggcgaaggacctggaggagtcgcagggcggcaagtcctctgaggtcctctcggccaccgagctcagggtccagctggcccagaaggagcaggagctagccagagccaaagaagccttgcaggccatgaaagctgatcggaagcgcttaaagggcgagaagacagacctggtgagccagatgcagcagctgtatgccacactggagagccgcgaggagcagctccgagacttcatccgcaactatgagcagcaccgcaaggagagcgaggatgcggtcaaagcgctggccaaggagaaggacctgctggagcgtgagaagtgggagctgcggcgccaagccaaggaggccacagaccacgccacggcactgcgctcccagctggacctcaaggacaaccggatgaaggagctggaggccgagctggccatggccaaacagtccttagctacgctgaccaaggacgtccccaagcggcattccctcgccatgccgggcgagacggtgctcaatggcaaccaggagtgggtggtgcaggcggacctcccgctgaccgcagccatccggcagagtcaacagactctctaccactcacacccccctcaccctgcggaccggcaagcggtcagggtgagcccctgccactcccggcagccctctgtcatctccgacgcatctgccgccgaaggcgaccggtcgtccacaccgagcgacatcaactcccctcgacaccggacacactccctctgcaacggcgacagtcccggcccagttcagaagaacctgcacaaccctattgtacagtcactagaggatcttgaagaccaaaaacggaaaaagaagaaagagaagatgggattcggctccatctcccgcgtcttcgccagagggaagcagcggaagtccctcgaccccggcctctttgatggtaccgcccctgattattacatagaggaggacgcggactggtgatacgcgctcccctgcgcctgctgcccgcaggcgtgtctgtgcgtgtgggcgtgtgtgcaagcgagcgtgggtgcgcgtgtggccgtgcgtggggtgcgtgtgcacgtgtgcgctggcacacatgggtgctgggtgtggccgagcgcctctaacaagtgaaaacacgagtgtgaacctctctcccctgcgtcgccacctctgtaattgatgtacataccgcaaaccgtgtgtgaacctgtcaactctctgtcgtctttggagcgatacagttgtgttgttaatctggtttattatttttcttcagtgtttggtttttctttttctttttgtttggttcgtcggtttgtttttgtttttgtttttttccccctttctcctcccctcctcctttttatgaaacttgaaaacttgaaggactgctgtgtatttgtaaataacaaaactattgtgcactctgtgcttgtaaatgtccctcgtccaaaccgctactcctggagcccgtctggcagaggatgtggtctgtttttgatgtcccccctcccgcccccctggtgtgaacgtgtgggaccagaccctgtcctgggggtgcgcccaagtcactttaaccacaaaacgccatcgtcgtcagggtaagctctgctctctacaaagactcgcgagccgggccaaggggccttgtcttggctgggtttgtcagaggtcaaaccggctcttttaaacggcctaccagtttttaaattgcattgccgtttctttctttatgaaaaaaaagaaaaaaagaaaattgtttcatttaatttatttgcacaaatgctgaaaacttattctatctaaattattacataaatattggaatgtctatttttccatggggtgggcgggaggtgggtgtctctgttgacttgtctgttctgttaccatgctgctacccaactgtgcaaagtagtttagggtggccagaacccagggaccattggatttcaaagcttgctttttctgttggttcttctctctccttctctctctgtctctcccattctcctgcccatgcatgaaaggatcctccaccttcttcccacccagagctccctccaggcctttctctatatatttatttatctgacatacagaacacgactttagtgagcagagtgctgacagtcatggtccccttctttgggtctgtcttttgagagaggttgagttcagggcaagacagcctgccacacatccaagggtacgaccagtgggaccctggcctgagtctgttctccgaggggcctccagcagcttctgttcctccctgcagctgtgtctttcttgtcctgggtttaggatgcaggtgggccaggcaggtgttgttaggggaggcacccacttcaaaaggagggccacagtggggacacagagtccagcacctgagccctccaccctccccattctggttggttccatcagccacacttagaatctcccaggatcccttggactccgtcccccaacttgtcacagcagcctgagcctacccaccccaggagacaagagctggcaggaacatctgcctatatggggggtggcgttggccccaaagaggcttcaccagcaaaggaactgtgtgtattttaatgccaggggacggaggatgtgtgagctgttcagcaaggtctgcccaaggcctaaaactcaatttccttattcttttgcttctgctcgtccttaacaactaacagctcaacccacacctctagacaacagtagtcgtgctttctgctaacggtgacattttcagctcttaaaaagaagcaaggagattttcaaatgctagagtatctctatcagaaggcataggacattgtgtccaaagtctcaagaacaaacaacactttccttctgacctggtccaaaagtcagcaaacagcaagcaggcagaggccctcataaggacttttctgtcctcctttgaccaaactgtttaaccgagcctaggggtgacggggagcgacccaagctggcatctttctctacggagacagattttagaaaatacttttcttgcccatgaatttcttttctggttgatttttatcattttccctttacttacaagaaaataagattgcaaccactcctgctaatgatttagtagttccttttcatttcagtttttgtaaattaggagataattctaagagttactaaaggatgatttatttaagagaactacgtcaaatagcgaatgagttatgggtaacattagacgaaaataacctttcccgtgggaaaggtttctcgaaggcatggatgcaaatataaaatattaaaaaaaatctaaataaagcttattttaaaatatgaaaaaaaaaa

SEQ ID NO: 52632 - DNA, 3659 bp, Homo sapiens
gcatcagcagctgtctgccagtgttgacggagggctcatgggtgccaggccgcttgctggggctttttatctgtcctcaggcattggcacagcagccctgggagatgaatactattgtgatcttcattctccacacaaggacagggaagtgacgtgccagggtcaaacaactacccaaggacagagccaggatttgaaccaggccatccagttccagaaccactgctcttcactgtcattgtggccattttacagtgctcctgcgggaagaagtgtcgcggctccaggaggaagttcaccttctccggcagatgaaggagatgttggcgaaggacctggaggagtcgcagggcggcaagtcctctgaggtcctctcggccaccgagctcagggtccagctggcccagaaggagcaggagctagccagagccaaagaagccttgcaggccatgaaagctgatcggaagcgcttaaagggcgagaagacagacctggtgagccagatgcagcagctgtatgccacactggagagccgcgaggagcagctccgagacttcatccgcaactatgagcagcaccgcaaggagagcgaggatgcggtcaaagcgctggccaaggagaaggacctgctggagcgtgagaagtgggagctgcggcgccaagccaaggaggccacagaccacgccacggcactgcgctcccagctggacctcaaggacaaccggatgaaggagctggaggccgagctggccatggccaaacagtccttagctacgctgaccaaggacgtccccaagcggcattccctcgccatgccgggcgagacggtgctcaatggcaaccaggagtgggtggtgcaggcggacctcccgctgaccgcagccatccggcagagtcaacagactctctaccactcacacccccctcaccctgcggaccggcaagcggtcagggtgagcccctgccactcccggcagccctctgtcatctccgacgcatctgccgccgaaggcgaccggtcgtccacaccgagcgacatcaactcccctcgacaccggacacactccctctgcaacggcgacagtcccggcccagttcagaagaacctgcacaaccctattgtacagtcactagaggatcttgaagaccaaaaacggaaaaagaagaaagagaagatgggattcggctccatctcccgcgtcttcgccagagggaagcagcggaagtccctcgaccccggcctctttgatggtaccgcccctgattattacatagaggaggacgcggactggtgatacgcgctcccctgcgcctgctgcccgcaggcgtgtctgtgcgtgtgggcgtgtgtgcaagcgagcgtgggtgcgcgtgtggccgtgcgtggggtgcgtgtgcacgtgtgcgctggcacacatgggtgctgggtgtggccgagcgcctctaacaagtgaaaacacgagtgtgaacctctctcccctgcgtcgccacctctgtaattgatgtacataccgcaaaccgtgtgtgaacctgtcaactctctgtcgtctttggagcgatacagttgtgttgttaatctggtttattatttttcttcagtgtttggtttttctttttctttttgtttggttcgtcggtttgtttttgtttttgtttttttccccctttctcctcccctcctcctttttatgaaacttgaaaacttgaaggactgctgtgtatttgtaaataacaaaactattgtgcactctgtgcttgtaaatgtccctcgtccaaaccgctactcctggagcccgtctggcagaggatgtggtctgtttttgatgtcccccctcccgcccccctggtgtgaacgtgtgggaccagaccctgtcctgggggtgcgcccaagtcactttaaccacaaaacgccatcgtcgtcagggtaagctctgctctctacaaagactcgcgagccgggccaaggggccttgtcttggctgggtttgtcagaggtcaaaccggctcttttaaacggcctaccagtttttaaattgcattgccgtttctttctttatgaaaaaaaagaaaaaaagaaaattgtttcatttaatttatttgcacaaatgctgaaaacttattctatctaaattattacataaatattggaatgtctatttttccatggggtgggcgggaggtgggtgtctctgttgacttgtctgttctgttaccatgctgctacccaactgtgcaaagtagtttagggtggccagaacccagggaccattggatttcaaagcttgctttttctgttggttcttctctctccttctctctctgtctctcccattctcctgcccatgcatgaaaggatcctccaccttcttcccacccagagctccctccaggcctttctctatatatttatttatctgacatacagaacacgactttagtgagcagagtgctgacagtcatggtccccttctttgggtctgtcttttgagagaggttgagttcagggcaagacagcctgccacacatccaagggtacgaccagtgggaccctggcctgagtctgttctccgaggggcctccagcagcttctgttcctccctgcagctgtgtctttcttgtcctgggtttaggatgcaggtgggccaggcaggtgttgttaggggaggcacccacttcaaaaggagggccacagtggggacacagagtccagcacctgagccctccaccctccccattctggttggttccatcagccacacttagaatctcccaggatcccttggactccgtcccccaacttgtcacagcagcctgagcctacccaccccaggagacaagagctggcaggaacatctgcctatatggggggtggcgttggccccaaagaggcttcaccagcaaaggaactgtgtgtattttaatgccaggggacggaggatgtgtgagctgttcagcaaggtctgcccaaggcctaaaactcaatttccttattcttttgcttctgctcgtccttaacaactaacagctcaacccacacctctagacaacagtagtcgtgctttctgctaacggtgacattttcagctcttaaaaagaagcaaggagattttcaaatgctagagtatctctatcagaaggcataggacattgtgtccaaagtctcaagaacaaacaacactttccttctgacctggtccaaaagtcagcaaacagcaagcaggcagaggccctcataaggacttttctgtcctcctttgaccaaactgtttaaccgagcctaggggtgacggggagcgacccaagctggcatctttctctacggagacagattttagaaaatacttttcttgcccatgaatttcttttctggttgatttttatcattttccctttacttacaagaaaataagattgcaaccactcctgctaatgatttagtagttccttttcatttcagtttttgtaaattaggagataattctaagagttactaaaggatgatttatttaagagaactacgtcaaatagcgaatgagttatgggtaacattagacgaaaataacctttcccgtgggaaaggtttctcgaaggcatggatgcaaatataaaatattaaaaaaaatctaaataaagcttattttaaaatatgaaaaaaaaaa

SEQ ID NO: 52633 - DNA, 298 bp, Homo sapiens
agaaaatcaagatcaagagaggttgcggaccacagagcttattggtatcaatgacaatacgggaacccagttcatctactcttccacggtgtctgacaatgcatgtgcattcccagaaaggctgtgctagaagagtctatgactcaggaagcattagcatcctcaagtgcctataaaataacaaaaatggctcattaaagtctaaaccaaatattgctatatagtatagcttattttaaaggtttatttaaaggtttaatagctgcccttcgttctaaagtgcaaggaaatcaaagag

SEQ ID NO: 52634 - DNA, 440 bp, Homo sapiens
gagtcagagtcttgctctgtcgcccaggttggggtgcaatggcgcggtctcagctcactgcaacctccacctcccaggttcaagcaattctcctgcctcagcctacccagtagctgggattacaagcgcccgccaccacacctatctaatttttttctttgtttgtttgtttgttttttagtggagacagtgaaaccatgtttaccaggctggtctcgaactcctgacctcaaatgatctgcttgcctcagcctcccaaagtgctaggattataggcgtgagccaccacgccccggcctgtttttctgttttttaaccagcggctctcaaactttagagtacgttagaatcttctgaaagtgtactaaaactgattgctggggcccactcccagagtttctcattcagtaggtctggggtgggaccagaatgtttatttc

SEQ ID NO: 52635 - DNA, 3141 bp, Homo sapiens
gcatttattccactgggatagaagcggcaggagcagcgttggcaccggcgaaccatggctgggattttctatttcgccctattttcgtgtctcttcgggatttgcgacgctgtcacaggttccagggtataccccgcgaatgaagttaccttattggattccagatctgttcagggagaacttgggtggatagcaagccctctggaaggagggtgggaggaagtgagtatcatggatgaaaaaaatacaccaatccgaacctaccaagtgtgcaatgtgatggaacccagccagaataactggctacgaactgattggatcacccgagaaggggctcagagggtgtatattgagattaaattcaccttgagggactgcaatagtcttccgggcgtcatggggacttgcaaggagacgtttaacctgtactactatgaatcagacaacgacaaagagcgtttcatcagagagaaccagtttgtcaaaattgacaccattgctgctgatgagagcttcacccaagtggacattggtgacagaatcatgaagctgaacaccgagatccgggatgtagggccattaagcaaaaaggggttttacctggcttttcaggatgtgggggcctgcatcgccctggtatcagtccgtgtgttctataaaaagtgtccactcacagtccgcaatctggcccagtttcctgacaccatcacaggggctgatacgtcttccctggtggaagttcgaggctcctgtgtcaacaactcagaagagaaagatgtgccaaaaatgtactgtggggcagatggtgaatggctggtacccattggcaactgcctatgcaacgctgggcatgaggagcggagcggagaatgccaagcttgcaaaattggatattacaaggctctctccacggatgccacctgtgccaagtgcccaccccacagctactctgtctgggaaggagccacctcgtgcacctgtgaccgaggctttttcagagctgacaacgatgctgcctctatgccctgcacccgtccaccatctgctcccctgaacttgatttcaaatgtcaacgagacatctgtgaacttggaatggagtagccctcagaatacaggtggccgccaggacatttcctataatgtggtatgcaagaaatgtggagctggtgaccccagcaagtgccgaccctgtggaagtggggtccactacaccccacagcagaatggcttgaagaccaccaaagtctccatcactgacctcctagctcataccaattacacctttgaaatctgggctgtgaatggagtgtccaaatataaccctaacccagaccaatcagtttctgtcactgtgaccaccaaccaagcagcaccatcatccattgctttggtccaggctaaagaagtcacaagatacagtgtggcactggcttggctggaaccagatcggcccaatggggtaatcctggaatatgaagtcaagtattatgagaaggatcagaatgagcgaagctatcgtatagttcggacagctgccaggaacacagatatcaaaggcctgaaccctctcacttcctatgttttccacgtgcgagccaggacagcagctggctatggagacttcagtgagcccttggaggttacaaccaacacagtgccttcccggatcattggagatggggctaactccacagtccttctggtctctgtctcgggcagtgtggtgctggtggtaattctcattgcagcttttgtcatcagccggagacggagtaaatacagtaaagccaaacaagaagcggatgaagagaaacatttgaatcaaggtgtaagaacatatgtggacccctttacgtacgaagatcccaaccaagcagtgcgagagtttgccaaagaaattgacgcatcctgcattaagattgaaaaagttataggagttggtgaatttggtgaggtatgcagtgggcgtctcaaagtgcctggcaagagagagatctgtgtggctatcaagactctgaaagctggttatacagacaaacagaggagagacttcctgagtgaggccagcatcatgggacagtttgaccatccgaacatcattcacttggaaggcgtggtcactaaatgtaaaccagtaatgatcataacagagtacatggagaatggctccttggatgcattcctcaggaaaaatgatggcagatttacagtcattcagctggtgggcatgcttcgtggcattgggtctgggatgaagtatttatctgatatgagctatgtgcatcgtgatctggccgcacggaacatcctggtgaacagcaacttggtctgcaaagtgtctgattttggcatgtcccgagtgcttgaggatgatccggaagcagcttacaccaccaggggtggcaagattcctatccggtggactgcgccagaagcaattgcctatcgtaaattcacatcagcaagtgatgtatggagctatggaatcgttatgtgggaagtgatgtcgtacggggagaggccctattgggatatgtccaatcaagatgtgattaaagccattgaggaaggctatcggttaccccctccaatggactgccccattgcgctccaccagctgatgctagactgctggcagaaggagaggagcgacaggcctaaatttgggcagattgtcaacatgttggacaaactcatccgcaaccccaacagcttgaagaggacagggacggagagctccagacctaacactgccttgttggatccaagctcccctgaattctctgctgtggtatcagtgggcgattggctccaggccattaaaatggaccggtataaggataacttcacagctgctggttataccacactagaggctgtggtgcacgtgaaccaggaggacctggcaagaattggtatcacagccatcacgcaccagaataagattttgagcagtgtccaggcaatgcgaacccaaatgcagcagatgcacggcagaatggttcccgtctgagccagtactgaataaactcaaaactcttgaaattagtttacctcatccatgcactttaattgaagaactgcactttttttacttcgtcttcgccctctgaaattaaagaaatgaaaaaaaaaaaca

SEQ ID NO: 52636 - DNA, 3087 bp, Homo sapiens
gcatttattccactgggatagaagcggcaggagcagcgttggcaccggcgaaccatggctgggattttctatttcgccctattttcgtgtctcttcgggatttgcgacgctgtcacaggttccagggtataccccgcgaatgaagttaccttattggattccagatctgttcagggagaacttgggtggatagcaagccctctggaaggagggtgggaggaagtgagtatcatggatgaaaaaaatacaccaatccgaacctaccaagtgtgcaatgtgatggaacccagccagaataactggctacgaactgattggatcacccgagaaggggctcagagggtgtatattgagattaaattcaccttgagggactgcaatagtcttccgggcgtcatggggacttgcaaggagacgtttaacctgtactactatgaatcagacaacgacaaagagcgtttcatcagagagaaccagtttgtcaaaattgacaccattgctgctgatgagagcttcacccaagtggacattggtgacagaatcatgaagctgaacaccgagatccgggatgtagggccattaagcaaaaaggggttttacctggcttttcaggatgtgggggcctgcatcgccctggtatcagtccgtgtgttctataaaaagtgtccactcacagtccgcaatctggcccagtttcctgacaccatcacaggggctgatacgtcttccctggtggaagttcgaggctcctgtgtcaacaactcagaagagaaagatgtgccaaaaatgtactgtggggcagatggtgaatggctggtacccattggcaactgcctatgcaacgctgggcatgaggagcggagcggagaatgccaagcttgcaaaattggatattacaaggctctctccacggatgccacctgtgccaagtgcccaccccacagctactctgtctgggaaggagccacctcgtgcacctgtgaccgaggctttttcagagctgacaacgatgctgcctctatgccctgcacccgtccaccatctgctcccctgaacttgatttcaaatgtcaacgagacatctgtgaacttggaatggagtagccctcagaatacaggtggccgccaggacatttcctataatgtggtatgcaagaaatgtggagctggtgaccccagcaagtgccgaccctgtggaagtggggtccactacaccccacagcagaatggcttgaagaccaccaaagtctccatcactgacctcctagctcataccaattacacctttgaaatctgggctgtgaatggagtgtccaaatataaccctaacccagaccaatcagtttctgtcactgtgaccaccaaccaagcagcaccatcatccattgctttggtccaggctaaagaagtcacaagatacagtgtggcactggcttggctggaaccagatcggcccaatggggtaatcctggaatatgaagtcaagtattatgagaaggatcagaatgagcgaagctatcgtatagttcggacagctgccaggaacacagatatcaaaggcctgaaccctctcacttcctatgttttccacgtgcgagccaggacagcagctggctatggagacttcagtgagcccttggaggttacaaccaacacagtgccttcccggatcattggagatggggctaactccacagtccttctggtctctgtctcgggcagtgtggtgctggtggtaattctcattgcagcttttgtcatcagccggagacggagtaaatacagtaaagccaaacaagaagcggatgaagagaaacatttgaatcaaggtgtaagaacatatgtggacccctttacgtacgaagatcccaaccaagcagtgcgagagtttgccaaagaaattgacgcatcctgcattaagattgaaaaagttataggagttggtgaatttggtgaggtatgcagtgggcgtctcaaagtgcctggcaagagagagatctgtgtggctatcaagactctgaaagctggttatacagacaaacagaggagagacttcctgagtgaggccagcatcatgggacagtttgaccatccgaacatcattcacttggaaggcgtggtcactaaatgtaaaccagtaatgatcataacagagtacatggagaatggctccttggatgcattcctcaggaaaaatgatggcagatttacagtcattcagctggtgggcatgcttcgtggcattgggtctgggatgaagtatttatctgatatgagctatgtgcatcgtgatctggccgcacggaacatcctggtgaacagcaacttggtctgcaaagtgtctgattttggcatgtcccgagtgcttgaggatgatccggaagcagcttacaccaccaggggtggcaagattcctatccggtggactgcgccagaagcaattgcctatcgtaaattcacatcagcaagtgatgtatggagctatggaatcgttatgtgggaagtgatgtcgtacggggagaggccctattgggatatgtccaatcaagatgtgattaaagccattgaggaaggctatcggttaccccctccaatggactgccccattgcgctccaccagctgatgctagactgctggcagaaggagaggagcgacaggcctaaatttgggcagattgtcaacatgttggacaaactcatccgcaaccccaacagcttgaagaggacagggacggagagctccagacctaacactgccttgttggatccaagctcccctgaattctctgctgtggtatcagtgggcgattggctccaggccattaaaatggaccggtataaggataacttcacagctgctggttataccacactagaggctgtggtgcacgtgaaccaggacagtgtccaggcaatgcgaacccaaatgcagcagatgcacggcagaatggttcccgtctgagccagtactgaataaactcaaaactcttgaaattagtttacctcatccatgcactttaattgaagaactgcactttttttacttcgtcttcgccctctgaaattaaagaaatgaaaaaaaaaaaca

SEQ ID NO: 52637 - DNA, 2947 bp, Homo sapiens
gcatttattccactgggatagaagcggcaggagcagcgttggcaccggcgaaccatggctgggattttctatttcgccctattttcgtgtctcttcgggatttgcgacgctgtcacaggttccagggtataccccgcgaatgaagttaccttattggattccagatctgttcagggagaacttgggtggatagcaagccctctggaaggagggtgggaggaagtgagtatcatggatgaaaaaaatacaccaatccgaacctaccaagtgtgcaatgtgatggaacccagccagaataactggctacgaactgattggatcacccgagaaggggctcagagggtgtatattgagattaaattcaccttgagggactgcaatagtcttccgggcgtcatggggacttgcaaggagacgtttaacctgtactactatgaatcagacaacgacaaagagcgtttcatcagagagaaccagtttgtcaaaattgacaccattgctgctgatgagagcttcacccaagtggacattggtgacagaatcatgaagctgaacaccgagatccgggatgtagggccattaagcaaaaaggggttttacctggcttttcaggatgtgggggcctgcatcgccctggtatcagtccgtgtgttctataaaaagtgtccactcacagtccgcaatctggcccagtttcctgacaccatcacaggggctgatacgtcttccctggtggaagttcgaggctcctgtgtcaacaactcagaagagaaagatgtgccaaaaatgtactgtggggcagatggtgaatggctggtacccattggcaactgcctatgcaacgctgggcatgaggagcggagcggagaatgccaagcttgcaaaattggatattacaaggctctctccacggatgccacctgtgccaagtgcccaccccacagctactctgtctgggaaggagccacctcgtgcacctgtgaccgaggctttttcagagctgacaacgatgctgcctctatgccctgcacccgtccaccatctgctcccctgaacttgatttcaaatgtcaacgagacatctgtgaacttggaatggagtagccctcagaatacaggtggccgccaggacatttcctataatgtggtatgcaagaaatgtggagctggtgaccccagcaagtgccgaccctgtggaagtggggtccactacaccccacagcagaatggcttgaagaccaccaaagtctccatcactgacctcctagctcataccaattacacctttgaaatctgggctgtgaatggagtgtccaaatataaccctaacccagaccaatcagtttctgtcactgtgaccaccaaccaagcagcaccatcatccattgctttggtccaggctaaagaagtcacaagatacagtgtggcactggcttggctggaaccagatcggcccaatggggtaatcctggaatatgaagtcaagtattatgagaaggatcagaatgagcgaagctatcgtatagttcggacagctgccaggaacacagatatcaaaggcctgaaccctctcacttcctatgttttccacgtgcgagccaggacagcagctggctatggagacttcagtgagcccttggaggttacaaccaacacagtgccttcccggatcattggagatggggctaactccacagtccttctggtctctgtctcgggcagtgtggtgctggtggtaattctcattgcagcttttgtcatcagccggagacggagtaaatacagtaaagccaaacaagaagcggatgaagagaaacatttgaatcaaggtgtaagaacatatgtggacccctttacgtacgaagatcccaaccaagcagtgcgagagtttgccaaagaaattgacgcatcctgcattaagattgaaaaagttataggagttggtgaatttggtgaggtatgcagtgggcgtctcaaagtgcctggcaagagagagatctgtgtggctatcaagactctgaaagctggttatacagacaaacagaggagagacttcctgagtgaggccagcatcatgggacagtttgaccatccgaacatcattcacttggaaggcgtggtcactaaatgtaaaccagtaatgatcataacagagtacatggagaatggctccttggatgcattcctcaggaaaaatgatggcagatttacagtcattcagctggtgggcatgcttcgtggcattgggtctgggatgaagtatttatctgatatgagctatgtgcatcgtgatctggccgcacggaacatcctggtgaacagcaacttggtctgcaaagtgtctgattttggcatgtcccgagtgcttgaggatgatccggaagcagcttacaccaccaggggtggcaagattcctatccggtggactgcgccagaagcaattgcctatcgtaaattcacatcagcaagtgatgtatggagctatggaatcgttatgtgggaagtgatgtcgtacggggagaggccctattgggatatgtccaatcaagatacctaacactgccttgttggatccaagctcccctgaattctctgctgtggtatcagtgggcgattggctccaggccattaaaatggaccggtataaggataacttcacagctgctggttataccacactagaggctgtggtgcacgtgaaccaggaggacctggcaagaattggtatcacagccatcacgcaccagaataagattttgagcagtgtccaggcaatgcgaacccaaatgcagcagatgcacggcagaatggttcccgtctgagccagtactgaataaactcaaaactcttgaaattagtttacctcatccatgcactttaattgaagaactgcactttttttacttcgtcttcgccctctgaaattaaagaaatgaaaaaaaaaaaca

SEQ ID NO: 52638 - DNA, 3170 bp, Homo sapiens
gcatttattccactgggatagaagcggcaggagcagcgttggcaccggcgaaccatggctgggattttctatttcgccctattttcgtgtctcttcgggatttgcgacgctgtcacaggttccagggtataccccgcgaatgaagttaccttattggattccagatctgttcagggagaacttgggtggatagcaagccctctggaaggagggtgggaggaagtgagtatcatggatgaaaaaaatacaccaatccgaacctaccaagtgtgcaatgtgatggaacccagccagaataactggctacgaactgattggatcacccgagaaggggctcagagggtgtatattgagattaaattcaccttgagggactgcaatagtcttccgggcgtcatggggacttgcaaggagacgtttaacctgtactactatgaatcagacaacgacaaagagcgtttcatcagagagaaccagtttgtcaaaattgacaccattgctgctgatgagagcttcacccaagtggacattggtgacagaatcatgaagctgaacaccgagatccgggatgtagggccattaagcaaaaaggggttttacctggcttttcaggatgtgggggcctgcatcgccctggtatcagtccgtgtgttctataaaaagtgtccactcacagtccgcaatctggcccagtttcctgacaccatcacaggggctgatacgtcttccctggtggaagttcgaggctcctgtgtcaacaactcagaagagaaagatgtgccaaaaatgtactgtggggcagatggtgaatggctggtacccattggcaactgcctatgcaacgctgggcatgaggagcggagcggagaatgccaagcttgcaaaattggatattacaaggctctctccacggatgccacctgtgccaagtgcccaccccacagctactctgtctgggaaggagccacctcgtgcacctgtgaccgaggctttttcagagctgacaacgatgctgcctctatgccctgcacccgtccaccatctgctcccctgaacttgatttcaaatgtcaacgagacatctgtgaacttggaatggagtagccctcagaatacaggtggccgccaggacatttcctataatgtggtatgcaagaaatgtggagctggtgaccccagcaagtgccgaccctgtggaagtggggtccactacaccccacagcagaatggcttgaagaccaccaaagtctccatcactgacctcctagctcataccaattacacctttgaaatctgggctgtgaatggagtgtccaaatataaccctaacccagaccaatcagtttctgtcactgtgaccaccaaccaagcagcaccatcatccattgctttggtccaggctaaagaagtcacaagatacagtgtggcactggcttggctggaaccagatcggcccaatggggtaatcctggaatatgaagtcaagtattatgagaaggatcagaatgagcgaagctatcgtatagttcggacagctgccaggaacacagatatcaaaggcctgaaccctctcacttcctatgttttccacgtgcgagccaggacagcagctggctatggagacttcagtgagcccttggaggttacaaccaacacagtgccttcccggatcattggagatggggctaactccacagtccttctggtctctgtctcgggcagtgtggtgctggtggtaattctcattgcagcttttgtcatcagccggagacggagtaaatacagtaaagccaaacaagaagcggatgaagagaaacatttgaatcaaggtgtaagaacatatgtggacccctttacgtacgaagatcccaaccaagcagtgcgagagtttgccaaagaaattgacgcatcctgcattaagattgaaaaagttataggagttggtgaatttggtgaggtatgcagtgggcgtctcaaagtgcctggcaagagagagatctgtgtggctatcaagactctgaaagctggttatacagacaaacagaggagagacttcctgagtgaggccagcatcatgggacagtttgaccatccgaacatcattcacttggaaggcgtggtcactaaatgtaaaccagtaatgatcataacagagtacatggagaatggctccttggatgcattcctcaggaaaaatgatggcagatttacagtcattcagctggtgggcatgcttcgtggcattgggtctgggatgaagtatttatctgatatgagctatgtgcatcgtgatctggccgcacggaacatcctggtgaacagcaacttggtctgcaaagtgtctgattttggcatgtcccgagtgcttgaggatgatccggaagcagcttacaccaccaggggtggcaagattcctatccggtggactgcgccagaagcaattgcctatcgtaaattcacatcagcaagtgatgtatggagctatggaatcgttatgtgggaagtgatgtcgtacggggagaggccctattgggatatgtccaatcaagatgtgattaaagccattgaggaaggctatcggttaccccctccaatggactgccccattgcgctccaccagctgatgctagactgctggcagaaggagaggagcgacaggcctaaatttgggcagattgtcaacatgttggacaaactcatccgcaaccccaacagcttgaagaggacagggacggagagctccagacctaacactgccttgttggatccaagctcccctgaattctctgctgtggtatcagtgggcgattggctccaggccattaaaatggaccggtataaggataacttcacagctgctggttataccacactagaggctgtggtgcacgtgaaccaggagtaagtactcaacgatgtaacacgaaaggggacctggcaagaattggtatcacagccatcacgcaccagaataagattttgagcagtgtccaggcaatgcgaacccaaatgcagcagatgcacggcagaatggttcccgtctgagccagtactgaataaactcaaaactcttgaaattagtttacctcatccatgcactttaattgaagaactgcactttttttacttcgtcttcgccctctgaaattaaagaaatgaaaaaaaaaaaca

SEQ ID NO: 52639 - DNA, 646 bp, Homo sapiens
cgacagttttccggcctagtttgcggctgctcctgccgtgttgcgtagggcgcctgtgcttgaggttgggggttgcgtcgctctctggtaaaggcgtgcaggtgttggccgcggcctctgagctgggatgagccgtgctcccggtggaagcaagggagcccagccggagccatggccagtacagtggtagcagttggactgaccattgctgctgcaggatttgcaggccgttacgttttgcaagccatgaagcatatggagcctcaagtaaaacaagtttttcaaagcctaccaaaatctgccttcagtggtggctattatagaggtgggtttgaacccaaaatgacaaaacgggaagcagcattaatactaggtgtaagccctactgccaataaagggaaaataagagatgctcatcgacgaattatgcttttaaatcatcctgacaaaggaggatctccttatatagcagccaaaatcaatgaagctaaagatttactagaaggtcaagctaaaaaatgaagtaaatgtatgatgaattttaagttcgtattagtttatgtatatgagtactaagtttttataataaaatgcctcagagctacaagtcgacgcggccgcgaatttagtagtagtaggcggccgc

SEQ ID NO: 52640 - DNA, 652 bp, Homo sapiens
  misc_feature (600)..(600): n is a, c, g, or t
  misc_feature (607)..(607): n is a, c, g, or t
cgacagttttccggcctagtttgcggctgctcctgccgtgttgcgtagggcgcctgtgcttgaggttgggggttgcgtcgctctctggtaaaggcgtgcaggtgttggccgcggcctctgagctgggatgagccgtgctcccggtggaagcaagggagcccagccggagccatggccagtacagtggtagcagttggactgaccattgctgctgcaggatttgcaggccgttacgttttgcaagccatgaagcatatggagcctcaagtaaaacaagtttttcaaagcctaccaaaatctgccttcagtggtggctattatagaggtgggtttgaacccaaaatgacaaaacgggaagcagcattaatactaggtgtaagccctactgccaataaagggaaaataagagatgctcatcgacgaattatgcttttaaatcatcctgacaaaggaggatctccttatatagcagccaaaatcaatgaagctaaagatttactagaaggtcaagctaaaaaatgaagtaaatgtatgatgaattttaagttcgtattagtttatgtatatgtgtggtggggtttcataacaccatctatctanagcaagngctttaaaggataaatgcgctgaatctttttctgggggggggaag

SEQ ID NO: 52641 - DNA, 737 bp, Homo sapiens
cgacagttttccggcctagtttgcggctgctcctgccgtgttgcgtagggcgcctgtgcttgaggttgggggttgcgtcgctctctggtaaaggcgtgcaggtgttggccgcggcctctgagctgggatgagccgtgctcccggtggaagcaagggagcccagccggagccatggccagtacagtggtagcagttggactgaccattgctgctgcaggatttgcaggccgttacgttttgcaagccatgaagcatatggagcctcaagtaaaacaagtttttcaaagcctaccaaaatctgtaagactttgttaattctttgctgcttctatttgaaacctagagccacacttagggaagggtaaatttccaaatatccatgaagttctaagtgattgctttggacccattctcctgcttcctgcaaggagagtatagaagttctgaactttgtgatggtgctaccctgaaacatcagatgttatatgtgacagagttggatggggttttgacaattctagtaccccactagacccaagtttcactttttcacataccatcaccttcagcatcatctgtacatattcttgttttccttcatctgctctgcatcgcacacacagaggtatatgattctaaagtgatccgatctgaccatgtggccctggcactcccaaacatcatacataggtagcactctagttaattaggctatagggtttggcttgatgttatgg

SEQ ID NO: 52642 - DNA, 844 bp, Homo sapiens
cggatgttcttgcccggtgagcaggaccagcgagcatggcagtacagtgtagcagtggactgacattgctgctgagatttgcagcccgggttacgttttgcatgccatgaagctatggagcctcaagtagacaagttttcaagcctaccaaaatcttgcccgcccgttttcagggccttcagtggtggctattatagaggtgggtttgaacccaaaatgacaaaacgggaagcagcattaatactaggtgtaagccctactgccaataaagggaaaataagagatgctcatcgacgaattatgcttttaaatcatcctgacaaaggtaagtagtcattaaattctcgttgatgttgttggtgtgaccaatagttattaatgggataattttatctcaaattcctggctattagaaaggtaacacttaaatctgtaagtcctgtctcctaggctggagccatatatttttggtgtcttaaaagaaattaagtgaaaactttacttacagaatgagcagatgtaagtgctactattactatgttttgtgggtttttctggcctacatttattataattaaaacgttaaatttcgtaaaactaaaatgtaatttttccttatccattttagataccttgaaacggagattacctagatagaaacttatgggatttatttattcgtttgtgatagacttctatgcagccttggctgtgttgaaggaaagcaagaatttctttgaataccaaaaaatagaccacagaattcatgttctagtgtttgtatccttttacttatacaggagagggctttcattaataaaaagggttttgacattttaaacag

SEQ ID NO: 52643 - DNA, 818 bp, Homo sapiens
cgacagttttccggcctagtttgcggctgctcctgccgtgttgcgtagggcgcctgtgcttgaggttgggggttgcgtcgctctctggtaaaggcgtgcaggtgttggccgcggcctctgagctgggatgagccgtgctcccggtggaagcaagggagcccagccggagccatggccagtacagtggtagcagttggactgaccattgctgctgcaggatttgcaggtttgtttatggtttggggatggaagtgaagtcggggagattggagatttagtttacttattctgttgcttttggttttaggccgttacgttttgcaagccatgaagcatatggagcctcaagtaaaacaagtttttcaaagcctaccaaaatctgtaagactttgttaattctttgctgcttctatttgaaacctagagccacacttagggaagggtaaatttccaaatatccatgaagttctaagtgattgctttggacccattctcctgcttcctgcaaggagagtatagaagttctgaactttgtgatggtgctaccctgaaacatcagatgttatatgtgacagagttggatggggttttgacaattctagtaccccactagacccaagtttcactttttcacataccatcaccttcagcatcatctgtacatattcttgttttccttcatctgctctgcatcgcacacacagaggtatatgattctaaagtgatccgatctgaccatgtggccctggcactcccaaacatcatacataggtagcactctagttaattaggctatagggtttggcttgatgttatgg

SEQ ID NO: 52644 - DNA, 1401 bp, Homo sapiens
cgacagttttccggcctagtttgcggctgctcctgccgtgttgcgtagggcgcctgtgcttgaggttgggggttgcgtcgctctctggtaaaggcgtgcaggtgttggccgcggcctctgagctgggatgagccgtgctcccggtggaagcaagggagcccagccggagccatggccgttacgttttgcaagccatgaagcatatggagcctcaagtaaaacaagtttttcaaagcctaccaaaatctgccttcagtggtggctattatagaggtgggtttgaacccaaaatgacaaaacgggaagcagcattaatactaggtgtaagccctactgccaataaagggaaaataagagatgctcatcgacgaattatgcttttaaatcatcctgacaaaggaggatctccttatatagcagccaaaatcaatgaagctaaagatttactagaaggtcaagctaaaaaatgaagtaaatgtatgatgaattttaagttcgtattagtttatgtatatgagtactaagtttttataataaaatgcctcagagctacaattttaaaaaatgatttagcacaagctaaatctcaaagccttggtataattttcttgtttaaatttggggattttaaatcagattatagtttagaatatttgcgtattaattatgggcaagcacacaccttctgaatagaaatattgttcattactcatttagcagataatttgggacctatgtctacttttcaaggcaaagtgaagatgacagtccttgctctcagggagcccccactttaatgggagactgataaactggtaattagactgtgataaatagtatgatggaaattagcttaagctgtttaagtagggactcttcttattcggtggaaaggctgttccaggtacaggcaactggcctggcaacttggatacttggaaccttgtatttaaaagtgaatttaaccacaactgagacctaagaaattgacctaggggtgtgtgtgtgtgtgtattctatgtacatataaaccatttttatttcatgcattaaaaatagtatgataaagatttcagagtacaggtctggtacaatcacagttcattgcagcctcaacctcctgggtttaagcagtcctcccgcctcagcctcccaaagtactgggattacaggcatgagtatttacattgtattcagctagccccttaaaggtaatgaccatttataaattattccttcagttggctatttcttgacataatcaaacttctgcaattgttatgattaagcttaaaccctgttagcaaaactgaaaactgaaatgttctcaatatcaacatatttaatttggactctttagaatttatacactaataaatttaaatgatgtttaaaggcaaa

SEQ ID NO: 52645 - DNA, 1373 bp, Homo sapiens
cgacagttttccggcctagtttgcggctgctcctgccgtgttgcgtagggcgcctgtgcttgaggttgggggttgcgtcgctctctggtaaaggcgtgcaggtgttggccgcggcctctgagctgggatgagccgtgctcccggtggaagcaagggagcccagccggagccatggccagtacagtggtagcagttggactgaccattgctgctgcaggatttgcaggccgttacgttttgcaagccatgaagcatatggagcctcaagtaaaacaagtttttcaaagcctaccaaaatctccctactgccaataaagggaaaataagagatgctcatcgacgaattatgcttttaaatcatcctgacaaaggaggatctccttatatagcagccaaaatcaatgaagctaaagatttactagaaggtcaagctaaaaaatgaagtaaatgtatgatgaattttaagttcgtattagtttatgtatatgagtactaagtttttataataaaatgcctcagagctacaattttaaaaaatgatttagcacaagctaaatctcaaagccttggtataattttcttgtttaaatttggggattttaaatcagattatagtttagaatatttgcgtattaattatgggcaagcacacaccttctgaatagaaatattgttcattactcatttagcagataatttgggacctatgtctacttttcaaggcaaagtgaagatgacagtccttgctctcagggagcccccactttaatgggagactgataaactggtaattagactgtgataaatagtatgatggaaattagcttaagctgtttaagtagggactcttcttattcggtggaaaggctgttccaggtacaggcaactggcctggcaacttggatacttggaaccttgtatttaaaagtgaatttaaccacaactgagacctaagaaattgacctaggggtgtgtgtgtgtgtgtattctatgtacatataaaccatttttatttcatgcattaaaaatagtatgataaagatttcagagtacaggtctggtacaatcacagttcattgcagcctcaacctcctgggtttaagcagtcctcccgcctcagcctcccaaagtactgggattacaggcatgagtatttacattgtattcagctagccccttaaaggtaatgaccatttataaattattccttcagttggctatttcttgacataatcaaacttctgcaattgttatgattaagcttaaaccctgttagcaaaactgaaaactgaaatgttctcaatatcaacatatttaatttggactctttagaatttatacactaataaatttaaatgatgtttaaaggcaaa

SEQ ID NO: 52646 - DNA, 1398 bp, Homo sapiens
cgacagttttccggcctagtttgcggctgctcctgccgtgttgcgtagggcgcctgtgcttgaggttgggggttgcgtcgctctctggtaaaggcgtgcaggtgttggccgcggcctctgagctgggatgagccgtgctcccggtggaagcaagggagcccagccggagccatggccagtacagtggtagcagttggactgaccattgctgctgcaggatttgcaggccgttacgttttgcaagccatgaagcatatggagcctcaagtaaaacaagtttttcaaagcctaccaaaatctgccttcagtggtggctattatagagccctactgccaataaagggaaaataagagatgctcatcgacgaattatgcttttaaatcatcctgacaaaggaggatctccttatatagcagccaaaatcaatgaagctaaagatttactagaaggtcaagctaaaaaatgaagtaaatgtatgatgaattttaagttcgtattagtttatgtatatgagtactaagtttttataataaaatgcctcagagctacaattttaaaaaatgatttagcacaagctaaatctcaaagccttggtataattttcttgtttaaatttggggattttaaatcagattatagtttagaatatttgcgtattaattatgggcaagcacacaccttctgaatagaaatattgttcattactcatttagcagataatttgggacctatgtctacttttcaaggcaaagtgaagatgacagtccttgctctcagggagcccccactttaatgggagactgataaactggtaattagactgtgataaatagtatgatggaaattagcttaagctgtttaagtagggactcttcttattcggtggaaaggctgttccaggtacaggcaactggcctggcaacttggatacttggaaccttgtatttaaaagtgaatttaaccacaactgagacctaagaaattgacctaggggtgtgtgtgtgtgtgtattctatgtacatataaaccatttttatttcatgcattaaaaatagtatgataaagatttcagagtacaggtctggtacaatcacagttcattgcagcctcaacctcctgggtttaagcagtcctcccgcctcagcctcccaaagtactgggattacaggcatgagtatttacattgtattcagctagccccttaaaggtaatgaccatttataaattattccttcagttggctatttcttgacataatcaaacttctgcaattgttatgattaagcttaaaccctgttagcaaaactgaaaactgaaatgttctcaatatcaacatatttaatttggactctttagaatttatacactaataaatttaaatgatgtttaaaggcaaa

SEQ ID NO: 52647 - DNA, 1284 bp, Homo sapiens
ctttgtcgtgactggaaaacctgccggactatggaagcaagggagcccagccggagcatggccagtacagtggtagcagttggactgaccattgctgctgcaggatttgcaggccgttacgttttgcaagccatgaagcatatggagcctcaagtaaaacaagtttttcaaagcctaccaaaatctgccttcagtggtggctattatagagccctactgccaataaagggaaaataagagatgctcatcgacgaattatgcttttaaatcatcctgacaaaggaggatctccttatatagcagccaaaatcaatgaagctaaagatttactagaaggtcaagctaaaaaatgaagtaaatgtatgatgaattttaagttcgtattagtttatgtatatgagtactaagtttttataataaaatgcctcagagctacaattttaaaaaatgatttagcacaagctaaatctcaaagccttggtataattttcttgtttaaatttggggattttaaatcagattatagtttagaatatttgcgtattaattatgggcaagcacacaccttctgaatagaaatattgttcattactcatttagcagataatttgggacctatgtctacttttcaaggcaaagtgaagatgacagtccttgctctcagggagcccccactttaatgggagactgataaactggtaattagactgtgataaatagtatgatggaaattagcttaagctgtttaagtagggactcttcttattcggtggaaaggctgttccaggtacaggcaactggcctggcaacttggatacttggaaccttgtatttaaaagtgaatttaaccacaactgagacctaagaaattgacctaggggtgtgtgtgtgtgtgtattctatgtacatataaaccatttttatttcatgcattaaaaatagtatgataaagatttcagagtacaggtctggtacaatcacagttcattgcagcctcaacctcctgggtttaagcagtcctcccgcctcagcctcccaaagtactgggattacaggcatgagtatttacattgtattcagctagccccttaaaggtaatgaccatttataaattattccttcagttggctatttcttgacataatcaaacttctgcaattgttatgattaagcttaaaccctgttagcaaaactgaaaactgaaatgttctcaatatcaacatatttaatttggactctttagaatttatacactaataaatttaaatgatgtttaaaggcaaa

SEQ ID NO: 52648 - DNA, 1302 bp, Homo sapiens
caaactgccacggggtgacaacctgagcagtgcatgaatcgattcctaggatggatgtgctgaggtctattactggagtctatcaatcgaggagatcctagagacgactctcagattatcaaaattatcgccccaccctgccaaaatctgccttcagtggtggctattatagaggtgggtttgaacccaaaatgacaaaacgggaagcagcattaatactaggtgtaagccctactgccaataaagggaaaataagagatgctcatcgacgaattatgcttttaaatcatcctgacaaaggaggatctccttatatagcagccaaaatcaatgaagctaaagatttactagaaggtcaagctaaaaaatgaagtaaatgtatgatgaattttaagttcgtattagtttatgtatatgagtactaagtttttataataaaatgcctcagagctacaattttaaaaaatgatttagcacaagctaaatctcaaagccttggtataattttcttgtttaaatttggggattttaaatcagattatagtttagaatatttgcgtattaattatgggcaagcacacaccttctgaatagaaatattgttcattactcatttagcagataatttgggacctatgtctacttttcaaggcaaagtgaagatgacagtccttgctctcagggagcccccactttaatgggagactgataaactggtaattagactgtgataaatagtatgatggaaattagcttaagctgtttaagtagggactcttcttattcggtggaaaggctgttccaggtacaggcaactggcctggcaacttggatacttggaaccttgtatttaaaagtgaatttaaccacaactgagacctaagaaattgacctaggggtgtgtgtgtgtgtgtattctatgtacatataaaccatttttatttcatgcattaaaaatagtatgataaagatttcagagtacaggtctggtacaatcacagttcattgcagcctcaacctcctgggtttaagcagtcctcccgcctcagcctcccaaagtactgggattacaggcatgagtatttacattgtattcagctagccccttaaaggtaatgaccatttataaattattccttcagttggctatttcttgacataatcaaacttctgcaattgttatgattaagcttaaaccctgttagcaaaactgaaaactgaaatgttctcaatatcaacatatttaatttggactctttagaatttatacactaataaatttaaatgatgtttaaaggcaaa

SEQ ID NO: 52649 - DNA, 1302 bp, Homo sapiens
tgttgtaatgggtactgcaagttcaacacatttttgagagtgccttacttttctaagtagtttcccaatttaggatacgcattgggtgtgttgaggtttctaaacagcttttcatactgttgtgttaatttactacagtttcacagtgtctttaattggcctttatgtacagttttttgatgtgatgcagaagtaggatgaagtaaataccatttctttttttaattagccctactgccaataaagggaaaataagagatgctcatcgacgaattatgcttttaaatcatcctgacaaaggaggatctccttatatagcagccaaaatcaatgaagctaaagatttactagaaggtcaagctaaaaaatgaagtaaatgtatgatgaattttaagttcgtattagtttatgtatatgagtactaagtttttataataaaatgcctcagagctacaattttaaaaaatgatttagcacaagctaaatctcaaagccttggtataattttcttgtttaaatttggggattttaaatcagattatagtttagaatatttgcgtattaattatgggcaagcacacaccttctgaatagaaatattgttcattactcatttagcagataatttgggacctatgtctacttttcaaggcaaagtgaagatgacagtccttgctctcagggagcccccactttaatgggagactgataaactggtaattagactgtgataaatagtatgatggaaattagcttaagctgtttaagtagggactcttcttattcggtggaaaggctgttccaggtacaggcaactggcctggcaacttggatacttggaaccttgtatttaaaagtgaatttaaccacaactgagacctaagaaattgacctaggggtgtgtgtgtgtgtgtattctatgtacatataaaccatttttatttcatgcattaaaaatagtatgataaagatttcagagtacaggtctggtacaatcacagttcattgcagcctcaacctcctgggtttaagcagtcctcccgcctcagcctcccaaagtactgggattacaggcatgagtatttacattgtattcagctagccccttaaaggtaatgaccatttataaattattccttcagttggctatttcttgacataatcaaacttctgcaattgttatgattaagcttaaaccctgttagcaaaactgaaaactgaaatgttctcaatatcaacatatttaatttggactctttagaatttatacactaataaatttaaatgatgtttaaaggcaaa

SEQ ID NO: 52650 - DNA, 1247 bp, Homo sapiens
cgacagttttccggcctagtttgcggctgctcctgccgtgttgcgtagggcgcctgtgcttgaggttgggggttgcgtcgctctctggtaaaggcgtgcaggtgttggccgcggcctctgagctgggatgagccgtgctcccggtggaagcaagggagcccagccggagccatgccctactgccaataaagggaaaataagagatgctcatcgacgaattatgcttttaaatcatcctgacaaaggaggatctccttatatagcagccaaaatcaatgaagctaaagatttactagaaggtcaagctaaaaaatgaagtaaatgtatgatgaattttaagttcgtattagtttatgtatatgagtactaagtttttataataaaatgcctcagagctacaattttaaaaaatgatttagcacaagctaaatctcaaagccttggtataattttcttgtttaaatttggggattttaaatcagattatagtttagaatatttgcgtattaattatgggcaagcacacaccttctgaatagaaatattgttcattactcatttagcagataatttgggacctatgtctacttttcaaggcaaagtgaagatgacagtccttgctctcagggagcccccactttaatgggagactgataaactggtaattagactgtgataaatagtatgatggaaattagcttaagctgtttaagtagggactcttcttattcggtggaaaggctgttccaggtacaggcaactggcctggcaacttggatacttggaaccttgtatttaaaagtgaatttaaccacaactgagacctaagaaattgacctaggggtgtgtgtgtgtgtgtattctatgtacatataaaccatttttatttcatgcattaaaaatagtatgataaagatttcagagtacaggtctggtacaatcacagttcattgcagcctcaacctcctgggtttaagcagtcctcccgcctcagcctcccaaagtactgggattacaggcatgagtatttacattgtattcagctagccccttaaaggtaatgaccatttataaattattccttcagttggctatttcttgacataatcaaacttctgcaattgttatgattaagcttaaaccctgttagcaaaactgaaaactgaaatgttctcaatatcaacatatttaatttggactctttagaatttatacactaataaatttaaatgatgtttaaaggcaaa

SEQ ID NO: 52651 - DNA, 970 bp, Homo sapiens
cgacagttttccggcctagtttgcggctgctcctgccgtgttgcgtagggcgcctgtgcttgaggttgggggttgcgtcgctctctggtaaaggcgtgcaggtgttggccgcggcctctgagctgggatgagccgtgctcccggtggaagcaagggagcccagccggagccatggccagtacagtggtagcagttggactgaccattgctgctgcaggatttgcaggccgttacgttttgcaagccatgaagcatatggagcctcaagtaaaacaagtttttcaaagcctaccaaaatctgccttcagtggtggctattatagaggtgggtttgaacccaaaatgacaaaacgggaagcagcattaatactaggtgtaagccctactgccaataaagggaaaataagagatgctcatcgacgaattatgcttttaaatcatcctgacaaaggtaagtagtcattaaattctcgttgatgttgttggtgtgaccaatagttattaatgggataattttatctcaaattcctggctattagaaaggtaacacttaaatctgtaagtcctgtctcctaggctggagccatatatttttggtgtcttaaaagaaattaagtgaaaactttacttacagaatgagcagatgtaagtgctactattactatgttttgtgggtttttctggcctacatttattataattaaaacgttaaatttcgtaaaactaaaatgtaatttttccttatccattttagataccttgaaacggagattacctagatagaaacttatgggatttatttattcgtttgtgatagacttctatgcagccttggctgtgttgaaggaaagcaagaatttctttgaataccaaaaaatagaccacagaattcatgttctagtgtttgtatccttttacttatacaggagagggctttcattaataaaaagggttttgacattttaaacag

SEQ ID NO: 52652 - DNA, 631 bp, Homo sapiens
cgacagttttccggcctagtttgcggctgctcctgccgtgttgcgtagggcgcctgtgcttgaggttgggggttgcgtcgctctctggtaaaggcgtgcaggtgttggccgcggcctctgagctgggatgagccgtgctcccggtggaagcaagggagcccagccggagccatggccagtacagtggtagcagttggactgaccattgctgctgcaggatttgcaggccgttacgttttgcaagccatgaagcatatggagcctcaagtaaaacaagtttttcaaagcctaccaaaatctgccttcagtggtggctattatagaggtgggtttgaacccaaaatgacaaaacgggaagcagcattaatactaggtgtaagccctactgccaataaagggaaaataagagatgctcatcgacgaattatgcttttaaatcatcctgacaaaggaggatctccttatatagcagccaaaatcaatgaagctaaagatttactagaaggtcaagctaaaaaatgaagtaaatgtatgatgaattttaagttcgtattagtttatgtatatgagtactaagtttttataataaaatgcctcagagctacaatcctgccaggaccgagctcgatcc

SEQ ID NO: 52653 - DNA, 1453 bp, Homo sapiens
cgacagttttccggcctagtttgcggctgctcctgccgtgttgcgtagggcgcctgtgcttgaggttgggggttgcgtcgctctctggtaaaggcgtgcaggtgttggccgcggcctctgagctgggatgagccgtgctcccggtggaagcaagggagcccagccggagccatggccagtacagtggtagcagttggactgaccattgctgctgcaggatttgcaggccgttacgttttgcaagccatgaagcatatggagcctcaagtaaaacaagtttttcaaagcctaccaaaatctgccttcagtggtggctattatagaggtgggtttgaacccaaaatgacaaaacgggaagcagcattaatactaggtgtaagccctactgccaataaagggaaaataagagatgctcatcgacgaattatgcttttaaatcatcctgacaaaggaggatctccttatatagcagccaaaatcaatgaagctaaagatttactagaaggtcaagctaaaaaatgaagtaaatgtatgatgaattttaagttcgtattagtttatgtatatgagtactaagtttttataataaaatgcctcagagctacaattttaaaaaatgatttagcacaagctaaatctcaaagccttggtataattttcttgtttaaatttggggattttaaatcagattatagtttagaatatttgcgtattaattatgggcaagcacacaccttctgaatagaaatattgttcattactcatttagcagataatttgggacctatgtctacttttcaaggcaaagtgaagatgacagtccttgctctcagggagcccccactttaatgggagactgataaactggtaattagactgtgataaatagtatgatggaaattagcttaagctgtttaagtagggactcttcttattcggtggaaaggctgttccaggtacaggcaactggcctggcaacttggatacttggaaccttgtatttaaaagtgaatttaaccacaactgagacctaagaaattgacctaggggtgtgtgtgtgtgtgtattctatgtacatataaaccatttttatttcatgcattaaaaatagtatgataaagatttcagagtacaggtctggtacaatcacagttcattgcagcctcaacctcctgggtttaagcagtcctcccgcctcagcctcccaaagtactgggattacaggcatgagtatttacattgtattcagctagccccttaaaggtaatgaccatttataaattattccttcagttggctatttcttgacataatcaaacttctgcaattgttatgattaagcttaaaccctgttagcaaaactgaaaactgaaatgttctcaatatcaacatatttaatttggactctttagaatttatacactaataaatttaaatgatgtttaaaggcaaa

SEQ ID NO: 52654 - DNA, 1341 bp, Homo sapiens
cgtgcgtgacggggaagaacctggcgtgctccgggaagcaagggagcccagccggagccatggccagtacagtggtagcagttggactgaccattgctgctgcaggatttgcaggccgttacgttttgcaagccatgaagcatatggagcctcaagtaaaacaagtttttcaaagcctaccaaaatctgccttcagtggtggctattatagaggtgggtttgaacccaaaatgacaaaacgggaagcagcattaatactaggtgtaagccctactgccaataaagggaaaataagagatgctcatcgacgaattatgcttttaaatcatcctgacaaaggaggatctccttatatagcagccaaaatcaatgaagctaaagatttactagaaggtcaagctaaaaaatgaagtaaatgtatgatgaattttaagttcgtattagtttatgtatatgagtactaagtttttataataaaatgcctcagagctacaattttaaaaaatgatttagcacaagctaaatctcaaagccttggtataattttcttgtttaaatttggggattttaaatcagattatagtttagaatatttgcgtattaattatgggcaagcacacaccttctgaatagaaatattgttcattactcatttagcagataatttgggacctatgtctacttttcaaggcaaagtgaagatgacagtccttgctctcagggagcccccactttaatgggagactgataaactggtaattagactgtgataaatagtatgatggaaattagcttaagctgtttaagtagggactcttcttattcggtggaaaggctgttccaggtacaggcaactggcctggcaacttggatacttggaaccttgtatttaaaagtgaatttaaccacaactgagacctaagaaattgacctaggggtgtgtgtgtgtgtgtattctatgtacatataaaccatttttatttcatgcattaaaaatagtatgataaagatttcagagtacaggtctggtacaatcacagttcattgcagcctcaacctcctgggtttaagcagtcctcccgcctcagcctcccaaagtactgggattacaggcatgagtatttacattgtattcagctagccccttaaaggtaatgaccatttataaattattccttcagttggctatttcttgacataatcaaacttctgcaattgttatgattaagcttaaaccctgttagcaaaactgaaaactgaaatgttctcaatatcaacatatttaatttggactctttagaatttatacactaataaatttaaatgatgtttaaaggcaaa

SEQ ID NO: 52655 - DNA, 235 bp, Homo sapiens
gtccccacccaaatctcatgtcaaactgtaatccccatgtgtcaggggaggggcctgatgggaggtgattgaatcatgggggccgacttcccccttgctcttctcatgatagagttctcatgagatctgggtgaaagtgtgtaacacttcccccttcactctctctcctgttctgacatatgaagacatacttgcttccccttcacctttcaccatgattgtaactttcctgagg

SEQ ID NO: 52656 - DNA, 396 bp, Homo sapiens
cagatttctgctatgattttgactcatatgttatttggtgatgtattttaattctttaattttttgagatagagtcttgctctgtcattgaggctggagtgcagtggtgtgatcacggctcactgtagcctcaacctcctaggctcaagcgatcctcccacctcagccactggagtagctgggactacaggcacatgccaccacttttggctaatttttgttgttgttgttgtttttgtattttttgtagagacagggttttgccatgttgcccaggctggtctcaaattcctgggctctactgatcctcctgctttggcctcccaaagtgctagaattacaagtgtgagccaccatgccaagcctagtgatatatttctaaataactgaaaaaaa

SEQ ID NO: 52657 - DNA, 518 bp, Homo sapiens
agaacacacaataattttaaagcctctccttttaacattctcatataagcatgagcaatgctgaatccccctgtacaaggaagcaactatattcctgctcagatattgcaccaattatagggagcttatggcaacccaaattacacagggaccagtcacccaagtgctctgtggaagcttaatggggcttcttttggaaaggaggacaatccaatacagcactaatggcaaagagaaaaatgctaaagcaagccaagagaaatatagcagccatctgatgacagctgagggaacaaaacaaaaagctggccccaaaacgcagactgaccaacaaaatgggaagaactctactatgacttctacttcagtgtggataaatgtgaactcataaagaaattacagtaaaaagctatttctgaaaacatcagccactacaggaagtactcaagtcacttagcaaacattgagcacctctaagttgtacaaggcttccactcaataaataataaaaaccaaaa

SEQ ID NO: 52658 - DNA, 850 bp, Homo sapiens
gaggtgatccgcagggccaagcaggacctggagcggctaaagaagaaggaggtcaggcagcggaggaagagccccgagaaggaagccttcaaaaagagggcaaaactccaacaggagaacagcgaggagacggatgagaacgaggcggaggaggaggaggaagagcgagacgagagtggctgtgaggaggaggaagggcgcgaggatgaagatgaggactcgggcagtgaagagagcctggtggactcagactcagaccccgaggagaaggaggtgaacttccaggcggacctggccgacctgacttgtgagatcgaaatcaagcagaagctgatcgacgagctggagaacagccagcggcggttgcagacgctcaagcaccagtatgaggaaaagctgattctgctgcagaacaagatccgagacacacagctggagcgcgaccgtgtgctgcagaacctcagcaccatggagtgctatactgaggagaaggccaacaagatcaaggcagactatgagaagaggctgcgggagatgaaccgggacctgcagaagctgcaggccgcccagaaagagcacgcccggctgcttaagaaccagtcgcgctacgagagggagctgaagaagctacaggccgaggtggctgagatgaagaaggccaaggtggccctgatgaagcagatgatggccctttcagtcatgacggttgccagcccatggccatagccatgtatagtagctctcaaccatgtcacctatcaggatactgataattggtttaatgtctatctgtgaacaggtggatgactgttcgtcagtatgtctggtaaggaacctactagatcaccac

SEQ ID NO: 52659 - DNA, 712 bp, Homo sapiens
agcgaccgcccttttggcagggatcattgaccctgatctattcgtcgggaggaggaagggcgcgaggatgaagatgaggactcgggcagtgaagagagcctggtggactcagactcagaccccgaggagaaggaggtgaacttccaggcggacctggccgacctgacttgtgagatcgaaatcaagcagaagctgatcgacgagctggagaacagccagcggcggttgcagacgctcaagcaccagtatgaggaaaagctgattctgctgcagaacaagatccgagacacacagctggagcgcgaccgtgtgctgcagaacctcagcaccatggagtgctatactgaggagaaggccaacaagatcaaggcagactatgagaagaggctgcgggagatgaaccgggacctgcagaagctgcaggccgcccagaaagagcacgcccggctgcttaagaaccagtcgcgctacgagagggagctgaagaagctacaggccgaggtggctgagatgaagaaggccaaggtggccctgatgaagcagatgatggccctttcagtcatgacggttgccagcccatggccatagccatgtatagtagctctcaaccatgtcacctatcaggatactgataattggtttaatgtctatctgtgaacaggtggatgactgttcgtcagtatgtctggtaaggaacctactagatcaccac

SEQ ID NO: 52660 - DNA, 821 bp, Homo sapiens
gaggtgatccgcagggccaagcaggacctggagcggctaaagaagaaggaggtcaggcagcggaggaagagccccgagaaggaagccttcaaaaagagggcaaaactccaacaggagaacagcgaggagacggatgagaacgaggcggaggaggaggaggaagagcgagacgagagtggctgtgaggaggaggaagggcgcgaggatgaagatgaggactcgggcagtgaagagagcctggtggactcagactcagaccccgaggagaaggaggtgaacttccaggcggacctggccgacctgacttgtgagatcgaaatcaagcagaagctgatcgacgagctggagaacagccagcggcggttgcagacgctcaagcaccagtatgaggaaaagctgattctgctgcagaacaagatccgagacacacagctggagcgcgaccgtgtgctgcagaacctcagcaccatggagtgctatactgaggagaaggccaacaagatcaaggcagactatgagaagaggctgcgggagatgaaccgggacctgcagaagctgcaggccgcccagaaagagcacgcccggctgcttaagaaccagtcgcgctacgagagggagctgaagaagctacaggccgaggtggctgagatgaagaaggccaaggtggccctgatgaagcagatgcgtgaggagcaacagcggcggcggctagtggagaccaagaggaaccgggagatcgcacagctcaagaaggagcagcggcgacaggagtttcagatccgagctctggagtcccagaagcggcagcaggagatggtcct

SEQ ID NO: 52661 - DNA, 505 bp, Homo sapiens
gaggtgatccgcagggccaagcaggacctggagcggctaaagaagaaggaggtcaggcagcggaggaagagccccgagaaggaagccttcaaaaagagggcaaaactccaacaggagaacagcgaggagacggatgagaacgaggcggaggaggaggaggaagagcgagacgagagtggctgtgaggaggaggaagggcgcgaggatgaagatgaggactcgggcagtgaagagagcctggtggactcagactcagaccccgaggagaaggaggtgaacttccaggcggacctggccgacctgacttgtgagatcgaaatcaagcagaagctgatcgacgagctggagaacagccagcggcggttgcagacgctcaagcaccagtatgaggaaaagctgattctgctgcagaacaagatccgagacacacagctggctcaatcactagtgaattccggccgcctgcaggtcgacaatatggagagctcccaacagcgttgatgca

SEQ ID NO: 52662 - DNA, 1332 bp, Homo sapiens
aatctttgattctatgtttttgatcctcctggcactccagacctgggtgatgtgcaggagagcacactgatagaaatccttgtgtccagtgcccagcaactcctgcctcagcctcccgagcagctgggactacaggcgcccgccaccacgcctggctaacttttttgtatttttagtagagacgggttttcaccgtgttagccaggatggtcttgatctcttgaccttgtgatccacctgcctcatcatcccaaagtgctgggattacaggcgtgagccactgcgcccagcatgttagacaatttttaattcatcctctctgtgctgttgttttctcagctgtgaaaggaatattctggtggggacaaggttacagagttgctgagagggtctcatgacatgaaggtactggccttggcacagtgcctgggggggcggggactccgcacatgcctgtgatgtcacagttactgtcagttcacagcgaaccttccctccttttcctgttgactttcccacactcctgtaaccctccctccctcccttcttcctctctctctctctcactcacgcacacgcacacacacacacacacacacacacacacactccattctctgtctccatgactctggagtaaactaacgtctcgagttgccatttggaagccccattgtcctcattttgtttgtgtttgtgttgtgtttgagacgggggtctcgctctgtcccccaggcgtggagtgcagtggtgcgatctcagcccacgtgcagtctccgcctcctaggttcaagcgattctccgtgtctcaccctcctgagtagctgtgatcataggtgcccgacaccacacccgactaatttttgtgttttttagtagagacagggtttcactatgttggccaggctggtctcaaactcctgacctcaggtgatccgcccaccttggcctcccaaagtgctgggattacaggagtgagccaccatgcccagcctccgttgtcctcatttagactttcatgggttataggcacttttgacttcctggggtccttcttcagttaaaaaaaaaaattagaaaattaggccgggcgtggtggcacatgcctgtaatcccagcactttatgaggccgaggtgggaggatcacctgaggtcgggagttcaagaccagcctgaccaatgtggagaaaccccgtccctactaaaaatagaaaattatttgggtgtggtggtgcatgcctgtaatcccagctactcaggaggctgaggcaggagaatcgcttgaacccgggaggtggaggttgcggtcagccgagatcatgccactgcac

SEQ ID NO: 52663 - DNA, 663 bp, Homo sapiens
aatctttgattctatgtttttgatcctcctggcactccagacctgggtgatgtgcaggagagcacactgatagaaatccttgtgtccagtgcccagcaactcctgcctcagcctcccgagcagctgggactacaggcgcccgccaccacgcctggctaacttttttgtatttttagtagagacgggttttcaccgtgttagccaggatggtcttgatctcttgaccttgtgatccacctgcctcatcatcccaaagtgctgggattacaggcgtgagccactgcgcccagcatgttagacaatttttaattcatcctctctgtgctgttgttttctcagctgtgaaaggaatattctggtggggacaaggttacagagttgctgagagggtctcatgacatgaaggtactggccttggcacagtgcctgggggggcggggactccgcacatgcctgtgatgtcacagttactgtcagttcacagcgaaccttccctccttttcctgttgactttcccacactcctgtaaccctccctccctcccttcttcctctctctctctctcactcacgcacacgcacacacacacacacacactccattcagtgtctctatgagtctggagtacactacagcgtctcgacgtcgccatggggcccgcgg

SEQ ID NO: 52664 - DNA, 403 bp, Homo sapiens
gttgttttcacacttcactgaggtttaggattgcaaggcatcttctaagttttgtctcattgcccttgattccttgctgtcttataatacaactacaagcctcaaaagaaccaaaacgaagctgttctcttccatcctcactgccttagaatgtgttgtgttcttagcagaaatgagaagaggagccctcttcttctagagtttaggtgtagtcttggagaccctccttactctcctccactgattctgcccttggccctcggtgcctaagtttctcctctatgcccttctctgcatgcaaaacaagcagacatctctgggtcaccagcatcaccaatttctcaaacagacccacacttagcttaggaccaccccagtgctcctcagcctctgcagccaggca

SEQ ID NO: 52665 - DNA, 439 bp, Homo sapiens
agaaggtggaatcatcaagttagcctgttttctttactagattataaactctttcaaactagggactatgtcttcatctctgaaccccttacaacctttagcatgatgtcttgccagatgttcggtgtctgtagaatgtcaaacatccatgcttgcatacattgcaagggaagttgggctaaacacttctaccatcctgccttcttctaagagttaattattattactatttttttttcttagacagagtcttgctctgtcacccaggctgagtgcagtggtgtgatctcggctcactgcaacctttgcctcccaggttcaagtgattcttgtgcctcagcctcctgaatagctgggattacaggcgcccgcctccgtgcccggctaattttttgtatttttagtagagacgaagttttgccatgttggcctggctggt

SEQ ID NO: 52666 - DNA, 328 bp, Homo sapiens
acaaaatcaatattaatataaaatcaactgctatatttttaaagagtagtgtttggattacataagcaatcataaaactcccgttggctttagcaagaggtttagtcctgtaaactccaaaggttttctgtgtgtgctgagcagacaagcatcctaacagaataagccagaactttcctagccatcctagcatgtttgtgccttgtaagatattcccagttacatcctttaatttgccaaagggcagaaaaagaatttggtaagttaactttcccacatgcacaaatttaactgctgttttggtattccacacaggggccagattgga

SEQ ID NO: 52667 - DNA, 348 bp, Homo sapiens
gtgtgtgtgtgtgtgtgtgtgtgtgtgtgtgtgagagagagagagagagagtatgagtgtgtgcctggcaacggtgaaatcagtaagaggttaacaagttcttttgtttccccagttgaatttaggcatagtaagtaaacaaaccgacattttaacatgtgcttcagaaaacgggaaaggtaaaagtcacttccaaaaggcccaagaaatgtgcacatttatagcaaagcaagggtgagtggaatttgagtacataatatagagaagcaaacctatggtagtaccaaaaattccgccagtgatcattcctgggcttcaggacctgccatgatgccctggaaatgaggc

SEQ ID NO: 52668 - DNA, 697 bp, Homo sapiens
ccacatgcttttcatcacccgctctcacatcccatctggggcctctgcttccatcctaccatttcgcaagcctggccaactcaagctccgtgtgctgcacctagagcagcccatctctgtgtcagggaggtgagctgctcagttgccagagtatcaacctgagcccaggacactgccagactgctgagtcaaagagggtttagcagcccattttcatagacagacaggtgagaggaggatgctggacatggtcccagagacatggggactcaagaaacatgaagatctgttcacagctaagggcacatttccatgccgagaaatcaggcgtgagcgcaagagtcctatcgtctaccagaaaaagaaatctttgggagaactgcaatccaagcaaatgtggtgggtgtgaagctttcaagaagttgggtcaagaacaaggactgaaagaggagcatcaatttgtaagttcaggaatgtctgctccatctttgcagagacaagcaaatatcagggaccacccaagtccattcattgtgaactaagtgaatcatgacacaaccacacaatggaacaccgtgcaggattatgatatacagactgctgaagatctagagttattgatatggaaagatgcccatgatgtattgttagcaaaaaaaatcagcctacaaaacaacatgcatagcataatcctatt

SEQ ID NO: 52669 - DNA, 793 bp, Homo sapiens
ccacatgcttttcatcacccgctctcacatcccatctggggcctctgcttccatcctaccatttcgcaagcctggccaactcaagctccgtgtgctgcacctagagcagcccatctctgtgtcagggaggtgagctgctcagttgccagagtatcaacctgagcccaggacactgccagactgctgagtcaaagagggtttagcagcccattttcatagacagacaggtgagaggaggatgctggacatggtcccagagacatggggactcaagaaacatgaagatctgttcacagctaagggcacatttccatgccgagaaatcaggcgtgagcgcaagagtcctatcgtctaccagaaaaagaaatctttgggagcattcaaggaggaatggcttcatgatggcaatgagcggcatcgcctgaaagacagccttcgagagtctcccagagccgctgaggagcaaggcagagaactgcaatccaagcaaatgtggtgggtgtgaagctttcaagaagttgggtcaagaacaaggactgaaagaggagcatcaatttgtaagttcaggaatgtctgctccatctttgcagagacaagcaaatatcagggaccacccaagtccattcattgtgaactaagtgaatcatgacacaaccacacaatggaacaccgtgcaggattatgatatacagactgctgaagatctagagttattgatatggaaagatgcccatgatgtattgttagcaaaaaaaatcagcctacaaaacaacatgcatagcataatcctatt

SEQ ID NO: 52670 - DNA, 850 bp, Homo sapiens
ccacatgcttttcatcacccgctctcacatcccatctggggcctctgcttccatcctaccatttcgcaagcctggccaactcaagctccgtgtgctgcacctagagcagcccatctctgtgtcagggaggtgagctgctcagttgccagagtatcaacctgagcccaggacactgccagactgctgagtcaaagagggtttagcagcccattttcatagacagacaggtgagaggaggatgctggacatggtcccagagacatggggactcaagaaacatgaagatctgttcacagctaagggcacatttccatgccgagaaatcaggcgtgagcgcaagagtcctatcgtctaccagaaaaagaaatctttgggagcattcaaggaggaatggcttcatgatggcaatgagcggcatcgcctgaaagacagccttcgagagtctcccagagccgctgaggagcaaggcagctcccccacctacattccaccatattgaagggcttacctgtctggtgccagcaaaggagaactgcaatccaagcaaatgtggtgggtgtgaagctttcaagaagttgggtcaagaacaaggactgaaagaggagcatcaatttgtaagttcaggaatgtctgctccatctttgcagagacaagcaaatatcagggaccacccaagtccattcattgtgaactaagtgaatcatgacacaaccacacaatggaacaccgtgcaggattatgatatacagactgctgaagatctagagttattgatatggaaagatgcccatgatgtattgttagcaaaaaaaatcagcctacaaaacaacatgcatagcataatcctatt

SEQ ID NO: 52671 - DNA, 564 bp, Homo sapiens
atgaaaaacagcatcttgtcatttctagatgtttctactttggttgactctttaatttttctgcagttaaaagccttaaaacagcaaggaagcaggggacaggaggggagcccagatctctcccaaagaaaaggagaaagactgaatccttgaggcctgccgtacaaaggagtggtgggttggaggagggtaggcagagactagggtggtctgggactttaagtacaaggccccgtggatttcattggggggcaagccatgtgcaacagggaagctcaggaaccggggggtttcgcacagaggtctggtgctgtgaggtacagggaaagaattagtggatctggaccagtggaacattggtttagtgtaatctctgatttgtgttgagtgaatttgagtatagtccaaccaccacccccctaccccaactaaaccatgtgcccctcaggagctgggactcttctattttctattccttatagcaggctcagtgcctgacacactacgttgaattttattttaaacatttcatttacattaaatggtatatttgcaagttcattc

SEQ ID NO: 52672 - DNA, 319 bp, Homo sapiens
ctcaggtggcagatgtttgagaaaaggaattatgccaggaaggtgggaccgggttatggtcgggtttcacgtgactcagcagtgcccgccgccgtcaccagctatgcattcactccgtttccagtgagcagatgtcttgcttggaaagtggacctgtgtctgtgtctgtcctgagaacttaccagcagaaatcctcatttctgtgctacggatttaccaaaaattgtcaagtctttttcagtttaacagttcctttaaatgtgtagtatttgaggaaaaaaatcaataaacagttgatctcgtgcaaaaaaaaaaaaaa

SEQ ID NO: 52673 - DNA, 1030 bp, Homo sapiens
ctcaggtggcagatgtttgagaaaaggaattatgccaggaaggtgggaccgggttatggtcgggtttctattgggaatgctctttgtgcttttgggcatctgaatggaagctttacatagaaccttaggtagaactcccccaaatcgccatatttaaaaattattttcactctattcttgcttaaaactgtactcttttgcaaattaacaattttatcactgattcagagttaaaaagaagactaacttttcaagcaaatgcatctgtaaagatgctttagattagactgtcatgtctcagtgtctatctgtatatattatttgatattcagagaatctaaagcactcgtctactgttttaatgagatttaacagcttttaacagtgagtttcgtttgtaaactgcttgaagtctgtggcattcaggcacacatctggctggccggctgggtctcctcccgggctcagtgggcctggggcctctctgacgtggtgcctgctggagggaggctcgtcgtcaccagctgactgctggtccggcttctgaccggcctttgtcctggctccgtagcagaacactgtaaaagtgcccgcgtctttgcagtagttgcagatttcagtcgtcgtgttacttgtgcacaaacagaagctgggtcttacccgcagcacgagtgtctcgggctgcccggagtcgcccgggagcaggtgctgcagccagagttacgcgggggccacgcgggccggcgggggtggggggaacgtgggggaacctgtgtttcacgtgactcagcagtgcccgccgccgtcaccagctatgcattcactccgtttccagtgagcagatgtcttgcttggaaagtggacctgtgtctgtgtctgtcctgagaacttaccagcagaaatcctcatttctgtgctacggatttaccaaaaattgtcaagtctttttcagtttaacagttcctttaaatgtgtagtatttgaggaaaaaaatcaataaacagttgatctcgtgcaaaaaaaaaaaaaa

SEQ ID NO: 52674 - DNA, 1307 bp, Homo sapiens
  misc_feature (1307)..(1307): n is a, c, g, or t
ctcaggtggcagatgtttgagaaaaggaattatgccaggaaggtgggaccgggttatggtcgggtttctattgggaatgctctttgtgcttttgggcatctgaatggaagctttacatagaaccttaggtagaactcccccaaatcgccatatttaaaaattattttcactctattcttgcttaaaactgtactcttttgcaaattaacaattttatcactgattcagagttaaaaagaagactaacttttcaagcaaatgcatctgtaaagatgctttagattagactgtcatgtctcagtgtctatctgtatatattatttgatattcagagaatctaaagcactcgtctactgttttaatgagatttaacagcttttaacagtgagtttcgtttgtaaactgcttgaagtctgtggcattcaggcacacatctggctggccggctgggtctcctcccgggctcagtgggcctggggcctctctgacgtggtgcctgctggagggaggctcgtcgtcaccagctgactgctggtccggcttctgaccggcctttgtcctggctccgtagcagaacactgtaaaagtgcccgcgtctttgcagtagttgcagatttcagtcgtcgtgttacttgtgcacaaacagaagctgggtcttacccgcagcacgagtgtctcgggctgcccggagtcgcccgggagcaggtgctgcagccagagttacgcgggggccacgcgggccggcgggggtggggggaacgtgggggaacctgtgtttcacgtgactcagcagtgcccgccgccgtcaccagctatgcattcactccgtttccagtgagcagatgtcttgcttggaaagtggacctgtgtctgtgtctgtcctgagaacttaccagcagaaatcctcatttctgtgctacggatttaccaaaaattgtcaagtctttttcagtttaacagttcctttaaatgtgtagtatttgaggaaaaaaatcaataaacagttgatctcgtgcaaaaaaaaaaaaaaaaaaaaaaagaaaaaaaaaaaaaaactgcgggggcttttgtgtgggggggggggaaaaaggggggtaggaaaagggggcgacaccggggcggccaaacacgaggtgtcccctagcggaccccagggtcgtcgtgcgtgccccaacgaaggggggaaacaacccagacgggaagacccccaatagtggagagggccgcatcacaaactttgcgaacaaacgcgcggggtatccccgggaataaagtgattctgccacaaagaagagacacgacaacgn

SEQ ID NO: 52675 - DNA, 345 bp, Homo sapiens
ggagaagacaaattgattttagatttaagatcaggggaacaatagcaaaataaaatgtttttagttgttttcaaattgattccattaaacttttaagtgttatattcaaggcactatgctagtggctttggataaacagatatttaataaaacatgatacttgtacattctacaaaattgtatactaaaaataatggattattaaaaaatagggttgggtgcagaccactcaaaatctgtgcaacattgacccatggtacccagaacacaagggcttggacagcccaggcaggcagctcagcataggtggaggttgccatagattatattaaattaaaaatgcac

SEQ ID NO: 52676 - DNA, 345 bp, Homo sapiens
ctgtgagggcacaagtgtaggtatcttttcaagttctctaggtgattctagaatgcagcagggttgagatgctctgccttaggggtagagaggtgggaacactgacaggttctgcaaaacatctctgaacagctgctggtgtctttttctgtacttcaagtttcacggcacatctgatagctgtgccgaaagggaagagagaattacgtgggctaggctggtttgaaggtttgcgtaagttttggcttgagcgacttaacacgtttatttcaaagtaatttgtgtttgtagcctcactaaagtaatttggggccagaaaggttcaaaatacgttttcctacttag

SEQ ID NO: 52677 - DNA, 450 bp, Homo sapiens
agaatgagtaaggcagagtagaattttattaagtgacagaaagaaagctctcagcatcaagaaaagactcaaaaataggaagccatctgtaaggctgagtccagggttttttatgggcttagaatggggaagtgcatgctgtttggtctatgggtgggcttgggaaaaagcaccatttgactggttaaaaggcatcattcagaaggaaccagtcgagagagaaagtggataagatggggatggaagttctcactctggtcatggattctatctgaaactggcagcttgattttcaggctttaaactatccttggcttgaaggcggagtttcaccagggatctgtccttgtctacctaggaatttgtctgtctcctgtcactgtgataaagagacgtggcacatatttatgctttaaagactgactggagtcttagaagttaatacgaaaa

SEQ ID NO: 52678 - DNA, 186 bp, Homo sapiens
gatagagcaggtcggcttgcagaagggatgcagtggacaggcagctgactcctcagaagggccccagaattgggtgtcccatattgtatgatgtgaggatgaggtacaaggatgaaaggaaggattgattgacattctctaaattaaagggttgggacccaggtctcctgtcccatcctgaacagc

SEQ ID NO: 52679 - DNA, 206 bp, Homo sapiens
agctaatcttattcccattttacagatggggagactgagacccatcatagttaggtaacttctccagagttactctactggtaagtggaagagctaggattgaaaaccatgtttccgtgagcccttcactcatattcatcctgctatactgcaaggggacagtgagagaaaaacccgaaagaagcagaagaaggagaacattaaat

SEQ ID NO: 52680 - DNA, 175 bp, Homo sapiens
tggggcagctaggaaggggcagattaatggaaatagcaatactgggcctgggcagcctccctttgaagaccaccctctccaggagactcctgcattggcttctctcagtggcacctcggggtttccgccagagttgctgggttgcctaattacctccaatattttttcctcttag

SEQ ID NO: 52681 - DNA, 351 bp, Homo sapiens
ggtgagacagagtgggtatgaaaaaacatataacctgaaaaatctacttatatatgctaaactaataaacctgagggatatgcagggggaaaaaatcaaattttaaggaaatcctaacacagaaaataaattcacaatgaaataaaaacataaaattgtgcaagcaaaataaaaatactacacttaaacataaaatatacttgttaaaatatggtaactctttaccccacaattaaaaaagctttaatcaccagtctgatttctatttattttgcactgagattctttcctatgagaaatacatcacagttgatttactttaaaagcaagcccatttagtgtttgaaatta

SEQ ID NO: 52682 - DNA, 712 bp, Homo sapiens
gccagggcactgagtctgtcaccaactgggcactggagagatgaaaccaaaggtgggcaggggttggcgacagcactggggactatccctgtgggtcctaggtctgtgaagcccctccccaatgcctgtgtcgcgtacagttttatgtaccaataggcgacatttggccagaggagagcccccctcaaacccagcctgacccagtctgtgtcttcccagaggggacctagtcggtccccatccccctacttcagggcatgtctctccgtagggggagggtatatggggacatatttctctcctagggtccttgaagcatgtttcacattccggggtggggggaagttctctgggcatccctcacctctggggtctctctaggccctatctctccccttgggagtctccgggggacatgtgttcccgctgaggaccacgggagcatgtctcccccaattacccaggctctctggggagcctgttttcctcccagggttcctgggagtacttaaggcaagtcagtttcgggccatctctcttcccagggaagggggctatctctgaaacacgtctgggaagggatgtttctggccctacccccatctctcctatgggggtttctctgccctgcagcactttaggatgaggctgggcatctctgagttgtcttttctcctaggagccctgggatacctctctctcccgagggtag

SEQ ID NO: 52683 - DNA, 617 bp, Homo sapiens
gaaactatcctaagcatgttatggacattgtatcatttagtccttacagaattgtattgagtacttcagactttaaaaccaaatcactttgactccaatttagccattgtactaaccatactgtgatcaggtaacttctgaggtatagaaattcatgtgttaaacatctgagggattcttaaattttgatggatgctggagatatagtggtgagcaaagggagacagaacctcagatctcatgccacttacaacattttgaagtacatagacattaatacaataaatacatatttacagactgaggtcagtactatgaagatgagttctgagatcctttaataaaagcaagtttctggtcccaggcacagtggctcatgcctgtaattctagcaattttggaggctaaggtgggaggatcgcctgaggccaggagtttgagaccagcctgggcaatatagtgagaccctgctgctacacaaatttaaaaaaaaacccattagctgggaatgatgatgcacacctctagtcctagctactcaggaggctgaggcaggaggatcgtttgggcccaggagtttaaggctacaagtgagctatgattgggccactgtactc

SEQ ID NO: 52684 - DNA, 652 bp, Homo sapiens
ttactatataagtatatatgaagttttattataaggaatattaatatggtaccgtgaattgttaattaaggactaagaatctaaactttctggaatatgattatgtccaaaccattaagatgaaagtgcttcatatgcattctaaacaataccttcggtcagatgtgggattttctttttcctgtaaatgttgatgcaaattcctttaatgaattttgtatgatgcagcctttgagttaaacagcaagtagtaaagggtaaaggaaagaaagacgataaaaacttgttcaccttttcaccgaaattcgtagtatagaatacagcattgcttcctgggatcacaggcagcttgaccccgagaggtaggtccagtagctgagccggtccaacccctgcaaagtgggttttgtgcacgccctgtcagacacaattggagagttttgtctttccttttaggcagtattagtttagtttagaccaatctacttccattgcaaccaaagactccgaagaattatacaatcagggttcggggcatcctgaagtcctcccgttttccctggtcaccagctctcctggcgtcccgcgcctgccagttgcggccggtacagtccgagccaccgccaccgcccccgggcgccgcaagagggca

SEQ ID NO: 52685 - DNA, 1770 bp, Homo sapiens
ggccttgaactcggggctcaagccgtcctcccacctcagcctcccaaagagctggtattacaggtgtgagccaccagccatggttagttttcatcaactgctttctcaccttcttttcatcctctaattcatacctgcaatccttattagaaatcctgtcaacttaatagtaccagaaagtcaggcaaaagactgataaaaaaaaagcctcggtggtcaagaacttaaaattacactactggtgtgcaacgtgctcttatctgtgttactggaggacaccctcaagatacctcactccagttgactccttggctctaaatctttgagttaaaaaataaggaggttctttatggaataaacaggtattaagctatttaaaggagagggctgcgaaatgcttgattatgggcttttcaagttcagaggccaagcgtttgtcattttcttccagtaactaggactgtgtcttgcccctaatagttactcagactatatttgcttaattgaattaaacacagttgcctatgccctttgaaattctggactttcaacagagggcctctagcccaatatttgcttaccaaactggacatcattgatgatctggattcaggcagggtctggaaaaagagagactgggccaaattaaaataatccattcactgatgacacaaaactaaactacaattgtttggcaccctctcttctccttatcttgcaaaatcaaattaagcactagtggaaagaaacagttcagagaggaatatggggaaaggaaaaaaaaaaaccaaaatgtgatttccaacgagactagagatttgttctttatctacatggtcatgttactcatttgatagcatctatctcaggggtattatgttatctcttggccaggactcatgaaagttaagatttgcattgataggaaaagttttgcagaaatatggactcttgagagggtgggaggtatataaaaagcggcagagcaatttgcatttcttatacaccctgcttgagactgatgtcattagtgttggttaggccaaggctgggggaggctactcagaatagtgggtgaccaattacccagaacctttggaaaaggaaatgacttgattgaagaggccattctttaaatgtatcttactgctcaatttcaccattgcctattgtagaatgcgcgctgcccgctcagcatttgcctctaggcagaccaggactccttcccctccccaactaatcttccttctcctgtatcttattccctagggccacttgcacctttcaaaatggataaattaaattcccctgctccccttctaccaactttaacatcatatccttggtgtatgatgccctacttttcattgttttgcctaaataagagtatgcttgggaattttaggcttagggctgggaaaagatgggatatggaatcgtcagctatagattgccggacaagaaattttaggagcagtagacctttcaaccgccctcaataggatggaactgactgtccccacaacctatttccctttcagtggcttgctccagccaaggccccttatttaagagatctttgtgcgctctgaaaaccatgcatatgccagaactaggtgctctgtttcatgaaggcagtttgataactgaatggactttggaagtgcccagtgtttgactattaccctggtgcgatgatcacactgggcgtatcattgtcacatgatcccatgtttgttgatgaaaataaacagtggttttcaaaaacca

SEQ ID NO: 52686 - DNA, 2458 bp, Homo sapiens
ggccttgaactcggggctcaagccgtcctcccacctcagcctcccaaagagctggtattacaggtgtgagccaccagccatggttagttttcatcaactgctttctcaccttcttttcatcctctaattcatacctgcaatccttattagaaatcctgtcaacttaatagtaccagaaagtcaggcaaaagactgataaaaaaaaagcctcggtggtcaagaacttaaaattacactactggtgtgcaacgtgctcttatctgtgttactggaggacaccctcaagatacctcactccagttgactccttggctctaaatctttgagttaaaaaataaggaggttctttatggaataaacaggtattaagctatttaaaggagagggctgcgaaatgcttgattatgggcttttcaagttcagaggccaagcgtttgtcattttcttccagtaactaggactgtgtcttgcccctaatagttactcagactatatttgcttaattgaattaaacacagttgcctatgccctttgaaattctggactttcaacagagggcctctagcccaatatttgcttaccaaactggacatcattgatgatctggattcaggcagggtctggaaaaagagagactgggccaaattaaaataatccattcactgatgacacaaaactaaactacaattgtttggcaccctctcttctccttatcttgcaaaatcaaattaagcactagtggaaagaaacagttcagagaggaatatggggaaaggaaaaaaaaaaaccaaaatgtgatttccaacgagactagagatttgttctttatctacatggtcatgttactcatttgatagcatctatctcaggggtattatgttatctcttggccaggactcatgaaagttaagatttgcattgataggaaaagttttgcagaaatatggactcttgagagggtgggaggtatataaaaagcggcagagcaatttgcatttcttatacaccctgcttgagactgatgtcattagtgttggttaggccaaggctgggggaggctactcagaatagtgggtgaccaattacccagaacctttggaaaaggaaatgacttgattgaagaggccattctttaaatgtatcttactgctcaatttcaccattgcctattgtagaatgcgcgctgcccgctcagcatttgcctctaggcagaccaggactccttcccctccccaactaatcttccttctcctgtatcttattccctagggccacttgcacctttcaaaatggataaattaaattcccctgctccccttctaccaactttaacatcatatccttggtgtatgatgccctacttttcattgttttgcctaaataagagtatgcttgggaattttaggcttagggctgggaaaagatgggatatggaatcgtcagctatagattgccggacaagaaattttaggagcagtagacctttcaaccgccctcaataggatggaactgactgtccccacaacctatttccctttcagtggcttgctccagccaaggccccttatttaagagatctttgtgcgctctgaaaaccatgcatatgccagaactaggtgctctgtttcatgaaggcagtttgataactgaatggactttggaagtgcccagtgtttgactattaccctggtgcgatgatcacactgggcgtatcattgtcacatgatcccatgtttgttgatgaaaataaacagtggttttcaaaaaccattttcagtgccatggtttgtcataaaacaataaatagaaaagcgcttgatgtacctgccaacttttcacccctatctaagagatggcgaagctccggctgcactctgtctgcaaataaggaataaaactttttatttgtgctatattggactttgggttccaaagcatcacattgtttatggtaggtacatgtggagtcactgtatttataattataagagcaaactggtgccattggaaaaaatggtctttctaaatagtgtgtgaaatatgaaactagtgaagaataaaatcaatatggaaatgtaaacttctatgaaaacatttccttacccatttaagtttgtgcattctgaaatttacaatggccatcaaacccagtgactcaaagctattggaaagatatctgtccttttaaatcctacacttacagctaaacaacgtatgggttcttttccctttatctctggaaaagcccgactgagctggaatttgctccccaaaggaaagacatcaggcagaatcctcagagaaaggggcttagggaccccagtagaaataaaatcaggatagtagtgccaattcatttctggggctgctggagaagttaggcttctgggatcattcatccatgtatcaatattaataaaataaattcttctattgccaggactgtcaggaatagcta

SEQ ID NO: 52687 - DNA, 333 bp, Homo sapiens
attctgcccagctgcttatcaggtgttgaatacatggcactagaaatggcccaagagccaggatctgcagtaggcatggggaggggagtgtgcaattgcatctctgttacccttctgcccagtttctaatgggcagctcttccagggtagtcaagaggttgctctacgtgatagcagatacagcagagggagaggaggctgtggagtccatagccagggaaggtgaatgctctgggcttcctccacagaaagaaaggatagctccagtagcatagggacccttctacaaccctctgcatcctgtgcaaagtcttttctttgacccaaaaaggg

SEQ ID NO: 52688 - DNA, 241 bp, Homo sapiens
ttgcattcctcccctaaattggagatggtaaaggtggagcctgttgagaatcagtgcccaacatctccgtcttacagaggccaacacattttagctaattctaacaacagcaatccatgttctgcaagtcaggctagccagctggagccacttactcctgtaggctcagatattatgtcttttgtggttggaacagaacaagcagttgcctgctctctaccacagtcacctgagtacatct

SEQ ID NO: 52689 - DNA, 326 bp, Homo sapiens
tatttttatattttattttatattatttctatatattttatgtatttttggttgttaataaaaatggtttctagataaggctctacctgtcatttaagccaaggccagattaaaactcatgataatgtcttcaggacatcaacacagttatttaaaaagtgaaaaggtcagttagtttgctgatggtttcgggtaaaaactgtcagtgtattgattgattgattttttttctttcccactggattgactgaattttccagttatgtcattgagtatgcaccaccttgactttagtgaatagataacagttactaagggggattctc

SEQ ID NO: 52690 - DNA, 189 bp, Homo sapiens
gcgagctggagctggtgttcagtagctgatggcgtggggcttccctggctgggcccatgcaggtttgcttaggccggtacactcgcgtggggtccacactgcctgaggcaggcacccccgcgccccatccttgtaggtttgtaatatgagcgcctcctccaagcagcccggaagccggccaggccctga

SEQ ID NO: 52691 - DNA, 641 bp, Homo sapiens
taggtgatggcattgccattcattaaaatagaaaacaactgaggaagcgaatattggaatagggtataaagtgatgaacttggttttgaatgtaagttagagatgcttgtaagacatcacgtgtttgagcacagatctgccatttaggagaaggaactgggctatagattaagacttggaggttgcagtgagccaagatcgcgccactgcgctccagcctggcgacagagcgagactccgtctcaaaaataaataaataaataaaaatgctgaaactatctattttagttaccctacagggttgttttaagacgttcacaggaggtaaggtagaagtttgttgaattataaagtgctacacaaatgtaaacaatcaacggcttttcaaccacatacagccagttatttagacttcagagaattcttttttcttttttcttttttttaggccagtgtgtctcaaatttcagtgtgtatgtggagggcttgctataacagattgcttgacctccatcgctagagtttttgagtcagtaggtcccttgtaagtctgaagaattgcattttttacaaattctcaggtgatgctgatactacaggatacttacaatgtgaatccacagtggggcattttaagtttc

SEQ ID NO: 52692 - DNA, 155 bp, Homo sapiens
gtgagctaggcaaacaaatgcatggagatttacatgccaggcaacagtcttaatatacaaaaaagtattaggagtaatgtcacttattcagggacctggagatagtttgctgtggttattgtataggtttgtatgaaaggcactcactattggtc

SEQ ID NO: 52693 - DNA, 717 bp, Homo sapiens
ataagccagaactttcctagccatcctagcatgtttgtgccttgtaagatattcccagttacatcctttaatttgccaaagggcagaaaaagaatttggtaagttaactttcccacatgcacaaatttaactgctgttttggtattccacacaggggccagattggatggaagggcaagagggctgctgagggagatcactgcaagtgaaggcaaaatctagtctgatggctcagactaaaaaacttggcctgccaataagagggagcagtgcttccagtgaaaatgtgaggcagtgcctggctttccctgctatactccaccctcctccactccctggactgcctgccaagaaagagaagggtgagcaatagagaaggaagtgaatcactagcacttcacaagtgctgctgcagaggcctgccatagagagctggctgagacctaggtgctctcctgctgatctgagagggcagaaaaataaataaatagaaatgtcaaaaagaggacagcagcagtgtagggaagggaggcagagaggaacaaccccgggcaggaggagtgtgggtcaaatgtgagaaccaataccctccttccctagctaaagttgttcccccatcagcctcagtttccaccatctctgaggcattcacaggaggaataactggtgtgttaaaatccaccaaccacttatatacaggaaagaaaaaaaaaaaga

SEQ ID NO: 52694 - DNA, 163 bp, Homo sapiens
aggaggagtgtggcccccccccccccccccccccctccttccctagctaaagttgttcccccatcagcctcagtttccaccatctctgaggcattcacaggaggaataactggtgtgttaaaatccaccaaccacttatatacaggaaagaaaaaaaaaaaga

SEQ ID NO: 52695 - DNA, 385 bp, Homo sapiens
aaaaaaaaaaaaaaattctccctgcctcagcctcttgagtagctgggattacaggcgccagccaacacgcccagctaatttttctacttttagtagagatagggttttgccatgttggccaggctcgtcttgaactcctgacttcaggtaatccgcctgccttggcctcccaaagtgctgagattacaggcgtgagccacgtcacctggcccgtgtgtctgtcttgagtggacagattgcagtttgaggaatgttgatgatgtttgcacttgtgtaatcccctccacagtccagatgtggaacttaccactaccccaaaggctcctgtgtccctcccatgtggcgtccccgccagctgttgctctgctgtgacctcaggtcactt

SEQ ID NO: 52696 - DNA, 378 bp, Homo sapiens
cgatcctcctgcctccacctcccaaagtgctgggattacaggcatgagccaccgcgcccagcctattcttaaagggctttttaagtctcactatacgtgttagtcttttaaagctgtttgttttacaaatatgattaagtatactagatcatatttgtttttttgttaagctctttattatggagtatttcagacatacacttgagtagaaagtatagtataataaattcccatgcactcatacccaacttcaacaattattaacttaaaaaaataccatttatttgttgaagaaaccagattctatttggccaattgattctttatagtattctttaacttctttaacttgttcttttaatctttgtatttcctata

SEQ ID NO: 52697 - DNA, 421 bp, Homo sapiens
gacggcaggcgcggcacaacggcgcattgtggggccaagcgaggggcgaagggggctgggggtggccggcgcgatggggacgctccggttgcgccaagttgactctgccgtttgggtcacctgggctgagtcgcgggcgtggaggcagagggtagggggtgaggaggtgtttcttgtcttcttcttccaatctcagaagtaaacattggaaagtggggcccccagcagtgtacagcccgtttccaaaccaggcctgtaaggaggagctgaggtttcggctgagcccccagcctcccccgaccgcacagcctcgggcatgaacccgcgaagccagacgcttagttgcttatcaggccatcgctgtacatatttagaaagtacctatcactcagacactttgaaaagcgtggcgttccagcgc

SEQ ID NO: 52698 - DNA, 216 bp, Homo sapiens
ccaaagtgctgggattacaggcgtgagccaccacacctggcctcagcccagcctcttaatgcaactatgtaaatgggccaggatccagctggccagaaataagagtagcatcctggagaacacagaggcagtgaggacaggcacaggcagggcagaggtaacagcagaaaggctgcaaggccagaagatgcccgctgccaccacaccacccggcca

SEQ ID NO: 52699 - DNA, 596 bp, Homo sapiens
taaccaaattctgctactacaacatgaaactctcccaccaaggaaatgttcaacaagaccttatcacctttaactactaagagattttggcagccaaaatacatgagtcctaattcttcatccccgttcacttttttttttttttgagacggagtttcactcttttcccccaggctgaagtgcaacagtgtgatcttggctcactgcaacctctgcctccccagttcaagcgattctcctgcgattctcctgcctcagcctcccgagtagctgggattacaggcacaagccactacacccagctaatttttgtatttttagtagagaaggggttttaccatattgggacgggctggttttgaactcgtgacctcaagtgatccgccgtcctcagcctcccaaagtgctgggattacaggcacgagccactgcacctggcccccattcacttctttcttcattctattcaatggtagacctggcacaattacttgtggatgtgtagaagacataggtaataaactgggcacaccagttgtgttttagcaagaaaaaaagtcggcctcactcatactctccagtctcatacatcttta

SEQ ID NO: 52700 - DNA, 482 bp, Homo sapiens
aacaatgtgataatgacactccttcattgacaggtgggtctctctgttctctcctcctgagcctgggtagacctttgtaactgtcttgaccaacagaatgtgacagaatgataccaggtgacttctaagactacatcatacaaagcaacacagcttctgctgggctctccctctctggacacgtgtctttgaagccctgagctgccagattaaacagtccggcttgcctaaagtcaccacgctggagagaccatcagggatggagaggtgctacagaaaccctagctattctagtccccagccatttgagtcttcctagcccagactcataagtgaagaaaccttcaagatgattccaatacctcctatcacttgactgcaacctcgtgaaagcctaagccagacctgcacggtggagccattcctaaattctggtcccacagaaactgtgaaagataataaatgatcatcattgctttaca

SEQ ID NO: 52701 - DNA, 448 bp, Homo sapiens
gccaggaccatgcaatcggaacgtgggcttgataccaagtgacatctaacaggtccagtaaaagaggcctacacaataaaggcagcatgtgagaaaggctgactctggaacatcaggataaactgctatagttttccactattgagctgaatttcgtatcaccatcaaaagttacctacctacaagtccctagtagagaaaatttaacttctggctttaaaaaagggacagaaaagcaggcagatctgctagtaagcaaactacagctcccccgaggagacacacaggcagtgggtaagaggaacagacccatggctccactgaagacacagagcagcagacgaaaaagacatgtcctaaatgttaaatggtaaggaggggtagggtgaaaaaagggaacatggatgccaggcagaagaaataaaagcctttccaaacatttgtatta

SEQ ID NO: 52702 - DNA, 756 bp, Homo sapiens
gccaggaccatgcaatcggaacgtgggcttgataccaagtgacatctaacaggtccagtaaaagaggcctacacaataaaggcagcatgtgagaaaggctgactctggaacatcaggataaactgctatagttttccactattgagctgaatttcgtatcaccatcaaaagttacctacctacaagtccctagtagagaaaatttaacttctggctttaaaaaagggacagaaaagcaggcagatctgctagtaagcaaactacagctcccccgaggagacacacaggcagtgggtaagaggaacagacccatggctccactgaagacacagagcagcagacgaaaaagacatgtcctaaatgttaaatgaatgtgacagaatgataccaggtgacttctaagactacatcatacaaagcaacacagcttctgctgggctctccctctctggacacgtgtctttgaagccctgagctgccagattaaacagtccggcttgcctaaagtcaccacgctggagagaccatcagggatggagaggtgctacagaaaccctagctattctagtccccagccatttgagtcttcctagcccagactcataagtgaagaaaccttcaagatgattccaatacctcctatcacttgactgcaacctcgtgaaagcctaagccagacctgcacggtggagccattcctaaattctggtcccacagaaactgtgaaagataataaatgatcatcattgctttaca

SEQ ID NO: 52703 - DNA, 225 bp, Homo sapiens
ctgtttttcatattggccacaccaatttttcattcccgtcaacagtatacagcagttcttgttgatcaaatcactgtggttatcattcagtgatatgcccttgatatagagatatgcaatatgtgcctgcctcaggtggcccatgcttattttgttataattctttccaaataattttaaaagatgatttatttacaagaaaaaataccttacacttaaaaactg

SEQ ID NO: 52704 - DNA, 1414 bp, Homo sapiens
  misc_feature (327)..(327): n is a, c, g, or t
tctcataaggacacagtcatgttggagtaggacccaccctcatgacctcaccttaacttaattagatgtgtagtagggtttctacataagttcccattctcagttcctaaggcttaggactcagcatgtctttggggggaacacaattcagcccatgacattgttatgattattctcactttgcatattatttagactttgcataagttgctcagaatcatagagtcaataaattgtggaatagagacgcaaacctaacgacttcagtttgaagtcacaaattcttaaatggtggcatcaaaatatttcagctttgatttttttttnaaagagtgtaaattattgagaagagtttcacaaaaaatggttatttctcttagactgtggaaattgtactacattccacgtctgagtgtgataaacctggacggttattcagtcttaccatcatacttttgcttgaggcccatgtgtgatccttcccctgccccaacaccacccaaggggccgagcccactcctccatgtggggtccctaggggacagctctctgcaaacaccccgagcacactgatgtgcctgtcttccccagggaagcaggagttccagctcaaaacccgcgggccacgggagcacatcctgaacttggggtggtgacgaaacatggctgtgctgtccaccggcttggagatctggtggatgttagtgtaaaccagaaaatttaaatccatcaaaaaaaggaaccgacattacctcaatcaggcaatttgaatcctagagagataggcaggctgaaagaacctacatttctacaatgctgaacccaagtagagattatgaactgcggcaccattcttagtgtgtttctctctccttttatttttaatttaatttaatttatttatttatttatttttgagacagagtctcactctgtcgccaggctggagtccagtggctgatctcggctcactacaacctccacctcctgggttcaagcgattctcctgcctcagcctccggagtagctgggactacaggcgtgcactaccacgcccagctaatttttgtatttttagtagagatggggttttgccatgatggccaggatggtctctatctcttgacctcgtgatccacccacctcggcctcccaaagtgctgggattacaggtgtgagccactgcacctggccttctctctccttttaaggattgtactcaggattacaagatactgcacatcaaaaaatgaatcccaatatgtggtcaattgaggaacttgaaaatgtcatgccaataataaaagcttgcgcacaataactgaagttagaaggaggtaaatattgctaaaatattgcggatttaaaaagataatctaaccctttattattttatgtgagtctcatgttccca

SEQ ID NO: 52705 - DNA, 677 bp, Homo sapiens
gggcaactcaccctcactcagaggtcttctggttctggaaacaactctagctcagccttctccaccatgagcctcagacttgataccaccccttcctgtaacagtgcgagaccacttcatgccttgcaggtgctgctgcttctgtcattgctgctgactgctctggcttcctccaccaaaggacaaactaagagaaacttggcgaaaggcaaagaggaaagtctagacagtgacttgtatgctgaactccgctgcatgtgtataaagacaacctctggaattcaactcccaaaaacatccaaagtttggaagtgatcgggaaaggaacccattgcaaccaagtcgaagtgatagccacactgaaggatgggaggaaaatctgcctggacccagatgctcccagaatcaagaaaattgtacagaaaaaattggcaggtgatgaatctgctgattaatttgttctgtttctgccaaacttctttaactcccaggaagggtagaattttgaaaccttgattttctagagttctcatttattcaggatacctattcttactgtattaaaatttggatatgtgtttcattctgtctcaaaaatcacattttattctgagaaggttggttaaaagatggcagaaagaagatgaaaataaataagcctggtttcaaccctctaa

SEQ ID NO: 52706 - DNA, 583 bp, Homo sapiens
gggcaactcaccctcactcagaggtcttctggttctggaaacaactctagctcagccttctccaccatgagcctcagacttgataccaccccttcctgtaacagtgcgagaccacttcatgccttgcaggtgctgctgcttctgtcattgctgctgactgctctggcttcctccaccaaaggacaaactaagagaaacttggcgaaaggcaaagaggaaagtctagacagtgacttgtatgctgaactccgctgcatgtgtataaagacaacctctggaattcaactcccaaaaacatccaaagtttggaagtgatcgggaaaggaacccattgcaaccaagtcgaagtgatagccacactgaaggatgggaggaaaatctgcctggacccagatgctcccagaatcaagaaaattgtacagaaaaaattggcaggtgatgaatctgctgattaatttgttctgtttctgccaaacttctttaactcccaggaagggtagaattttgaaaccttgattttctagagttctcatttattcaggatacctattcttactgtattaaaatttggatatgtgtttca

SEQ ID NO: 52707 - DNA, 709 bp, Homo sapiens
gggcaactcaccctcactcagaggtcttctggttctggaaacaactctagctcagccttctccaccatgagcctcagacttgataccaccccttcctgtaacagtgcgagaccacttcatgccttgcaggtgctgctgcttctgtcattgctgctgactgctctggcttcctccaccaaaggacaaactaagagaaacttggcgaaaggcaaagaggaaagtctagacagtgacttgtatgctgaactccgctgcatgtgtataaagacaacctctggaattcaactcccaaaaacatccaaagtttggaagtgatcgggaaaggaacccattgcaaccaagtcgaagtgatagccacactgaaggatgggaggaaaatctgcctggacccagatgctcccagaatcaagaaaattgtacagaaaaaattggcaggtgatgaatctgctgattaatttgttctgtttctgccaaacttctttaactcccaggaagggtagaattttgaaaccttgattttctagagttctcatttattcaggatacctattcttactgtattaaaatttggatatgtgtttcattctgtctcaaaaatcacattttattctgagaaggttggttaaaagatggcagaaagaagatgaaaataaataagcctggtttcaaccctctaaaaaaaaaacgaaataaaaacaacaaaaaaggg

SEQ ID NO: 52708 - DNA, 323 bp, Homo sapiens
agataccaagggccaactgtatactttacacacgtatgcacacacacacaatcacacacacacaatctgtatgatgatttggcctggagttgtagacatcacagatcaaaagtggcctggtgctagctgtttgggtatatccttgaaaagggcaactttgtcatttcctagagtaacctagagagagatttccaagcatttccccatgaacagaagtggtaaatgctgatttattgtgccatatgtgtgtttgggaggaggggagatagcgtcttgttttgaaaaaagttctcacttcataaaataaactgcacaccactcca

SEQ ID NO: 52709 - DNA, 338 bp, Homo sapiens
tctattaaaaaataatgtcaaaacacacacacacacacacacacagacacacacacacacacacaatcacacacacacaatctgtatgatgatttggcctggagttgtagacatcacagatcaaaagtggcctggtgctagctgtttgggtatatccttgaaaagggcaactttgtcatttcctagagtaacctagagagagatttccaagcatttccccatgaacagaagtggtaaatgctgatttattgtgccatatgtgtgtttgggaggaggggagatagcgtcttgttttgaaaaaagttctcacttcataaaataaactgcacaccactcca

SEQ ID NO: 52710 - DNA, 253 bp, Homo sapiens
tgatgtctacaactccaggccaaatcatcatacagattgtgtgtgtgtgtgtgtgtctgtttgggtatatccttgaaaagggcaactttgtcatttcctagagtaacctagagagagatttccaagcatttccccatgaacagaagtggtaaatgctgatttattgtgccatatgtgtgtttgggaggaggggagatagcgtcttgttttgaaaaaagttctcacttcataaaataaactgcacaccactcca

SEQ ID NO: 52711 - DNA, 1145 bp, Homo sapiens
tatgtctatgttttgagatagaatccttctattttatagcagggatgggcaaaccacaagcaaggggccaaatccagcctgctgcctgtttttgctaaaaaagttttattggaacacagccatggccattcacttccatatcatccaatggctgcttttgtgctacaattgccaccatgcccagtggggcctgtggcacacaactgcagaagtgagtagttgtggcagaaatcacttagccttcaaagcctaaaacacttactatctgaccctttccagaaaaagtttgctgacctctgttttagagatacaaactaacatacttacagataagtgatctgaatatgaagcaaattttcaacataatctgggttgatggggaaccgtgttacatataaacaaatccagagctgatcattgccaggtgagggctgtgcagacgatcacgacactattctcttttgcatatgttttccataataaaaagtcttttgaaaaaatcaatgatttaggggtttaaatatactgtagtcactttggaaaacagtttggcagttcctcaaaagttagacatagaattaccctatgacccagcagttccctttctagatatacccccaagagaattaaaaacacacattcacacaaaaacctgcacacaaatgttcacaggagcattgccttaatagcaaaacaagcgaaacaacccaaatgcccatcaggtgacgggtggataaacacagtgcggtctgtccatacatggaatgtgactcagccacaggcaggaatgaagcgctgacacacgcagcaacacggatgaaccgtgaggtcacggagtggagtgaaagataccagtcatgaagtcacacaccgtatgatgccattgacatgaagtgttcagagcaagtaaatccttacagatggaaggcagagcggtgactgccagggactaggagtggggggccagggggtgactgctaatgggtatgggatttcatttcggggctggtggaaacgttccggagccagagagtagtgatagctgcacaactctatgtatatgctatgaatcaccaccgaatggtatatttttaaaggacgaatttatggtatgtaaattgtgtctcaataaagctgctatctta

SEQ ID NO: 52712 - DNA, 403 bp, Homo sapiens
aattcattagggtggttcagccggctgtcactatcctgacagtaggcaggaatgcaaaatccactttttaaaatagcctcattggtagaggaatattggcctcacctaacacccatttgggctatcctggctggaaatgcactggcccacatctttatttgcatcctccaggattacaggacagtctcatttttcaggtggcatcatcacggctcataaattgaacaacacttccattagattgcgctaggcatcatcttcaaaactctaacatctggatgtttccaaatagcctgctatgtagatgattgatggctttcattcttggttggattctgatataggccatagctgttgggattggaattggtggtcctgatgtgccagtatgtgatcaactgat

SEQ ID NO: 52713 - DNA, 617 bp, Homo sapiens
gcttacaacgctccatgctgtcctggaccctagcatcacccaggcctaggtaatagaagggtggcttttgtaaagcgactcaaggctgagaagggaacagacactcttagcacaataagctacaggctgaaaaacagccggaggtgaatctttgcagcgtgaatggtctggctgtcttttataaaagtaactcgattggactagaccccatgagggactctgctcctccgctcccctttccctgaggacctaattccccactgggtcagccgcagaaccagatagagctggggactcacgacccgtgctgacgactggatgcaagaggaggaaggactttggtggagagaaggaatcaaaaggaaccaagaatgtgagacaagaggacttgctggtggggtcccctgctgtgtccccagagtcccagcatgtgcctgacacacagcaggtgcctgattgatagtgacggttccccaaaggctgctggagtcacctctgggattctgcacaggctccaccctctggggaggtgtgcttggtagaggacacgaaggctgcttgttggggttaccttagtacctgggtgaagagtaaaaagtaattaataataacgaaag

SEQ ID NO: 52714 - DNA, 279 bp, Homo sapiens
gagaatcacttgaacccaggaggcggaggttgcagtgagccaagatgcgccattgcactccagcctgggcaacaagagcaaaactttatctcaaaaaaaaaaaaaaggtgaaagaataaaaagctgatgggccttgaaagaaggctatgataaggacctcacagagaatttagaaatggggtgaagcaaatgggatctgttgataagctattggtatcacactgatttcaaatattttcttcaatgcttgtattaataaattaacagtgaactcaaggg

SEQ ID NO: 52715 - DNA, 863 bp, Homo sapiens
ttgaagtaaatcccacatattaaatcactataaatatttcagtatattcaaaaggaaaaaacttttttcaaagcataaccataataccattttcatatcttaaaagcctttctatttaagaatatttagttgtaaaaatttccagaagttgtgtttatcatgaattaaaatgtggctttagtgaaaatacagttccttggtatactctcccagcaattagggagagattctgtccaccagcagaatggcctgggttacagcttttatcaaaatctgctgtctgagggtcttagttggaagaaataatctcctatttgagttcttcgaggccgaaagattgataatgactgtatggccgatctctaactatatattgttgcttttttaccttaattaactcttaagctttgtacgtgaggaagaaattccaaggacatatcacaagaagaattatttttcagatttcgccactagccgaagccacggatgggaatgtggtggtggagctgttccactcagatcttctgtgagggatttctgaaggtcaagtaacattcttacgtgtaatttcctgcattgggactttacaaagcttctaagaaaaccaacatgttgattttgcatttgtttttaagaagatgacttcagaggaaagaatacccctgatatcagagatgaacctaaaggcagaatggacagtgcttattctattttcttcaagcagcacattaagtggattacttgactgttgatgacttaaaaggatgattaatactcttgatgttttaaatattgtcttttcttggggtttcacttgatctttaaaattaagtgagatactagccctgtctcaaaaactttat

SEQ ID NO: 52716 - DNA, 635 bp, Homo sapiens
  misc_feature (627)..(627): n is a, c, g, or t
  misc_feature (629)..(629): n is a, c, g, or t
gtactttcaccaatcccccgaccctcctcatcacacacaacttcctcctccctaccagggcaccgaagtgtaccctatgctgggctctgtgctgagagaccccagtttcttctccaacccccaggacttcaatccccagcacttcctgaatgagaaggggcagtttaagaagagtgatgcttttgtgcccttttccatcggaaagcggaactgtttcggagaaggcctggccagaatggagctctttctcttcttcaccaccgtcatgcagaacttccgcctcaagtcctcccagtcacctaaggacattgacgtgtcccccaaacacgtggtctttgccacgatcccacgaaactacaccatgagcttcctgccccgctgagcgagggctgtgccggtgcaggtctggtgggcggggccagggaaaggcggggtcagggcggggttcgcggaagaggcgggtataagaatggggggaagatgcgggaaaggaaggggcgtggtggctagagggaagagaagaaacagaaggggctcagttcaccttgataaggtgcttccgagctgggatgagaggaaggaaacccttacattatgctatgaagagtagtaataatagcagctctnanttcctg

SEQ ID NO: 52717 - DNA, 1747 bp, Homo sapiens
  misc_feature (31)..(31): n is a, c, g, or t
  misc_feature (60)..(60): n is a, c, g, or t
  misc_feature (488)..(488): n is a, c, g, or t
  misc_feature (1739)..(1739): n is a, c, g, or t
  misc_feature (1741)..(1741): n is a, c, g, or t
gctaccaccatgctggcctcagggatgcttntggtggccttgctggtctgcctgactgtnatggtcttgatgtctgtttggcagcagaggaagagcaaggggaagctgcctccgggacccaccccattgcccttcattggaaactacctgcagctgaacacagagcagatgtacaactccctcatgaagatcagtgagcgctatggccccgtgttcaccattcacttggggccccggcgggtcgtggtgctgtgtggacatgatgccgtcagggaggctctggtggaccaggctgaggagttcagcgggcgaggcgagcaagccaccttcgactgggtcttcaaaggctatggcgtggtattcagcaacggggagcgcgccaagcagctccggcgcttctccatcgccaccctgcgggacttcggggtgggcaagcgaggcatcgaggagcgcatccaggaggaggcgggcttcctcatcgacgcccnccggggcactggcggcgccaatatcgatcccaccttcttcctgagccgcacagtctccaatgtcatcagctccattgtctttggggaccgctttgactataaggacaaagagttcctgtcactgttgcgcatgatgctaggaatcttccagttcacgtcaacctccacggggcagctctatgagatgttctcttcggtgatgaaacacctgccaggaccacagcaacaggcctttcagttgctgcaagggctggaggacttcatagccaagaaggtggagcacaaccagcgcacgctggatcccaattccccacgggacttcattgactcctttctcatccgcatgcaggaggaggagaagaaccccaacacggagttctacttgaaaaacctggtgatgaccacgttgaacctcttcattgggggcaccgagaccgtcagcaccaccctgcgctatggcttcttgctgctcatgaagcacccagaggtggaggccaaggtccatgaggagattgacagagtgatcggcaagaaccggcagcccaagtttgaggaccgggccaagatgccctacatggaggcagtgatccacgagatccaaagatttggagacgtgatccccatgagtttggcccgcagagtcaaaaaggacaccaagtttcgggatttcttcctccctaagggcaccgaagtgtaccctatgctgggctctgtgctgagagaccccagtttcttctccaacccccaggacttcaatccccagcacttcctgaatgagaaggggcagtttaagaagagtgatgcttttgtgcccttttccatcggaaagcggaactgtttcggagaaggcctggccagaatggagctctttctcttcttcaccaccgtcatgcagaacttccgcctcaagtcctcccagtcacctaaggacattgacgtgtcccccaaacacgtggtctttgccacgatcccacgaaactacaccatgagcttcctgccccgctgagcgagggctgtgccggtgcaggtctggtgggcggggccagggaaaggcggggtcagggcggggttcgcggaagaggcgggtataagaatggggggaagatgcgggaaaggaaggggcgtggtggctagagggaagagaagaaacagaaggggctcagttcaccttgataaggtgcttccgagctgggatgagaggaaggaaacccttacattatgctatgaagagtagtaataatagcagctctnanttcctg

SEQ ID NO: 52718 - DNA, 892 bp, Homo sapiens
atccctaatccaaaaggccaaaatccaaaatgcttcaatgagaatttcctttgacatgtaagcgctgaaacagttttgggttttggagcatttaggattttggttttcagattagggatactcaacctgtatttttcttttatacttgaattcttcaaaattttctttcgtgtgttttgttgtatcactttttcttagcacaattacaaaacaaatgtaattatttcacatttttcactctcttatgggatgcatgtactggaattacttctggggacactattccttcctttgtattcctggtcctaaaaaccaggtcagggtgttcacaagttacagactggtttctatgcatgacagaatcttttgctgattttattcctaaatgatagaatacggaagttaaaaaccaggtgagaaaaccaggggaggagctgcccaacagcatgcacttgtctcatggtggagctctaggcactcagggtgggtttttctcagaggtgggaaagtcaccatttgaacctaatgctactagatgcagtggctgaacatgtgggactatgagggcattaaggagtcaacaggtgacttccaatggactgtactaggcagcagccacatttatacgcactaaaagcaggatttatttttcctctcacttgcgtagcaatctcggtttccattttaatatttagaaggtaagttcagttgatggacactttgtgtaataaaaggctcttttaaagtacaagcttatgcacacacacaggataaaaagtggcacttcctgtgcccatggctttcatggagtacatttgtggagcccaaagcttagtcctggatatgtttatagcactttagctccgtttgtgagtttggaacccttccaaaa

SEQ ID NO: 52719 - DNA, 211 bp, Homo sapiens
gctgctgtgctgggatgtgtgcagtactaatatgggaatgacagtgagtggacattgcatcacatagtagcctttcctcctaggaggcaaagcactcacctccccatcaccctgcagttatcctcatgggggagggagccagtccagtcccttgggaaggcagtgccagggccaggacctgaacctgcctttctgatctacagcagagtca

SEQ ID NO: 52720 - DNA, 6951 bp, Homo sapiens
cgtggtttgtagatgtgcttggggagaatgggggcctcttctccaagaagcccggagcctgtcgggccgccggcgcccggtctccccttctgctgcggaggatccctgctggcggttgtggtgctgcttgcgctgccggtggcctggggtcaatgcaatgccccagaatggcttccatttgccaggcctaccaacctaactgatgagtttgagtttcccattgggacatatctgaactatgaatgccgccctggttattccggaagaccgttttctatcatctgcctaaaaaactcagtctggactggtgctaaggacaggtgcagacgtaaatcatgtcgtaatcctccagatcctgtgaatggcatggtgcatgtgatcaaaggcatccagttcggatcccaaattaaatattcttgtactaaaggataccgactcattggttcctcgtctgccacatgcatcatctcaggtgatactgtcatttgggataatgaaacacctatttgtgacagaattccttgtgggctaccccccaccatcaccaatggagatttcattagcaccaacagagagaattttcactatggatcagtggtgacctaccgctgcaatcctggaagcggagggagaaaggtgtttgagcttgtgggtgagccctccatatactgcaccagcaatgacgatcaagtgggcatctggagcggccccgcccctcagtgcattatacctaacaaatgcacgcctccaaatgtggaaaatggaatattggtatctgacaacagaagcttattttccttaaatgaagttgtggagtttaggtgtcagcctggctttgtcatgaaaggaccccgccgtgtgaagtgccaggccctgaacaaatgggagccggagctaccaagctgctccagggtatgtcagccacctccagatgtcctgcatgctgagcgtacccaaagggacaaggacaacttttcacctgggcaggaagtgttctacagctgtgagcccggctacgacctcagaggggctgcgtctatgcgctgcacaccccagggagactggagccctgcagcccccacatgtgaagtgaaatcctgtgatgacttcatgggccaacttcttaatggccgtgtgctatttccagtaaatctccagcttggagcaaaagtggattttgtttgtgatgaaggatttcaattaaaaggcagctctgctagttactgtgtcttggctggaatggaaagcctttggaatagcagtgttccagtgtgtgaacaaatcttttgtccaagtcctccagttattcctaatgggagacacacaggaaaacctctggaagtctttccctttggaaaagcagtaaattacacatgcgacccccacccagacagagggacgagcttcgacctcattggagagagcaccatccgctgcacaagtgaccctcaagggaatggggtttggagcagccctgcccctcgctgtggaattctgggtcactgtcaagccccagatcattttctgtttgccaagttgaaaacccaaaccaatgcatctgactttcccattgggacatctttaaagtacgaatgccgtcctgagtactacgggaggccattctctatcacatgtctagataacctggtctggtcaagtcccaaagatgtctgtaaacgtaaatcatgtaaaactcctccagatccagtgaatggcatggtgcatgtgatcacagacatccaggttggatccagaatcaactattcttgtactacagggcaccgactcattggtcactcatctgctgaatgtatcctctcgggcaatgctgcccattggagcacgaagccgccaatttgtcaacgaattccttgtgggctaccccccaccatcgccaatggagatttcattagcaccaacagagagaattttcactatggatcagtggtgacctaccgctgcaatcctggaagcggagggagaaaggtgtttgagcttgtgggtgagccctccatatactgcaccagcaatgacgatcaagtgggcatctggagcggcccggcccctcagtgcattatacctaacaaatgcacgcctccaaatgtggaaaatggaatattggtatctgacaacagaagcttattttccttaaatgaagttgtggagtttaggtgtcagcctggctttgtcatgaaaggaccccgccgtgtgaagtgccaggccctgaacaaatgggagccggagctaccaagctgctccagggtatgtcagccacctccagatgtcctgcatgctgagcgtacccaaagggacaaggacaacttttcacccgggcaggaagtgttctacagctgtgagcccggctatgacctcagaggggctgcgtctatgcgctgcacaccccagggagactggagccctgcagcccccacatgtgaagtgaaatcctgtgatgacttcatgggccaacttcttaatggccgtgtgctatttccagtaaatctccagcttggagcaaaagtggattttgtttgtgatgaaggatttcaattaaaaggcagctctgctagttattgtgtcttggctggaatggaaagcctttggaatagcagtgttccagtgtgtgaacaaatcttttgtccaagtcctccagttattcctaatgggagacacacaggaaaacctctggaagtctttccctttggaaaagcagtaaattacacatgcgacccccacccagacagagggacgagcttcgacctcattggagagagcaccatccgctgcacaagtgaccctcaagggaatggggtttggagcagccctgcccctcgctgtggaattctgggtcactgtcaagccccagatcattttctgtttgccaagttgaaaacccaaaccaatgcatctgactttcccattgggacatctttaaagtacgaatgccgtcctgagtactacgggaggccattctctatcacatgtctagataacctggtctggtcaagtcccaaagatgtctgtaaacgtaaatcatgtaaaactcctccagatccagtgaatggcatggtgcatgtgatcacagacatccaggttggatccagaatcaactattcttgtactacagggcaccgactcattggtcactcatctgctgaatgtatcctctcaggcaatactgcccattggagcacgaagccgccaatttgtcaacgaattccttgtgggctacccccaaccatcgccaatggagatttcattagcaccaacagagagaattttcactatggatcagtggtgacctaccgctgcaatcttggaagcagagggagaaaggtgtttgagcttgtgggtgagccctccatatactgcaccagcaatgacgatcaagtgggcatctggagcggccccgcccctcagtgcattatacctaacaaatgcacgcctccaaatgtggaaaatggaatattggtatctgacaacagaagcttattttccttaaatgaagttgtggagtttaggtgtcagcctggctttgtcatgaaaggaccccgccgtgtgaagtgccaggccctgaacaaatgggagccagagttaccaagctgctccagggtgtgtcagccgcctccagaaatcctgcatggtgagcataccccaagccatcaggacaacttttcacctgggcaggaagtgttctacagctgtgagcctggctatgacctcagaggggctgcgtctctgcactgcacaccccagggagactggagccctgaagccccgagatgtgcagtgaaatcctgtgatgacttcttgggtcaactccctcatggccgtgtgctatttccacttaatctccagcttggggcaaaggtgtcctttgtctgtgatgaagggtttcgcttaaagggcagttccgttagtcattgtgtcttggttggaatgagaagcctttggaataacagtgttcctgtgtgtgaacatatcttttgtccaaatcctccagctatccttaatgggagacacacaggaactccctctggagatattccctatggaaaagaaatatcttacacatgtgacccccacccagacagagggatgaccttcaacctcattggggagagcaccatccgctgcacaagtgaccctcatgggaatggggtttggagcagccctgcccctcgctgtgaactttctgttcgtgctggtcactgtaaaaccccagagcagtttccatttgccagtcctacgatcccaattaatgactttgagtttccagtcgggacatctttgaattatgaatgccgtcctgggtattttgggaaaatgttctctatctcctgcctagaaaacttggtctggtcaagtgttgaagacaactgtagacgaaaatcatgtggacctccaccagaacccttcaatggaatggtgcatataaacacagatacacagtttggatcaacagttaattattcttgtaatgaagggtttcgactcattggttccccatctactacttgtctcgtctcaggcaataatgtcacatgggataagaaggcacctatttgtgagatcatatcttgtgagccacctccaaccatatccaatggagacttctacagcaacaatagaacatcttttcacaatggaacggtggtaacttaccagtgccacactggaccagatggagaacagctgtttgagcttgtgggagaacggtcaatatattgcaccagcaaagatgatcaagttggtgtttggagcagccctccccctcggtgtatttctactaataaatgcacagctccagaagttgaaaatgcaattagagtaccaggaaacaggagtttcttttccctcactgagatcatcagatttagatgtcagcccgggtttgtcatggtagggtcccacactgtgcagtgccagaccaatggcagatgggggcccaagctgccacactgctccagggtgtgtcagccgcctccagaaatcctgcatggtgagcataccctaagccatcaggacaacttttcacctgggcaggaagtgttctacagctgtgagcccagctatgacctcagaggggctgcgtctctgcactgcacgccccagggagactggagccctgaagcccctagatgtacagtgaaatcctgtgatgacttcctgggccaactccctcatggccgtgtgctacttccacttaatctccagcttggggcaaaggtgtcctttgtttgcgatgaagggttccgattaaaaggcaggtctgctagtcattgtgtcttggctggaatgaaagccctttggaatagcagtgttccagtgtgtgaacaaatcttttgtccaaatcctccagctatccttaatgggagacacacaggaactccctttggagatattccctatggaaaagaaatatcttacgcatgcgacacccacccagacagagggatgaccttcaacctcattggggagagctccatccgctgcacaagtgaccctcaagggaatggggtttggagcagccctgcccctcgctgtgaactttctgttcctgctgcctgcccacatccacccaagatccaaaacgggcattacattggaggacacgtatctctatatcttcctgggatgacaatcagctacacttgtgaccccggctacctgttagtgggaaagggcttcattttctgtacagaccagggaatctggagccaattggatcattattgcaaagaagtaaattgtagcttcccactgtttatgaatggaatctcgaaggagttagaaatgaaaaaagtatatcactatggagattatgtgactttgaagtgtgaagatgggtatactctggaaggcagtccctggagccagtgccaggcggatgacagatgggaccctcctctggccaaatgtacctctcgtgcacatgatgctctcatagttggcactttatctggtacgatcttctttattttactcatcattttcctctcttggataattctaaagcacagaaaaggcaataatgcacatgaaaaccctaaagaagtggctatccatttacattctcaaggaggcagcagcgttcatccccgaactctgcaaacaaatgaagaaaatagcagggtccttccttgacaaagtactatacagctgaagaacatctcgaatacaattttggtgggaaaggagccaattgatttcaacagaatcagatctgagcttcataaagtctttgaagtgacttcacagagacgcagacatgtgcacttgaagatgctgccccttccctggtacctagcaaagctcctgcctctttgtgtgcgtcactgtgaaacccccacccttctgcctcgtgctaaacgcacacagtatctagtcaggggaaaagactgcatttaggagatagaaaatagtttggattacttaaaggaataaggtgttgcctggaatttctggtttgtaaggtggtcactgttcttttttaaaatatttgtaatatggaatgggctcagtaagaagagcttggaaaatgcagaaagttatgaaaaataagtcacttataattatgctacctactgataaccactcctaatattttgattcattttctgcctatcttctttcacatatgtgtttttttacatacgtacttttccccccttagtttgtttccttttattttatagagcagaaccctagtcttttaaacagtttagagtgaaatatatgctatatcagtttttactttctctagggagaaaaattaatttactagaaaggcatgaaatgatcatgggaagagtggttaagactactgaagagaaatatttggaaaataagatttcgatatcttctttttttttgagatggagtctggctctgtctcccaggctggagtgcagtggcgtaatctcggctcactgcaacgtccgcctcccg

SEQ ID NO: 52721 - DNA, 5985 bp, Homo sapiens
cgtggtttgtagatgtgcttggggagaatgggggcctcttctccaagaagcccggagcctgtcgggccgccggcgcccggtctccccttctgctgcggaggatccctgctggcggttgtggtgctgcttgcgctgccggtggcctggggtcaatgcaatgccccagaatggcttccatttgccaggcctaccaacctaactgatgagtttgagtttcccattgggacatatctgaactatgaatgccgccctggttattccggaagaccgttttctatcatctgcctaaaaaactcagtctggactggtgctaaggacaggtgcagacgtaaatcatgtcgtaatcctccagatcctgtgaatggcatggtgcatgtgatcaaaggcatccagttcggatcccaaattaaatattcttgtactaaaggataccgactcattggttcctcgtctgccacatgcatcatctcaggtgatactgtcatttgggataatgaaacacctatttgtgacagaattccttgtgggctaccccccaccatcaccaatggagatttcattagcaccaacagagagaattttcactatggatcagtggtgacctaccgctgcaatcctggaagcggagggagaaaggtgtttgagcttgtgggtgagccctccatatactgcaccagcaatgacgatcaagtgggcatctggagcggccccgcccctcagtgcattatacctaacaaatgcacgcctccaaatgtggaaaatggaatattggtatctgacaacagaagcttattttccttaaatgaagttgtggagtttaggtgtcagcctggctttgtcatgaaaggaccccgccgtgtgaagtgccaggccctgaacaaatgggagccggagctaccaagctgctccagggtatgtcagccacctccagatgtcctgcatgctgagcgtacccaaagggacaaggacaacttttcacctgggcaggaagtgttctacagctgtgagcccggctacgacctcagaggggctgcgtctatgcgctgcacaccccagggagactggagccctgcagcccccacatgtgaagtgaaatcctgtgatgacttcatgggccaacttcttaatggccgtgtgctatttccagtaaatctccagcttggagcaaaagtggattttgtttgtgatgaaggatttcaattaaaaggcagctctgctagttactgtgtcttggctggaatggaaagcctttggaatagcagtgttccagtgtgtgaacaaatcttttgtccaagtcctccagttattcctaatgggagacacacaggaaaacctctggaagtctttccctttggaaaagcagtaaattacacatgcgacccccacccagacagagggacgagcttcgacctcattggagagagcaccatccgctgcacaagtgaccctcaagggaatggggtttggagcagccctgcccctcgctgtggaattctgggtcactgtcaagccccagatcattttctgtttgccaagttgaaaacccaaaccaatgcatctgactttcccattgggacatctttaaagtacgaatgccgtcctgagtactacgggaggccattctctatcacatgtctagataacctggtctggtcaagtcccaaagatgtctgtaaacgtaaatcatgtaaaactcctccagatccagtgaatggcatggtgcatgtgatcacagacatccaggttggatccagaatcaactattcttgtactacagggcaccgactcattggtcactcatctgctgaatgtatcctctcgggcaatgctgcccattggagcacgaagccgccaatttgtcaacgaattccttgtgggctaccccccaccatcgccaatggagatttcattagcaccaacagagagaattttcactatggatcagtggtgacctaccgctgcaatcctggaagcggagggagaaaggtgtttgagcttgtgggtgagccctccatatactgcaccagcaatgacgatcaagtgggcatctggagcggcccggcccctcagtgcattatacctaacaaatgcacgcctccaaatgtggaaaatggaatattggtatctgacaacagaagcttattttccttaaatgaagttgtggagtttaggtgtcagcctggctttgtcatgaaaggaccccgccgtgtgaagtgccaggccctgaacaaatgggagccggagctaccaagctgctccagggtatgtcagccacctccagatgtcctgcatgctgagcgtacccaaagggacaaggacaacttttcacccgggcaggaagtgttctacagctgtgagcccggctatgacctcagaggggctgcgtctatgcgctgcacaccccagggagactggagccctgcagcccccacatgtgaagtgaaatcctgtgatgacttcatgggccaacttcttaatggccgtgtgctatttccagtaaatctccagcttggagcaaaagtggattttgtttgtgatgaaggatttcaattaaaaggcagctctgctagttattgtgtcttggctggaatggaaagcctttggaatagcagtgttccagtgtgtgaacaaatcttttgtccaagtcctccagttattcctaatgggagacacacaggaaaacctctggaagtctttccctttggaaaagcagtaaattacacatgcgacccccacccagacagagggacgagcttcgacctcattggagagagcaccatccgctgcacaagtgaccctcaagggaatggggtttggagcagccctgcccctcgctgtggaattctgggtcactgtcaagccccagatcattttctgtttgccaagttgaaaacccaaaccaatgcatctgactttcccattgggacatctttaaagtacgaatgccgtcctgagtactacgggaggccattctctatcacatgtctagataacctggtctggtcaagtcccaaagatgtctgtaaacgtaaatcatgtaaaactcctccagatccagtgaatggcatggtgcatgtgatcacagacatccaggttggatccagaatcaactattcttgtactacagggcaccgactcattggtcactcatctgctgaatgtatcctctcaggcaatactgcccattggagcacgaagccgccaatttgtcaacgaattccttgtgggctacccccaaccatcgccaatggagatttcattagcaccaacagagagaattttcactatggatcagtggtgacctaccgctgcaatcttggaagcagagggagaaaggtgtttgagcttgtgggtgagccctccatatactgcaccagcaatgacgatcaagtgggcatctggagcggccccgcccctcagtgcattatacctaacaaatgcacgcctccaaatgtggaaaatggaatattggtatctgacaacagaagcttattttccttaaatgaagttgtggagtttaggtgtcagcctggctttgtcatgaaaggaccccgccgtgtgaagtgccaggccctgaacaaatgggagccagagttaccaagctgctccagggtgtgtcagccgcctccagaaatcctgcatggtgagcataccccaagccatcaggacaacttttcacctgggcaggaagtgttctacagctgtgagcctggctatgacctcagaggggctgcgtctctgcactgcacaccccagggagactggagccctgaagccccgagatgtgcagtgaaatcctgtgatgacttcttgggtcaactccctcatggccgtgtgctatttccacttaatctccagcttggggcaaaggtgtcctttgtctgtgatgaagggtttcgcttaaagggcagttccgttagtcattgtgtcttggttggaatgagaagcctttggaataacagtgttcctgtgtgtgaacatatcttttgtccaaatcctccagctatccttaatgggagacacacaggaactccctctggagatattccctatggaaaagaaatatcttacacatgtgacccccacccagacagagggatgaccttcaacctcattggggagagcaccatccgctgcacaagtgaccctcatgggaatggggtttggagcagccctgcccctcgctgtgaactttctgttcgtgctggtcactgtaaaaccccagagcagtttccatttgccagtcctacgatcccaattaatgactttgagtttccagtcgggacatctttgaattatgaatgccgtcctgggtattttgggaaaatgttctctatctcctgcctagaaaacttggtctggtcaagtgttgaagacaactgtagacgaaaatcatgtggacctccaccagaacccttcaatggaatggtgcatataaacacagatacacagtttggatcaacagttaattattcttgtaatgaagggtttcgactcattggttccccatctactacttgtctcgtctcaggcaataatgtcacatgggataagaaggcacctatttgtgagatcatatcttgtgagccacctccaaccatatccaatggagacttctacagcaacaatagaacatcttttcacaatggaacggtggtaacttaccagtgccacactggaccagatggagaacagctgtttgagcttgtgggagaacggtcaatatattgcaccagcaaagatgatcaagttggtgtttggagcagccctccccctcggtgtatttctactaataaatgcacagctccagaagttgaaaatgcaattagagtaccaggaaacaggagtttcttttccctcactgagatcatcagatttagatgtcagcccgggtttgtcatggtagggtcccacactgtgcagtgccagaccaatggcagatgggggcccaagctgccacactgctccagggtgtgtcagccgcctccagaaatcctgcatggtgagcataccctaagccatcaggacaacttttcacctgggcaggaagtgttctacagctgtgagcccagctatgacctcagaggggctgcgtctctgcactgcacgccccagggagactggagccctgaagcccctagatgtacagtgaaatcctgtgatgacttcctgggccaactccctcatggccgtgtgctacttccacttaatctccagcttggggcaaaggtgtcctttgtttgcgatgaagggttccgattaaaaggcaggtctgctagtcattgtgtcttggctggaatgaaagccctttggaatagcagtgttccagtgtgtgaacaaatcttttgtccaaatcctccagctatccttaatgggagacacacaggaactccctttggagatattccctatggaaaagaaatatcttacgcatgcgacacccacccagacagagggatgaccttcaacctcattggggagagctccatccgctgcacaagtgaccctcaagggaatggggtttggagcagccctgcccctcgctgtgaactttctgttcctgctgcctgcccacatccacccaagatccaaaacgggcattacattggaggacacgtatctctatatcttcctgggatgacaatcagctacacttgtgaccccggctacctgttagtgggaaagggcttcattttctgtacagaccagggaatctggagccaattggatcattattgcaaagaagtaaattgtagcttcccactgtttatgaatggaatctcgaaggagttagaaatgaaaaaagtatatcactatggagattatgtgactttgaagtgtgaagatgggtatactctggaaggcagtccctggagccagtgccaggcggatgacagatgggaccctcctctggccaaatgtacctctcgtgcacatgatgctctcatagttgcacagaaaaggcaataatgcacatgaaaaccc

SEQ ID NO: 52722 - DNA, 8301 bp, Homo sapiens
  misc_feature (3428)..(3428): n is a, c, g, or t
  misc_feature (3717)..(3717): n is a, c, g, or t
  misc_feature (4443)..(4443): n is a, c, g, or t
cgtggtttgtagatgtgcttggggagaatgggggcctcttctccaagaagcccggagcctgtcgggccgccggcgcccggtctccccttctgctgcggaggatccctgctggcggttgtggtgctgcttgcgctgccggtggcctggggtcaatgcaatgccccagaatggcttccatttgccaggcctaccaacctaactgatgagtttgagtttcccattgggacatatctgaactatgaatgccgccctggttattccggaagaccgttttctatcatctgcctaaaaaactcagtctggactggtgctaaggacaggtgcagacgtaaatcatgtcgtaatcctccagatcctgtgaatggcatggtgcatgtgatcaaaggcatccagttcggatcccaaattaaatattcttgtactaaaggataccgactcattggttcctcgtctgccacatgcatcatctcaggtgatactgtcatttgggataatgaaacacctatttgtgacagaattccttgtgggctaccccccaccatcaccaatggagatttcattagcaccaacagagagaattttcactatggatcagtggtgacctaccgctgcaatcctggaagcggagggagaaaggtgtttgagcttgtgggtgagccctccatatactgcaccagcaatgacgatcaagtgggcatctggagcggccccgcccctcagtgcattatacctaacaaatgcacgcctccaaatgtggaaaatggaatattggtatctgacaacagaagcttattttccttaaatgaagttgtggagtttaggtgtcagcctggctttgtcatgaaaggaccccgccgtgtgaagtgccaggccctgaacaaatgggagccggagctaccaagctgctccagggtatgtcagccacctccagatgtcctgcatgctgagcgtacccaaagggacaaggacaacttttcacctgggcaggaagtgttctacagctgtgagcccggctacgacctcagaggggctgcgtctatgcgctgcacaccccagggagactggagccctgcagcccccacatgtgaagtgaaatcctgtgatgacttcatgggccaacttcttaatggccgtgtgctatttccagtaaatctccagcttggagcaaaagtggattttgtttgtgatgaaggatttcaattaaaaggcagctctgctagttactgtgtcttggctggaatggaaagcctttggaatagcagtgttccagtgtgtgaacaaatcttttgtccaagtcctccagttattcctaatgggagacacacaggaaaacctctggaagtctttccctttggaaaagcagtaaattacacatgcgacccccacccagacagagggacgagcttcgacctcattggagagagcaccatccgctgcacaagtgaccctcaagggaatggggtttggagcagccctgcccctcgctgtggaattctgggtcactgtcaagccccagatcattttctgtttgccaagttgaaaacccaaaccaatgcatctgactttcccattgggacatctttaaagtacgaatgccgtcctgagtactacgggaggccattctctatcacatgtctagataacctggtctggtcaagtcccaaagatgtctgtaaacgtaaatcatgtaaaactcctccagatccagtgaatggcatggtgcatgtgatcacagacatccaggttggatccagaatcaactattcttgtactacagggcaccgactcattggtcactcatctgctgaatgtatcctctcgggcaatgctgcccattggagcacgaagccgccaatttgtcaacgaattccttgtgggctaccccccaccatcgccaatggagatttcattagcaccaacagagagaattttcactatggatcagtggtgacctaccgctgcaatcctggaagcggagggagaaaggtgtttgagcttgtgggtgagccctccatatactgcaccagcaatgacgatcaagtgggcatctggagcggcccggcccctcagtgcattatacctaacaaatgcacgcctccaaatgtggaaaatggaatattggtatctgacaacagaagcttattttccttaaatgaagttgtggagtttaggtgtcagcctggctttgtcatgaaaggaccccgccgtgtgaagtgccaggccctgaacaaatgggagccggagctaccaagctgctccagggtatgtcagccacctccagatgtcctgcatgctgagcgtacccaaagggacaaggacaacttttcacccgggcaggaagtgttctacagctgtgagcccggctatgacctcagaggggctgcgtctatgcgctgcacaccccagggagactggagccctgcagcccccacatgtgaagtgaaatcctgtgatgacttcatgggccaacttcttaatggccgtgtgctatttccagtaaatctccagcttggagcaaaagtggattttgtttgtgatgaaggatttcaattaaaaggcagctctgctagttattgtgtcttggctggaatggaaagcctttggaatagcagtgttccagtgtgtgaacaaatcttttgtccaagtcctccagttattcctaatgggagacacacaggaaaacctctggaagtctttccctttggaaaagcagtaaattacacatgcgacccccacccagacagagggacgagcttcgacctcattggagagagcaccatccgctgcacaagtgaccctcaagggaatggggtttggagcagccctgcccctcgctgtggaattctgggtcactgtcaagccccagatcattttctgtttgccaagttgaaaacccaaaccaatgcatctgactttcccattgggacatctttaaagtacgaatgccgtcctgagtactacgggaggccattctctatcacatgtctagataacctggtctggtcaagtcccaaagatgtctgtaaacgtaaatcatgtaaaactcctccagatccagtgaatggcatggtgcatgtgatcacagacatccaggttggatccagaatcaactattcttgtactacagggcaccgactcattggtcactcatctgctgaatgtatcctctcgggcaatgctgcccattggagcacgaagccgccaatttgtcaacgaattccttgtgggctaccccccaccatcgccaatggagatttcattagcaccaacagagagaattttcactatggatcagtggtgacctaccgctgcaatcctggaagcggagggagaaaggtgtttgagcttgtgggtgagccctccatatactgcaccagcaatgacgatcaagtgggcatctggagcggcccggcccctcagtgcattanacctaacaaatgcacgcctccaaatgtggaaaatggaatattggtatctgacaacagaagcttattttccttaaatgaagttgtggagtttaggtgtcagcctggctttgtcatgaaaggaccccgccgtgtgaagtgccaggccctgaacaaatgggagccggagctaccaagctgctccagggtatgtcagccacctccagatgtcctgcatgctgagcgtacccaaagggacaaggacaacttttcacccgggcaggaagtgttctacagctgtgagcccggctangacctcagaggggctgcgtctatgcgctgcacaccccagggagactggagccctgcagcccccacatgtgaagtgaaatcctgtgatgacttcatgggccaacttcttaatggccgtgtgctatttccagtaaatctccagcttggagcaaaagtggattttgtttgtgatgaaggatttcaattaaaaggcagctctgctagttattgtgtcttggctggaatggaaagcctttggaatagcagtgttccagtgtgtgaacaaatcttttgtccaagtcctccagttattcctaatgggagacacacaggaaaacctctggaagtctttccctttggaaaagcagtaaattacacatgcgacccccacccagacagagggacgagcttcgacctcattggagagagcaccatccgctgcacaagtgaccctcaagggaatggggtttggagcagccctgcccctcgctgtggaattctgggtcactgtcaagccccagatcattttctgtttgccaagttgaaaacccaaaccaatgcatctgactttcccattgggacatctttaaagtacgaatgccgtcctgagtactacgggaggccattctctatcacatgtctagataacctggtctggtcaagtcccaaagatgtctgtaaacgtaaatcatgtaaaactcctccagatccagtgaatggcatggtgcatgtgatcacagacatccangttggatccagaatcaactattcttgtactacagggcaccgactcattggtcactcatctgctgaatgtatcctctcaggcaatactgcccattggagcacgaagccgccaatttgtcaacgaattccttgtgggctacccccaaccatcgccaatggagatttcattagcaccaacagagagaattttcactatggatcagtggtgacctaccgctgcaatcttggaagcagagggagaaaggtgtttgagcttgtgggtgagccctccatatactgcaccagcaatgacgatcaagtgggcatctggagcggccccgcccctcagtgcattatacctaacaaatgcacgcctccaaatgtggaaaatggaatattggtatctgacaacagaagcttattttccttaaatgaagttgtggagtttaggtgtcagcctggctttgtcatgaaaggaccccgccgtgtgaagtgccaggccctgaacaaatgggagccagagttaccaagctgctccagggtgtgtcagccgcctccagaaatcctgcatggtgagcataccccaagccatcaggacaacttttcacctgggcaggaagtgttctacagctgtgagcctggctatgacctcagaggggctgcgtctctgcactgcacaccccagggagactggagccctgaagccccgagatgtgcagtgaaatcctgtgatgacttcttgggtcaactccctcatggccgtgtgctatttccacttaatctccagcttggggcaaaggtgtcctttgtctgtgatgaagggtttcgcttaaagggcagttccgttagtcattgtgtcttggttggaatgagaagcctttggaataacagtgttcctgtgtgtgaacatatcttttgtccaaatcctccagctatccttaatgggagacacacaggaactccctctggagatattccctatggaaaagaaatatcttacacatgtgacccccacccagacagagggatgaccttcaacctcattggggagagcaccatccgctgcacaagtgaccctcatgggaatggggtttggagcagccctgcccctcgctgtgaactttctgttcgtgctggtcactgtaaaaccccagagcagtttccatttgccagtcctacgatcccaattaatgactttgagtttccagtcgggacatctttgaattatgaatgccgtcctgggtattttgggaaaatgttctctatctcctgcctagaaaacttggtctggtcaagtgttgaagacaactgtagacgaaaatcatgtggacctccaccagaacccttcaatggaatggtgcatataaacacagatacacagtttggatcaacagttaattattcttgtaatgaagggtttcgactcattggttccccatctactacttgtctcgtctcaggcaataatgtcacatgggataagaaggcacctatttgtgagatcatatcttgtgagccacctccaaccatatccaatggagacttctacagcaacaatagaacatcttttcacaatggaacggtggtaacttaccagtgccacactggaccagatggagaacagctgtttgagcttgtgggagaacggtcaatatattgcaccagcaaagatgatcaagttggtgtttggagcagccctccccctcggtgtatttctactaataaatgcacagctccagaagttgaaaatgcaattagagtaccaggaaacaggagtttcttttccctcactgagatcatcagatttagatgtcagcccgggtttgtcatggtagggtcccacactgtgcagtgccagaccaatggcagatgggggcccaagctgccacactgctccagggtgtgtcagccgcctccagaaatcctgcatggtgagcataccctaagccatcaggacaacttttcacctgggcaggaagtgttctacagctgtgagcccagctatgacctcagaggggctgcgtctctgcactgcacgccccagggagactggagccctgaagcccctagatgtacagtgaaatcctgtgatgacttcctgggccaactccctcatggccgtgtgctacttccacttaatctccagcttggggcaaaggtgtcctttgtttgcgatgaagggttccgattaaaaggcaggtctgctagtcattgtgtcttggctggaatgaaagccctttggaatagcagtgttccagtgtgtgaacaaatcttttgtccaaatcctccagctatccttaatgggagacacacaggaactccctttggagatattccctatggaaaagaaatatcttacgcatgcgacacccacccagacagagggatgaccttcaacctcattggggagagctccatccgctgcacaagtgaccctcaagggaatggggtttggagcagccctgcccctcgctgtgaactttctgttcctgctgcctgcccacatccacccaagatccaaaacgggcattacattggaggacacgtatctctatatcttcctgggatgacaatcagctacacttgtgaccccggctacctgttagtgggaaagggcttcattttctgtacagaccagggaatctggagccaattggatcattattgcaaagaagtaaattgtagcttcccactgtttatgaatggaatctcgaaggagttagaaatgaaaaaagtatatcactatggagattatgtgactttgaagtgtgaagatgggtatactctggaaggcagtccctggagccagtgccaggcggatgacagatgggaccctcctctggccaaatgtacctctcgtgcacatgatgctctcatagttggcactttatctggtacgatcttctttattttactcatcattttcctctcttggataattctaaagcacagaaaaggcaataatgcacatgaaaaccctaaagaagtggctatccatttacattctcaaggaggcagcagcgttcatccccgaactctgcaaacaaatgaagaaaatagcagggtccttccttgacaaagtactatacagctgaagaacatctcgaatacaattttggtgggaaaggagccaattgatttcaacagaatcagatctgagcttcataaagtctttgaagtgacttcacagagacgcagacatgtgcacttgaagatgctgccccttccctggtacctagcaaagctcctgcctctttgtgtgcgtcactgtgaaacccccacccttctgcctcgtgctaaacgcacacagtatctagtcaggggaaaagactgcatttaggagatagaaaatagtttggattacttaaaggaataaggtgttgcctggaatttctggtttgtaaggtggtcactgttcttttttaaaatatttgtaatatggaatgggctcagtaagaagagcttggaaaatgcagaaagttatgaaaaataagtcacttataattatgctacctactgataaccactcctaatattttgattcattttctgcctatcttctttcacatatgtgtttttttacatacgtacttttccccccttagtttgtttccttttattttatagagcagaaccctagtcttttaaacagtttagagtgaaatatatgctatatcagtttttactttctctagggagaaaaattaatttactagaaaggcatgaaatgatcatgggaagagtggttaagactactgaagagaaatatttggaaaataagatttcgatatcttctttttttttgagatggagtctggctctgtctcccaggctggagtgcagtggcgtaatctcggctcactgcaacgtccgcctcccg

SEQ ID NO: 52723 - DNA, 401 bp, Homo sapiens
gacaatggatagcccccttcctttatcaacccattgaaaaagagactcaaaccacttttatcttaatgaaatgaaaagcacaaatggaaaaaagttatctttgctttatatgcaattgtattaaaatgttgaaatctacaagcaagataattaaaatgctatccctgccaatcagctgagaaatcagtttaactggggtttgacttcatgacaaatgggccatcaaactaaaacttagcagaactatggcagcctgagagttccagagtggaatttggccttagaacatttcctaagtgcgagtttggggcacagccagccaaagaggctcggtgacttgtcactccagagaatgcctgcagtgtcctcaccctgtcacagcctcaggacacattttgaat

SEQ ID NO: 52724 - DNA, 469 bp, Homo sapiens
ccagtacctatgaccctgggactgggccctggggacaggagactgacccttggtctgagggggtaggatagttggaagggtgtcaaggtgtttgtggtccatcggtctggctctcaggaccatgtggacctcaagcgtgtctcctcccccgccctctgggctccccttccctgggcgcagtctgtctcttccaagttcaccacttgtgtctctgctccagcagctgtggctgggtgcggctgccaattaagcaagtgggactgtaagtgacaggctaaaattaggtgtatcgacacccccagttctcctttcattggggttgttctgagccttctagactgtaagttgacagtcacctgccaagcttgaggagcgggtgtggggcagggcctcctgggaatgtgagtttgggaagttcttggttactggctgctctgagtggggtctgtgtgtgtgcgtgcctgctgct

SEQ ID NO: 52725 - DNA, 385 bp, Homo sapiens
cttactttccttttgattagaaaaaagtaaatttcaacattcaaagacagagcacatccctctccctgaaggaaggtgcaaagtcccagcctgacttgagtgtttgaaatttagaagggtggctcctgttggtcctagaattgtgcggctttcttgactgcctggaatacagacctttccatcaggaaagcctcaaagctggttctccaggttgtatgcctagcacataccaaataccatgttgtagcagagaaaacttagcaaggactttgaatggacatttaatgttatttcaggcaaggcccatggctcacacttgtaatcccagcacttttggaggctcaggtgggagaggattgcttgaggccaggagtttgagaccagc

SEQ ID NO: 52726 - DNA, 520 bp, Homo sapiens
ggacttgtatgttttataatgagtctcccatttgcggggcataactcagtttcaaaatcaacatcattttaagcttggtgtgcttctgtgatcccagttaagacaggagaatcacttgagctgaggagtttgagaccaacttgggcaatatagcaagaacctgtgacaaaagaaaaaaaaaatccttgtgtgtgtatatacacacacatactttatcatacataaacgcacatgcatacagtcatgtgctgcataatgacattttagtcaatgatggaccacatatgtgatggtggtcccataagattataatggagctgaaacattcctgtcaactattgactttgtagctgtgctaatgtcatagcacagtgcattactcatgtgtttgtggtgatgctctgcatcaaacaaacctgcacttcgagtcatataaaagtataacacatacagttatgcacagtacataatacttgataatgaaaataaatgactactggtttatgtatttactcatact

SEQ ID NO: 52727 - DNA, 309 bp, Homo sapiens
ctccaacctctgcctctgccgtcccatggccattttctctctgtgggcctctgtctccaaatctctctctccttataagaacaccagtcatggccaggcacagtggctcatgcttataatcccagcatcttgggaggctgaggcaagtggatcacttgagtccaggggttcaagaccagcctgagcaatgtggcaaaactctgtctctacaaaaaatgcaaaaaatggccaggcatggtggcaagtgcctatgatcccagctattcctgaggctgaagtgaggatcactgagcccaggaggcagagtct

SEQ ID NO: 52728 - DNA, 351 bp, Homo sapiens
gcctcccaaagtgttgagattacaggcgtgagccactgcacctggcctatcttttgaagtatttccgaagtattatttcttttatctcttgaagcaaaggaaactgcttcataagttttattagagggcaaaatcttttattgtattaaaaattgattttataaatgattttttagaagaaagcaacaatttaaaaaatatgtatgaatcttttttatgctctcagttgagaaaatctttaagattctaattcaggttgggtaccttgaatccaaaagctttctgaagtggaaggaactgcaaaaatgatttagttcagcaattcttagaatatagtcaatgagtgtcttc

SEQ ID NO: 52729 - DNA, 895 bp, Homo sapiens
tgtggctgctttttactaaccacagagttgaatagccatagaaactctacagccatttatggaaagtttgctgacccctgatctgaataatactaatcttggttccggctttgttgtacgtattctgttctgttgaatatcttattgccctcatgatcattttcagttaagaaggactgctacaacaggcatggaaacaaactcttatgggaccactaaccctgtctgccgtccaggcaacccttgctctctgctttctttagcgtgccatatccccttcccttcttttctctcgagcttctattccctcactactattgtaaatctctagagagcataaaaggggaaatttaattttcttttatcttttcctcctcctgaaaagtagaaaacagtcaataaacttatataaaatatttaaggtgagttttaatattattgtttttttttttgagatggagtctggctctgtcgcccaggctggagtgcagtggcatgatctcggctcactgcaactttcgcctcctgggttcaagtgattctcctgcttcagtatcctgagtagctgggattacaggcgcctggctaatttttgtattttagtggacacggggtttcactatgttggctaggtgggtctcgaactcttgacctcaggtgatccacccacttcggcctcccaaaatgctgggattacagacatgagccactgcgcctggcctattattgtctttttattcaaagtaatacctcataagacttaagaaagtttatagtattaaatctttgtggtttacactgaaatggatttatgttgctgcggattaactggagttttgatttaaaggcagaaatgtaagttttattgctaatctgtcatgagattagagttacc

SEQ ID NO: 52730 - DNA, 234 bp, Homo sapiens
ttggtataatcttgatacgaaaaccagacaaagatagcaaaagaaagaaatatttcaacttacaaacctagatgcaaaaatccttaataaatatcagcaaattgagtaaagtgaggtataagaacataataaataatgactaaggaggcatggatgattaagcatttgaaaacttttcttaattttctaaattaaaaattatgtcctaatagatacaaaaaaagttattctaca

SEQ ID NO: 52731 - DNA, 411 bp, Homo sapiens
agtttattatttttattttttgtagagaccgtgtctccctatgtcgcccaggaaaaggaaactattaataagcttggacgaatatgcttcaactctagaattctgaaaaaaatcagaaaactaaaaacttctgaagctctatttgaaatctctcttcaaattgagttctaaagttcctgttgcttcagacaatggatgagcaatcacaaggaatgcaagggccacctgttcctcagttccaaccacaggcagaggagaaggagaaagagaaggagtttcttgctgtctcatggaagggagaagtagaagaaaatctacatataagtggatctgcacagttcaaacttgtgttgttcaagagtcaattgtataaacgagtaattaaaagcctgtgtgatccaggacccaaca

SEQ ID NO: 52732 - DNA, 1132 bp, Homo sapiens
  misc_feature (926)..(926): n is a, c, g, or t
gtttacactcctgacagcggcggcagcaggaggaggatcgggagtcgcgggaggatgggccgccgctaggctcgcactccggacgcgcctcgcagtgcgcagggtgggtgccccgcgcctgcagcgtccgccggggcggcgcggcgggaggtggccgacaggctccgggcctcgcagcctcagcccccggcccagcgcgctttccgacggcggcgccgcgccgagccacccgcccgcccaaggtctctcgcgggcgggagaacggaaaactcccaacttcctgagttctaaagttcctgttgcttcagacaatggatgagcaatcacaaggaatgcaagggccacctgttcctcagttccaaccacagaaggccttacgaccggatatgggctataatacattagccaactttcgaatagaaaagaaaattggtcgcggacaatttagtgaagtttatagagcagcctgtctcttggatggagtaccagtagctttaaaaaaagtgcagatatttgatttaatggatgccaaagcacgtgctgattgcatcaaagaaatagatcttcttaagcaactcaaccatccaaatgtaataaaatattatgcatcattcattgaagataatgaactaaacatagttttggaactagcagatgctggcgacctatccagaatgatcaagcattttaagaagcaaaagaggctaattcctgaaagaactgtttggaagtattttgttcagctttgcagtgcattggaacacatgcattctcgaagagtcatgcatagagatataaaaccagctaatgtgttcattacagccactggggtggtaaaacttggagatcttgggcttggccggtttttcagctcaaaaaccacagctgcacattctttagttggtacgccttattacatgtctccngagagaatacatgaaaatggatacaacttcgaatctgacatctggtctcttggctgtctactatatgagatgggtgcatttacaaagtcctttcaatggtgacgaaatgaatttatactcacggtgtaagaagatagaacagtgtgaataaccagctcttccttcagatcactattcagaagaactccgacagttagttcatatgt

SEQ ID NO: 52733 - DNA, 1144 bp, Homo sapiens
  misc_feature (1038)..(1038): n is a, c, g, or t
  misc_feature (1144)..(1144): n is a, c, g, or t
gtttacactcctgacagcggcggcagcaggaggaggatcgggagtcgcgggaggatgggccgccgctaggctcgcactccggacgcgcctcgcagtgcgcagggtgggtgccccgcgcctgcagcgtccgccggggcggcgcggcgggaggtggccgacaggctccgggcctcgcagcctcagcccccggcccagcgcgctttccgacggcggcgccgcgccgagccacccgcccgcccaaggtctctcgcgggcgggagaacggaaaactcccaacttcctggaaaaggaaactattaataagcttggacgaatatgcttcaactctagaattctgaaaaaaatcagaaaactaaaaacttctgaagctctatttgaaatctctcttcaaattgagttctaaagttcctgttgcttcagacaatggatgagcaatcacaaggaatgcaagggccacctgttcctcagttccaaccacagaaggccttacgaccggatatgggctataatacattagccaactttcgaatagaaaagaaaattggtcgcggacaatttagtgaagtttatagagcagcctgtctcttggatggagtaccagtagctttaaaaaaagtgcagatatttgatttaatggatgccaaagcacgtgctgattgcatcaaagaaatagatcttcttaagcaactcaaccatccaaatgtaataaaatattatgcatcattcattgaagataatgaactaaacatagttttggaactagcagatgctggcgacctatccagaatgatcaagcattttaagaagcaaaagaggctaattcctgaaagaactgtttggaagtattttgttcagctttgcagtgcattggaacacatgcattctcgaagagtcatgcatagagatataaaaccagctaatgtgttcattacagccactggggtggtaaaacttggagatcttgggcttggccggtttttcagctcaaaaaccacagctgcacattctttagttggtacgccttattacatgtctccngagagaatacatgagatggctgcattacaaagtcccttctatggtgaccaaatggacttatacttactgcggaagaagtttgaacagtgtgactaaccaccctctn

SEQ ID NO: 52734 - DNA, 1032 bp, Homo sapiens
  misc_feature (926)..(926): n is a, c, g, or t
  misc_feature (1032)..(1032): n is a, c, g, or t
gtttacactcctgacagcggcggcagcaggaggaggatcgggagtcgcgggaggatgggccgccgctaggctcgcactccggacgcgcctcgcagtgcgcagggtgggtgccccgcgcctgcagcgtccgccggggcggcgcggcgggaggtggccgacaggctccgggcctcgcagcctcagcccccggcccagcgcgctttccgacggcggcgccgcgccgagccacccgcccgcccaaggtctctcgcgggcgggagaacggaaaactcccaacttcctgagttctaaagttcctgttgcttcagacaatggatgagcaatcacaaggaatgcaagggccacctgttcctcagttccaaccacagaaggccttacgaccggatatgggctataatacattagccaactttcgaatagaaaagaaaattggtcgcggacaatttagtgaagtttatagagcagcctgtctcttggatggagtaccagtagctttaaaaaaagtgcagatatttgatttaatggatgccaaagcacgtgctgattgcatcaaagaaatagatcttcttaagcaactcaaccatccaaatgtaataaaatattatgcatcattcattgaagataatgaactaaacatagttttggaactagcagatgctggcgacctatccagaatgatcaagcattttaagaagcaaaagaggctaattcctgaaagaactgtttggaagtattttgttcagctttgcagtgcattggaacacatgcattctcgaagagtcatgcatagagatataaaaccagctaatgtgttcattacagccactggggtggtaaaacttggagatcttgggcttggccggtttttcagctcaaaaaccacagctgcacattctttagttggtacgccttattacatgtctccngagagaatacatgagatggctgcattacaaagtcccttctatggtgaccaaatggacttatacttactgcggaagaagtttgaacagtgtgactaaccaccctctn

SEQ ID NO: 52735 - DNA, 618 bp, Homo sapiens
catagctggacctagattgaaagagtaaagaaaaatacttattaaccaacccagtataattaagaagtttgtctgtaaatactagaacaattggtagaaaaaacaaatacatattctcccctgagaatctgtaacatcaggattatccatcatgtgttgtttgacttcaaacttttaaattatacagccttgaaccatgaaccatcaaattaacaaattaacatatagattattttctggccattgatacactggaagtttggtggaagagatgcaaaatcattccagagcaaaagctgaaaatttttttctgcaaagggcaagataataaacatcttaggcattattgaccattttaaagagcagcttatagtcaccaaaaggaatatcaacaaactagaaagtgaagatgaagaattatccagaatgcagaatatgaaccaaaagatagaacataagataagctgaaagccatggaggattgaataaaactatccaaggaatatctaaaagaaattctgaaaagagaatagtaggaataaaaataatgggattataatagtttgcttctacttctgggatgaatgtagtagttgtataagacacatactcttatta

SEQ ID NO: 52736 - DNA, 546 bp, Homo sapiens
ctgatacactcccaaagacaatgagggctccctatgtgcagactaaagttttttagttagatacacatattaactagatcacttaaacaaagattaggccttgtccacagcctattcaagaatagaaaatatgcttatttatagctcaataatttcattattcctgtatgggtttttcctagatagaaaagttgagtaaatttatttttaaatagtatgtatatactcacacacaataatttaacaaacaaaacatgtataaaaattcaacaaaagttttataacataaaagattatggtggctggatgtggtggctcacgcctctaatcccagcactttgggaggccgaggcgggtggatcacaaggtcaggagttcgagaccagcctgaccaacatggtgaaaccttgcctctacgaaaaatacaaaaattagctgggtgtggtggcacacacctgtaatcccagctactcaggaagctaaagcaggaaaattgtttgaacccgggaggcggaggttgcagtgagccaggattgcaccactaca

SEQ ID NO: 52737 - DNA, 813 bp, Homo sapiens
aacaacggctgttctttaatacgtttatgttccctaccaaaacattcctcactcagtactgctacccagttaaagatttgactggtcggtgctgcagtcacagagaaaatgaattggctgatctgacgaaaaatttatcttctaacctaaggcatgacagagtcagataaatgggccctttccactaccaagaacatgatcaaagttctgcttttgtacattcaaccatggcttatcccttctggcaggcatatttcctactggaattttcagtgtctcacacctgtggtcttccacctctcctcctgcttccctactgctgacgagtcccctatgtcccctgggtaaccttatttcctctcacgtagcaatcacagatagagaagacatacggttcaggcgcacgattcccagtccaaaattccaaatccaggaagcaagattcggcagcaaaacctattttgaacagacactaggctgttgatagtctctgtttactccattcagtatgatattcacgtgttttgctgtggggatattattgtatttcattatagagtattatctcaggccctgctggaggtattctgtaataatacacagtatttggatttttaaaaatgtgaatcttcaagttgaatgaggaagaatctttttttaaaaagttttgaagcctgaaacacacgtggcctcaagggtttgagatgagatagggggaagaagccatccctgtgagaactgtagccctccgcagataaggacctctgctgctgtccccggcaaatgtagataaagccattagcttgcacccat

SEQ ID NO: 52738 - DNA, 3531 bp, Homo sapiens
aggcggccggcgcagggccgcgagaggcttcgtcgccgctgcagctccgggggctcccaggggagcgtgcgcggaacctccaggcccagcagttatgaaagaaaaaaaattacattatcttgaagaactgcaggagttgagtattccagaaaatgcaatgaaataggtcagctacttgattttaaaagtcaaatactggatcttttattaaggaccccggctgcggcgaggaggaaggagccagcctagcagcttctgcgcctgtggccgcgggtgtcctggaggcctctcggtgtgacgagtgggggacccgaaggctcgtgcgccacctccaggcctggacgctgccctccgtcttctgcccccaataggtgcgccggaccttcaggccctggggtgaattcagctgctcctacatcagcttccggaaccaccaaaaattcaaattgggattttccggagtaaacaagagcctagagccctttgctcaatgctggatttaatacgtatatatttttaagcgagttggttttttcccctttgatttttgatcttcgcgacagttcctcccacgcatattatcgttgttgccgtcgttttctctccccgcgtggctccttgacctgcgagggagagagaggacaccgaagccgggagctcgcagggaccatgtatcagagcttggccatggccgccaaccacgggccgccccccggtgcctacgaggcgggcggccccggcgccttcatgcacggcgcgggcgccgcgtcctcgccagtctacgtgcccacaccgcgggtgccctcctccgtgctgggcctgtcctacctccagggcggaggcgcgggctctgcgtccggaggcgcctcgggcggcagctccggtggggccgcgtctggtgcggggcccgggacccagcagggcagcccgggatggagccaggcgggagccgacggagccgcttacaccccgccgccggtgtcgccgcgcttctccttcccggggaccaccgggtccctggcggccgccgccgccgctgccgcggcccgggaagctgcggcctacagcagtggcggcggagcggcgggtgcgggcctggcgggccgcgagcagtacgggcgcgccggcttcgcgggctcctactccagcccctacccggcttacatggccgacgtgggcgcgtcctgggccgcagccgccgccgcctccgccggccccttcgacagcccggtcctgcacagcctgcccggccgggccaacccggccgcccgacaccccaatctcgatatgtttgacgacttctcagaaggcagagagtgtgtcaactgtggggctatgtccaccccgctctggaggcgagatgggacgggtcactatctgtgcaacgcctgcggcctctaccacaagatgaacggcatcaaccggccgctcatcaagcctcagcgccggctgtccgcctcccgccgagtgggcctctcctgtgccaactgccagaccaccaccaccacgctgtggcgccgcaatgcggagggcgagcctgtgtgcaatgcctgcggcctctacatgaagctccacggggtccccaggcctcttgcaatgcggaaagaggggatccaaaccagaaaacggaagcccaagaacctgaataaatctaagacaccagcagctccttcaggcagtgagagccttcctcccgccagcggtgcttccagcaactccagcaacgccaccaccagcagcagcgaggagatgcgtcccatcaagacggagcctggcctgtcatctcactacgggcacagcagctccgtgtcccagacgttctcagtcagtgcgatgtctggccatgggccctccatccaccctgtcctctcggccctgaagctctccccacaaggctatgcgtctcccgtcagccagtctccacagaccagctccaagcaggactcttggaacagcctggtcttggccgacagtcacggggacataatcactgcgtaatcttccctcttccctcctcaaattcctgcacggacctgggacttggaggatagcaaagaaggaggccctgggctcccaggggccggcctcctctgcctggtaatgactccagaacaacaactgggaagaaacttgaagtcgacaatctggttaggggaagcgggtgttggattttctcagatgcctttacacgctgatgggactggagggagcccacccttcagcacgagcacactgcatctctcctgtgagttggagacttctttcccaagatgtccttgtcccctgcgttccccactgtggcctagaccgtgggttttgcattgtgtttctagcaccgaggatctgagaaccagcggagggccgggccctgggacccctgctccagcccgaatgacggcatctgtttgccatgtacctggatgcgacgggcccctggggacaggcccttgccccatccatccgcttgaggcatggcaccgccctgcatccctaataccaaatctgactccaaaactgtggggtgtgacacacaagtgactgaacacttcctggggagctacaggggcacttaacccaccacagcgcagcctcatcaaaatgcagctggcaacttctcccccaggtgccttccccctgctgccggcctttgctccttcacttccaacatctctcaaaataaaaatccctcttcccgctctgagcgattcagctctgcccgcagcttgtacatgtctctcccctggcaaaacaagagctgggtagtttagccaaacggcaccccctcgagttcactgcagacccttcgttcaccgtgtcacacatagaggggttctgagtaagaacaaaacgttctgctgctcaagccagtctggcaagcactcagcccagcctcgaggtccttctggggagagtgtaagtggacagagtcctggtcagggggcaggagtgtcccaagggctggcccacctgctgtctgtctgctcctcctagcccttggtcagatggcagccagagtccctcaggacctgcagcctcgccccggcagaagtcttttgtccaggaggcaaaaagccagagattctgcaacacgaattcgaagcaaacaaacacaacacaacagaattcctggaaagaagacgactgctaagacacggcaggggggcctggagggagcctccgactctgagctgctccgggatctgccgcgttctcctctgcacattgctgtttctgcccctgatgctggagctcaaggagactccttcctctttctcagcagagctgtagctgactgtggcattactacgcctccccacacgcccagacccctcactccaaaatcctactggctgtagcagagaatacctttgaaccaagattctgttttaatcatcatttacattgttttcttccaaaggccccctcgtataccctccctaacccacaaacctgttaacattgtcttaaggtgaaatggctggaaaatcagtatttaactaataaatttatctgtattcgtctttcaaaaaa

SEQ ID NO: 52739 - DNA, 3411 bp, Homo sapiens
aggcggccggcgcagggccgcgagaggcttcgtcgccgctgcagctccgggggctcccaggggagcgtgcgcggaacctccaggcccagcaggaccccggctgcggcgaggaggaaggagccagcctagcagcttctgcgcctgtggccgcgggtgtcctggaggcctctcggtgtgacgagtgggggacccgaaggctcgtgcgccacctccaggcctggacgctgccctccgtcttctgcccccaataggtgcgccggaccttcaggccctggggtgaattcagctgctcctacatcagcttccggaaccaccaaaaattcaaattgggattttccggagtaaacaagagcctagagccctttgctcaatgctggatttaatacgtatatatttttaagcgagttggttttttcccctttgatttttgatcttcgcgacagttcctcccacgcatattatcgttgttgccgtcgttttctctccccgcgtggctccttgacctgcgagggagagagaggacaccgaagccgggagctcgcagggaccatgtatcagagcttggccatggccgccaaccacgggccgccccccggtgcctacgaggcgggcggccccggcgccttcatgcacggcgcgggcgccgcgtcctcgccagtctacgtgcccacaccgcgggtgccctcctccgtgctgggcctgtcctacctccagggcggaggcgcgggctctgcgtccggaggcgcctcgggcggcagctccggtggggccgcgtctggtgcggggcccgggacccagcagggcagcccgggatggagccaggcgggagccgacggagccgcttacaccccgccgccggtgtcgccgcgcttctccttcccggggaccaccgggtccctggcggccgccgccgccgctgccgcggcccgggaagctgcggcctacagcagtggcggcggagcggcgggtgcgggcctggcgggccgcgagcagtacgggcgcgccggcttcgcgggctcctactccagcccctacccggcttacatggccgacgtgggcgcgtcctgggccgcagccgccgccgcctccgccggccccttcgacagcccggtcctgcacagcctgcccggccgggccaacccggccgcccgacaccccaatctcgatatgtttgacgacttctcagaaggcagagagtgtgtcaactgtggggctatgtccaccccgctctggaggcgagatgggacgggtcactatctgtgcaacgcctgcggcctctaccacaagatgaacggcatcaaccggccgctcatcaagcctcagcgccggctgtccgcctcccgccgagtgggcctctcctgtgccaactgccagaccaccaccaccacgctgtggcgccgcaatgcggagggcgagcctgtgtgcaatgcctgcggcctctacatgaagctccacggggtccccaggcctcttgcaatgcggaaagaggggatccaaaccagaaaacggaagcccaagaacctgaataaatctaagacaccagcagctccttcaggcagtgagagccttcctcccgccagcggtgcttccagcaactccagcaacgccaccaccagcagcagcgaggagatgcgtcccatcaagacggagcctggcctgtcatctcactacgggcacagcagctccgtgtcccagacgttctcagtcagtgcgatgtctggccatgggccctccatccaccctgtcctctcggccctgaagctctccccacaaggctatgcgtctcccgtcagccagtctccacagaccagctccaagcaggactcttggaacagcctggtcttggccgacagtcacggggacataatcactgcgtaatcttccctcttccctcctcaaattcctgcacggacctgggacttggaggatagcaaagaaggaggccctgggctcccaggggccggcctcctctgcctggtaatgactccagaacaacaactgggaagaaacttgaagtcgacaatctggttaggggaagcgggtgttggattttctcagatgcctttacacgctgatgggactggagggagcccacccttcagcacgagcacactgcatctctcctgtgagttggagacttctttcccaagatgtccttgtcccctgcgttccccactgtggcctagaccgtgggttttgcattgtgtttctagcaccgaggatctgagaaccagcggagggccgggccctgggacccctgctccagcccgaatgacggcatctgtttgccatgtacctggatgcgacgggcccctggggacaggcccttgccccatccatccgcttgaggcatggcaccgccctgcatccctaataccaaatctgactccaaaactgtggggtgtgacacacaagtgactgaacacttcctggggagctacaggggcacttaacccaccacagcgcagcctcatcaaaatgcagctggcaacttctcccccaggtgccttccccctgctgccggcctttgctccttcacttccaacatctctcaaaataaaaatccctcttcccgctctgagcgattcagctctgcccgcagcttgtacatgtctctcccctggcaaaacaagagctgggtagtttagccaaacggcaccccctcgagttcactgcagacccttcgttcaccgtgtcacacatagaggggttctgagtaagaacaaaacgttctgctgctcaagccagtctggcaagcactcagcccagcctcgaggtccttctggggagagtgtaagtggacagagtcctggtcagggggcaggagtgtcccaagggctggcccacctgctgtctgtctgctcctcctagcccttggtcagatggcagccagagtccctcaggacctgcagcctcgccccggcagaagtcttttgtccaggaggcaaaaagccagagattctgcaacacgaattcgaagcaaacaaacacaacacaacagaattcctggaaagaagacgactgctaagacacggcaggggggcctggagggagcctccgactctgagctgctccgggatctgccgcgttctcctctgcacattgctgtttctgcccctgatgctggagctcaaggagactccttcctctttctcagcagagctgtagctgactgtggcattactacgcctccccacacgcccagacccctcactccaaaatcctactggctgtagcagagaatacctttgaaccaagattctgttttaatcatcatttacattgttttcttccaaaggccccctcgtataccctccctaacccacaaacctgttaacattgtcttaaggtgaaatggctggaaaatcagtatttaactaataaatttatctgtattcgtctttcaaaaaa

SEQ ID NO: 52740 - DNA, 2418 bp, Homo sapiens
cccggtcagttctcctctcaggagaagctttcctgccggcagtgcccggcgctcactggttattcgcctgacggtgaatgatggttaggactggaaaccaggtctcgatgcccacgttcgctctcctcgggcagcagaaaccttgttctgatttattcctcgcagtggcgcaggtgacaggagagttaggtgccgtcacaggtcagagatctcatgcagggtcgttagggcccagccctgcctcccgttagggaggcccagctccgcagccacacgcgaggtggaagggcagtgcacaccttttacttggacatgaagcatttgtttcctgtcttgcagtccgcctcccgccgagtgggcctctcctgtgccaactgccagaccaccaccaccacgctgtggcgccgcaatgcggagggcgagcctgtgtgcaatgcctgcggcctctacatgaagctccacggggtccccaggcctcttgcaatgcggaaagaggggatccaaaccagaaaacggaagcccaagaacctgaataaatctaagacaccagcagctccttcaggcagtgagagccttcctcccgccagcggtgcttccagcaactccagcaacgccaccaccagcagcagcgaggagatgcgtcccatcaagacggagcctggcctgtcatctcactacgggcacagcagctccgtgtcccagacgttctcagtcagtgcgatgtctggccatgggccctccatccaccctgtcctctcggccctgaagctctccccacaaggctatgcgtctcccgtcagccagtctccacagaccagctccaagcaggactcttggaacagcctggtcttggccgacagtcacggggacataatcactgcgtaatcttccctcttccctcctcaaattcctgcacggacctgggacttggaggatagcaaagaaggaggccctgggctcccaggggccggcctcctctgcctggtaatgactccagaacaacaactgggaagaaacttgaagtcgacaatctggttaggggaagcgggtgttggattttctcagatgcctttacacgctgatgggactggagggagcccacccttcagcacgagcacactgcatctctcctgtgagttggagacttctttcccaagatgtccttgtcccctgcgttccccactgtggcctagaccgtgggttttgcattgtgtttctagcaccgaggatctgagaaccagcggagggccgggccctgggacccctgctccagcccgaatgacggcatctgtttgccatgtacctggatgcgacgggcccctggggacaggcccttgccccatccatccgcttgaggcatggcaccgccctgcatccctaataccaaatctgactccaaaactgtggggtgtgacacacaagtgactgaacacttcctggggagctacaggggcacttaacccaccacagcgcagcctcatcaaaatgcagctggcaacttctcccccaggtgccttccccctgctgccggcctttgctccttcacttccaacatctctcaaaataaaaatccctcttcccgctctgagcgattcagctctgcccgcagcttgtacatgtctctcccctggcaaaacaagagctgggtagtttagccaaacggcaccccctcgagttcactgcagacccttcgttcaccgtgtcacacatagaggggttctgagtaagaacaaaacgttctgctgctcaagccagtctggcaagcactcagcccagcctcgaggtccttctggggagagtgtaagtggacagagtcctggtcagggggcaggagtgtcccaagggctggcccacctgctgtctgtctgctcctcctagcccttggtcagatggcagccagagtccctcaggacctgcagcctcgccccggcagaagtcttttgtccaggaggcaaaaagccagagattctgcaacacgaattcgaagcaaacaaacacaacacaacagaattcctggaaagaagacgactgctaagacacggcaggggggcctggagggagcctccgactctgagctgctccgggatctgccgcgttctcctctgcacattgctgtttctgcccctgatgctggagctcaaggagactccttcctctttctcagcagagctgtagctgactgtggcattactacgcctccccacacgcccagacccctcactccaaaatcctactggctgtagcagagaatacctttgaaccaagattctgttttaatcatcatttacattgttttcttccaaaggccccctcgtataccctccctaacccacaaacctgttaacattgtcttaaggtgaaatggctggaaaatcagtatttaactaataaatttatctgtattcgtctttcaaaaaa

SEQ ID NO: 52741 - DNA, 1622 bp, Homo sapiens
aggcggccggcgcagggccgcgagaggcttcgtcgccgctgcagctccgggggctcccaggggagcgtgcgcggaacctccaggcccagcagttatgaaagaaaaaaaattacattatcttgaagaactgcaggagttgagtattccagaaaatgcaatgaaataggtcagctacttgattttaaaagtcaaatactggatcttttattaaggaccccggctgcggcgaggaggaaggagccagcctagcagcttctgcgcctgtggccgcgggtgtcctggaggcctctcggtgtgacgagtgggggacccgaaggctcgtgcgccacctccaggcctggacgctgccctccgtcttctgcccccaataggtgcgccggaccttcaggccctggggtgaattcagctgctcctacatcagcttccggaaccaccaaaaattcaaattgggattttccggagtaaacaagagcctagagccctttgctcaatgctggatttaatacgtatatatttttaagcgagttggttttttcccctttgatttttgatcttcgcgacagttcctcccacgcatattatcgttgttgccgtcgttttctctccccgcgtggctccttgacctgcgagggagagagaggacaccgaagccgggagctcgcagggaccatgtatcagagcttggccatggccgccaaccacgggccgccccccggtgcctacgaggcgggcggccccggcgccttcatgcacggcgcgggcgccgcgtcctcgccagtctacgtgcccacaccgcgggtgccctcctccgtgctgggcctgtcctacctccagggcggaggcgcgggctctgcgtccggaggcgcctcgggcggcagctccggtggggccgcgtctggtgcggggcccgggacccagcagggcagcccgggatggagccaggcgggagccgacggagccgcttacaccccgccgccggtgtcgccgcgcttctccttcccggggaccaccgggtccctggcggccgccgccgccgctgccgcggcccgggaagctgcggcctacagcagtggcggcggagcggcgggtgcgggcctggcgggccgcgagcagtacgggcgcgccggcttcgcgggctcctactccagcccctacccggcttacatggccgacgtgggcgcgtcctgggccgcagccgccgccgcctccgccggccccttcgacagcccggtcctgcacagcctgcccggccgggccaacccggccgcccgacaccccaatctcggtgagtaggagcgcgagggctggggcgcgtgagggccggggcaggggccgtcttgagccctgtcgagggcctcttgtttttccaccaacgccttcgttgggctggggatggtgcttcactacctcgagtttctagggaaggcagaagccagtgcggggctggcgacatcacagccccagaagaccggcttctgtggaaggggccgggcctgcccgccggggcctcttctgagatggtgtcagggtcggagtgcggcctccccgccatcccagacatcgaccgtggccgcgctgcgctgtgggtgacgcgggaggacagcgggctccctggagagccg

SEQ ID NO: 52742 - DNA, 355 bp, Homo sapiens
gatagggggaagaagccatccctgtgagaactgtagccctccgcagataaggacctctgctgctgtccccggcaaatgtagataaagccattagcttgcacccatcccggctgtctcgcaggctgccggctgttcgtttgtccctgccgctgatttgggtgtgctgactctgcttcattccagctccttcaggcagtgagagccttcctcccgccagcggtgcttccagcaactccagcaacgccaccaccagcagcagcgaggagatgcgtcccatcaagacggagcctggcctgtcatctcactacgggcacagcagctccgtgtcccaggtacgcgccatggctggggcgcc

SEQ ID NO: 52743 - DNA, 575 bp, Homo sapiens
  misc_feature (27)..(27): n is a, c, g, or t
  misc_feature (41)..(41): n is a, c, g, or t
cctctaaaactaatgatcccccggctngagaaattcgcacnatgccaagtgcacgggcctcctcgcctcccttaagcctgggaaggcgctggcaggccacttctgcgcctcgtggctggagagctccggacggtgccgtggggaaccgggtaccagtcccggctcccggggccactttgcgaaccacctcctacgcagagacggggccgggagttcaccccgctgccgctctccagcacaccggactccgcgggaatttcagcagcgcactctggcgtcttctcggctttaggccgggttggggctacgggatgaaggcggccatcgggccagagtcggcatgctgttctgctggtggtttgagccacccgtatcctggacaccggccaggcggtcccttcactccctgcctcgcttccctctcttcacggagcctcgaggcccagggacttcagcagcatcaggaggggctccggttttccgggcctgaggacagacactgagacatcgcctataattagcaacaataatgcccgtgatggtagtaattactaataaccagctccgacatcggg

SEQ ID NO: 52744 - DNA, 713 bp, Homo sapiens
aaaaacaattagtaaaaattatgcattaaggaattatttactagactttctggaagtaaaaaataagtcagctggttttccctttgaattcctatatattaaggcagaattctctatactgtccaccaaaatcatagttacaactgtttacttgaaatgatttatatactgcattgacctggcatgttaatattttcctataaatatcaccacttatccccatgccctaaagcagtttttttaaacccattctttcttggagaataattataataccttaaatatagaactttgggtttctgatcttgccatagccatgtagcacagccactgatttttagtaagctgtccattcctgtacttttcttaatttgctaggtagaagctagaacgagagagaacaaatgtctttttctagaagctagaaaagaaggagttcttcaaaactcccacagaataaaatgtatacagaatagaggatttgacctagcacttgtcagagagaaagatcatcaccaaaaatgtctaagatggaaaaagaagttgggggctgtttcactgacctcatttgctgttctctactggatgtttgtgtttagggaatggttatttttatttctattttacaccatttttcagcttcaggcacagcgtatgcgtcttacagtgcaccatggctgaataaatatgagaagcattttctaaaaaaaaag

SEQ ID NO: 52745 - DNA, 305 bp, Homo sapiens
gaatttgcatatgcagatgctcttcaacttctgatgggattatctcccaataaacccattgtcagttgaaaatattggaagtcaaaataaatttaatacccagataaacatcataaagtcaaaaaattgttagtcaaacaattttaagtgggggatcgtctgtagttaaataggaaaatgttattttcatgagttttcatttaatttttttttaagatatagactcaacaacactttcatttatacaatgaaatgttagtacccattttaatagaattcattttcagtttcttttatcctttacc

SEQ ID NO: 52746 - DNA, 295 bp, Homo sapiens
cagcattatctcctacccatttatctcttctgtagcatgtaaagatttagaatggattggttcaaccaaaagttatagttaggaaaaaattctgaaaaacctcaaaatgaaacaatgtctatagtggctgcctgaccacttctcacccttcctctttgagagaactctgtcagagcagaaagttggcagccagcagaatagataaggaaaatttagtaccatccttacaactgaagtcctatttgcctgctgctctgcagattcagccccaaaatataggaccaaatctggtaca

SEQ ID NO: 52747 - DNA, 927 bp, Homo sapiens
agcacagcagcaactgactgggcagcctttcaggaaagatgcagccactcctgcttctgctggcctttctcctacccactggggctgaggcaggggagatcatcggaggccgggagagcaggccccactcccgcccctacatggcgtatcttcagatccagagtccagcaggtcagagcagatgtggagggttcctggtgcgagaagactttgtgctgacagcagctcattgctggggaagcaatataaatgtcaccctgggcgcccacaatatccagagacgggaaaacacccagcaacacatcactgcgcgcagagccatccgccaccctcaatataatcagcggaccatccagaatgacatcatgttattgcagctgagcagaagagtcagacggaatcgaaacgtgaacccagtggctctgcctagagcccaggagggactgagacccgggacgctgtgcactgtggccggctggggcagggtcagcatgaggaggggaacagatacactccgagaggtgcagctgagagtgcagagggataggcagtgcctccgcatcttcggttcctacgacccccgaaggcagatttgtgtgggggaccggcgggaacggaaggctgccttcaagggggattccggaggccccctgctgtgtaacaatgtggcccacggcatcgtctcctatggaaagtcgtcaggggttcctccagaagtcttcaccagggtctcaagtttcctgccctggataaggacaacaatgagaagcttcaaactgctggatcagatggagacccccctgtgactgactcttcttctcggggacacaggccagctccacagtgttgccagagccttaataaacgtccacagagtataaataaccaattcctcatttgttcattaaacgtcattcagtacttagt

SEQ ID NO: 52748 - DNA, 499 bp, Homo sapiens
cattctcctggagaagggagaggtaccttgactcagattgggctggagacagtaattaaggcagagctgaagtccagcgaccgaaaagatccagaggcttggctcctgtaccccaccgatcttccatctcacacacacccagcaattgaaggggcccacccacccctgccttccctgagagcccggagctcagggaagcaggagcagggaggcctgtctcagtctcccttctcctctctacctacagggggattccggaggccccctgctgtgtaacaatgtggcccacggcatcgtctcctatggaaagtcgtcaggggttcctccagaagtcttcaccagggtctcaagtttcctgccctggataaggacaacaatgagaagcttcaaactgctggatcagatggagacccccctgtgactgactcttcttctcggggacacaggccagctccacagtgttgccagagccttaataaacgtccacagagtataaata

SEQ ID NO: 52749 - DNA, 338 bp, Homo sapiens
gtgaggagctaaggaacttcctggccagccaggaacacagccctgcggagctcttcggtggaagagccatctgaaagaagagttgtagcaatgaaagggtgaaagaaagaccaagtgagtctttgcgggagggaacaggccagtgtaaatgaggaggaaaggaggataagatcaaaaagagcaagaggaagagatggaagacacatattggggctcaaaatataaactcaggctatttatcaacttaatctggggaagcaaacctgaaggcaagtaccaccctgtcatccctagctcagagctgctgagaaagaggatacagctgagccccagggccc

SEQ ID NO: 52750 - DNA, 884 bp, Homo sapiens
agcacagcagcaactgactgggcagcctttcaggaaagatgcagccactcctgcttctgctggcctttctcctacccactggggctgaggcaggggagatcatcggaggccgggagagcaggccccactcccgcccctacatggcgtatcttcagatccagagtccagcaggtcagagcagatgtggagggttcctggtgcgagaagactttgtgctgacagcagctcattgctggggaagcaatataaatgtcaccctgggcgcccacaatatccagagacgggaaaacacccagcaacacatcactgcgcgcagagccatccgccaccctcaatataatcagcggaccatccagaatgacatcatgttattgcagctgagcagaagagtcagacggaatcgaaacgtgaacccagtggctctgcctagagcccaggagggactgagacccgggacgctgtgcactgtggccggctggggcagggtcagcatgaggaggggaacagatacactccgagaggtgcagctgagagtgcagagggataggcagtgcctccgcatcttcggttcctacgacccccgaaggcagatttgtgtgggggaccggcgggaacggaaggctgccttcaagggggattccggaggccccctgctgtgtaacaatgtggcccacggcatcgtctcctatggaaagtcgtcaggggttcctccagaagtcttcaccagggtctcaagtttcctgccctggataaggacaacaatgagaagcttcaaactgctggatcagatggagacccccctgtgactgactcttcttctcggggacacaggccagctccacagtgttgccagagccttaataaacgtccacagagtataaata

SEQ ID NO: 52751 - DNA, 310 bp, Homo sapiens
actggatgttttaataatgaaatattgataaatataaaagaataaaagtattatatatatatataaagaataaaacatatccaatatataaataaaaaattaaatgcctgtgatgtatcatgtaataaagttatacagtttgggctgtttcaagtaattccatataatgattcctcctagatattttctgattagcattcatcagttgaaagcagaaggaggcagctgatgattgtaaaaaaaaatggcaataataagatacctaatgaccccgaaaatgaagcgaattatgcctaatttaaaaacaaag

SEQ ID NO: 52752 - DNA, 346 bp, Homo sapiens
ttagaggtttaataacttaccaaggtcacatagtgaaatacagctggccatgattcatatgtaagtaatttgctgtaatagtctgtgctttcatatttttatattgactcatttcaatttgaattacatttctctaacatatttaatctgcaaaattcctagtaactgttataatctacttacacggattcacttataggatctaataggttaattataaggctgtggtgatgtgtgcctgtagtcccaattactcagaaaactgaggcagaggatcactagagcctaggagtctgagacagcctgggcaacatagcaagaccttacatcaaaacaaaattaaaaa

SEQ ID NO: 52753 - DNA, 513 bp, Homo sapiens
gaattcaggtttattatttttaacctaaaacattctctttggttcattcatcccctcatgtcatgggggctcattggttttccttctttgtcatatttaagtatgatttttcaacaaaacttctagaagtcagcttattatgtcaccattcatgcaaagtgctcatgcctctgattggtccattcactgacgtgacaatttcaggtcctatgtttaaaaagaaggggctggccgggcacgatggctcacgcctataatcccagcactttgggaggccgagaggggcggttcacgaggtcaggagattgagaccatcctggttagcagagtgaaaccccgtctctactaaaaatacaaataaaaattagccgggcgtggtggcgggcgcctgtagtcccagctacttgggaggctgaggcaggagaatggcatgaacccgggaggcagagcttgcagtgagccgagattgcgccactgcactccagcctgggcgacagagcgagactctgtctc

SEQ ID NO: 52754 - DNA, 141 bp, Homo sapiens
cagccatcatcttcacgacttcctgtgctacagtttaaatcaccaagccccgttgagagccacactccaaaatcactgtccaaggtacctacccttctgctacctttacgaacaagacagcaggcaagggacatgtgtttc

SEQ ID NO: 52755 - DNA, 2127 bp, Homo sapiens
gctggagtgtagtggcacgatcttggctcactacagtctccacctcccagatttaagctattctcctgcctcagcctccctagtagctgggactacaggcgtgtgccaccatgcccagctaatttttgtattttgaatagagatggggtttcaccatgttggccaggcttgtcttgagctcctgacctcacgtgatgcgcctgcctcggcctcccaaagtgttgggattacaggcttgacccaccgcacccagccagaatatacctcattcttaatgaaataagccacctaaactttctgcattcttttagtgaatttcacaaaactatttatattattattacgtattaatggaaagtttaaattttgcttaactagagttttctggattaaaagtattgctgacattcttatttcttttctaatagaagtaaaataagtgaacttacaactgaagttaataaacttcagaagggaatagaaatgtacaatcaagagaattcagtatatttgtcatatgaaaagagggctgagactttagctgttgagataaaagagcttcaaggacaactagcagactacaacatgttggtagataaacttaataccaacactgaaatggaagaagtaatgaatgattacaatatgcttaaagctcaaaatgatcgagaaacacaaagtttggatgtcatatttactgaaagacaagcgaaagaaaaacaaatcagaagtgtcgaagaagaaattgaacaggaaaaacaagcaacagatgacattatcaaaaatatgtcttttgaaaaccaagtcaagtacctagagatgaaaaccacaaatgagaaactgttacaggaattagatacacttcaacaacaattggattcacagaacatgaaaaaagagagcctggaagcagaaatagctcactcccaggtgaaacaggaggcggtattgctgcatgaaaaactttatgagttggagtcccatcgagatcaaatgattgcagaagacaaaagcataggatctccaatggaagagagagagaaattacttaagcagattaaagatgataatcaggaaatagccagcatggaaagacagttaacagatacaaaagaaaagataaatcagtttattgaagaaattagacaacttgacatggatttagaggaacaccaaggtgaaatgaaccagaaatacaaggagctaaagaaaagggaggaacatatggacacttttattgagacttttgaggaaacaaagaatcaggaactgaaacgaaaggcacagatagaagccaacattgttgcactcttggagcactgcagtcgaaatataaatcgtatagaacagatatcctctatcaccaatcaagagctaaagatgatgcaggatgacctcaattttaaatctactgaagtgcagaaatcacaaagtacagctcagaatttgacttcagacattcaacgtctgcagttggatctgcagaaaatggagcttctagaaagtaagatgactgaagaacagcattctctaaaaagcaaaattaagcaaatgacaactgatctggagatatataatgatttgccagctttaaaatcatcaggtgaagaaaagataaagaaattacatcaggagagaatgatattatcaacccacagaaatgcctttaagaaaataatggagaagcaaaacatagagtatgaggcactaaaaacacaattgcaagaaaatgagacacattctcagcttacaaatttggagagaaagtggcaacaccttgagcaaaataattttgcgatgaaagaattcatagcaaccaagagtcaagagagtgattaccagccaattaagaaaaatgtgaccaagcagattgcagagtacaataaaaccatcgtggatgctttacatagcaccagcggaaactgagtttaagtccactgaaagtctctaaggaagtatcctcttgctgctaaacttggtacaagttgactaccaaaaaaaaaaaaagcttacttttggagtttacctaaaatttctgaatgttataatttttgtggcctcttttaagaatgatattttaaaatagtaaatagttcaataaatggtttgcatattaaaaaaaaaaaa

SEQ ID NO: 52756 - DNA, 1506 bp, Homo sapiens
cgcacggcagttagtgggtaggcctgagagccgaggaaaactgagcgtgggcctcagaaagaagttaaggcacccgcgagccgggcaactgccctccttccgcgccggcggagcgattaaagtgaagaaacaatggccagcaatcacaaatcttcagcagctcgccctgtttcaagaggtggagttgggttaacaggaaggcctccttctgggatacgacccctatcaggaaatattcgagtggcaactgcaatgccacctgggacagcaagaccaggttctcgtggttgtcccatagggactggtggagttctgtcttctcaaatcaaagttgcccatcgccctgtaacacaacaaggtttgactggaatgaaaactgggacgaaaggtccccagaggcaaattttagacaaatcttactatcttgggcttcttagaagtaaaataagtgaacttacaactgaagttaataaacttcagaagggaatagaaatgtacaatcaagagaattcagtatatttgtcatatgaaaagagggctgagactttagctgttgagataaaagagcttcaaggacaactagcagactacaacatgttggtagataaacttaataccaacactgaaatggaagaagtaatgaatgattacaatatgcttaaagctcaaaatgatcgagaaacacaaagtttggatgtcatatttactgaaagacaagcgaaagaaaaacaaatcagaagtgtcgaagaagaaattgaacaggaaaaacaagcaacagatgacattatcaaaaatatgtcttttgaaaaccaagtcaagtacctagagatgaaaaccacaaatgagaaactgttacaggaattagatacacttcaacaacaattggattcacagaacatgaaaaaagagagcctggaagcagaaatagctcactcccaggtgaaacaggaggcggtattgctgcatgaaaaactttatgagttggagtcccatcgagatcaaatgattgcagaagacaaaagcataggatctccaatggaagagagagagaaattacttaagcagattaaagatgataatcaggaaatagccagcatggaaagacagttaacagatacaaaagaaaagataaatcagtttattgaagaaattagacaacttgacatggatttagaggaacaccaaggtgaaatgaaccagaaatacaaggagctaaagaaaagggaggaacatatggacacttttattgagacttttgaggaaacaaagaatcaggaactgaaacgaaaggcacagatagaagccaacattgttgcactcttggagcactgcagtcgaaatataaatcgtatagaacagatatcctctatcaccaatcaagagctaaagatgatgcaggatgacctcaattttaaatctactgaagtgcagaaatcacaaagtacagctcagaatttgacttcagacattcaacgtctgcggttgtctgctgcaggggtaccgagc

SEQ ID NO: 52757 - DNA, 1001 bp, Homo sapiens
tgatctagaggatcaccctttactctgacatggatttagaggaacaccaaggtgaaatgaaccagaaatacaaggagctaaagaaaagggaggaacatatggacacttttattgagacttttgaggaaacaaagaatcaggaactgaaacgaaaggcacagatagaagccaacattgttgcactcttggagcactgcagtcgaaatataaatcgtatagaacagatatcctctatcaccaatcaagagctaaagatgatgcaggatgacctcaattttaaatctactgaagtgcagaaatcacaaagtacagctcagaatttgacttcagacattcaacgtctgcagttggatctgcagaaaatggagcttctagaaagtaagatgactgaagaacagcattctctaaaaagcaaaattaagcaaatgacaactgatctggagatatataatgatttgccagctttaaaatcatcaggtgaagaaaagataaagaaattacatcaggagagaatgatattatcaacccacagaaatgcctttaagaaaataatggagaagcaaaacatagagtatgaggcactaaaaacacaattgcaagaaaatgagacacattctcagcttacaaatttggagagaaagtggcaacaccttgagcaaaataattttgcgatgaaagaattcatagcaaccaagagtcaagagagtgattaccagccaattaagaaaaatgtgaccaagcagattgcagagtacaataaaaccatcgtggatgctttacatagcaccagcggaaactgagtttaagtccactgaaagtctctaaggaagtatcctcttgctgctaaacttggtacaagttgactaccaaaaaaaaaaaaagcttacttttggagtttacctaaaatttctgaatgttataatttttgtggcctcttttaagaatgatattttaaaatagtaaatagttcaataaatggtttgcatattaaaaaaaaaaaa

SEQ ID NO: 52758 - DNA, 591 bp, Homo sapiens
ctactactactaaataagcggccggtcgacgagatatataatgatttgccagctttaaaatcatcaggtgaagaaaagataaagaaattacatcaggagagaatgatattatcaacccacagaaatgcctttaagaaaataatggagaagcaaaacatagagtatgaggcactaaaaacacaattgcaagaaaatgagacacattctcagcttacaaatttggagagaaagtggcaacaccttgagcaaaataattttgcgatgaaagaattcatagcaaccaagagtcaagagagtgattaccagccaattaagaaaaatgtgaccaagcagattgcagagtacaataaaaccatcgtggatgctttacatagcaccagcggaaactgagtttaagtccactgaaagtctctaaggaagtatcctcttgctgctaaacttggtacaagttgactaccaaaaaaaaaaaaagcttacttttggagtttacctaaaatttctgaatgttataatttttgtggcctcttttaagaatgatattttaaaatagtaaatagttcaataaatggtttgcatattaaaaaaaaaaaa

SEQ ID NO: 52759 - DNA, 663 bp, Homo sapiens
cggacgcgtgggtcgacccacgcgtccgcatcgacaaaagaaccattgaaaaatttgagaaggaggctgctgagatgggaaagggctccttcaagtatgcctgggtcttggataaactgaaagctgagcgtgaacgtggtatcaccattgatatctaaattacatcaggagagaatgatattatcaacccacagaaatgcctttaagaaaataatggagaagcaaaacatagagtatgaggcactaaaaacacaattgcaagaaaatgagacacattctcagcttacaaatttggagagaaagtggcaacaccttgagcaaaataattttgcgatgaaagaattcatagcaaccaagagtcaagagagtgattaccagccaattaagaaaaatgtgaccaagcagattgcagagtacaataaaaccatcgtggatgctttacatagcaccagcggaaactgagtttaagtccactgaaagtctctaaggaagtatcctcttgctgctaaacttggtacaagttgactaccaaaaaaaaaaaaagcttacttttggagtttacctaaaatttctgaatgttataatttttgtggcctcttttaagaatgatattttaaaatagtaaatagttcaataaatggtttgcatattaaaaaaaaaaaa

SEQ ID NO: 52760 - DNA, 2136 bp, Homo sapiens
cgcacggcagttagtgggtaggcctgagagccgaggaaaactgagcgtgggcctcagaaagaagttaaggcacccgcgagccgggcaactgccctccttccgcgccggcggagcgattaaagtgaagaaacaatggccagcaatcacaaatcttcagcagctcgccctgtttcaagaggtggagttgggttaacaggaaggcctccttctgggatacgacccctatcaggaaatattcgagtggcaactgcaatgccacctgggacagcaagaccaggttctcgtggttgtcccatagggactggtggagttctgtcttctcaaatcaaagttgcccatcgccctgtaacacaacaaggtttgactggaatgaaaactgggacgaaaggtccccagaggcaaattttagacaaatcttactatcttgggcttcttagaagtaaaataagtgaacttacaactgaagttaataaacttcagaagggaatagaaatgtacaatcaagagaattcagtatatttgtcatatgaaaagagggctgagactttagctgttgagataaaagagcttcaaggacaactagcagactacaacatgttggtagataaacttaataccaacactgaaatggaagaagtaatgaatgattacaatatgcttaaagctcaaaatgatcgagaaacacaaagtttggatgtcatatttactgaaagacaagcgaaagaaaaacaaatcagaagtgtcgaagaagaaattgaacaggaaaaacaagcaacagatgacattatcaaaaatatgtcttttgaaaaccaagtcaagtacctagagatgaaaaccacaaatgagaaactgttacaggaattagatacacttcaacaacaattggattcacagaacatgaaaaaagagagcctggaagcagaaatagctcactcccaggtgaaacaggaggcggtattgctgcatgaaaaactttatgagttggagtcccatcgagatcaaatgattgcagaagacaaaagcataggatctccaatggaagagagagagaaattacttaagcagattaaagatgataatcaggaaatagccagcatggaaagacagttaacagatacaaaagaaaagataaatcagtttattgaagaaattagacaacttgacatggatttagaggaacaccaaggtgaaatgaaccagaaatacaaggagctaaagaaaagggaggaacatatggacacttttattgagacttttgaggaaacaaagaatcaggaactgaaacgaaaggcacagatagaagccaacattgttgcactcttggagcactgcagtcgaaatataaatcgtatagaacagatatcctctatcaccaatcaagagctaaagatgatgcaggatgacctcaattttaaatctactgaagtgcagaaatcacaaagtacagctcagaatttgacttcagacattcaacgtctgcagttggatctgcagaaaatggagcttctagaaagtaagatgactgaagaacagcattctctaaaaagcaaaattaagcaaatgacaactgatctggagatatataatgatttgccagctttaaaatcatcaggtgaagaaaagataaagaaattacatcaggagagaatgatattatcaacccacagaaatgcctttaagaaaataatggagaagcaaaacatagagtatgaggcactaaaaacacaattgcaagaaaatgagacacattctcagcttacaaatttggagagaaagtggcaacaccttgagcaaaataattttgcgatgaaagaattcatagcaaccaagagtcaagagagtgattaccagccaattaagaaaaatgtgaccaagcagattgcagagtacaataaaaccatcgtggatgctttacatagcaccagcggaaactgagtttaagtccactgaaagtctctaaggaagtatcctcttgctgctaaacttggtacaagttgactaccaaaaaaaaaaaaagcttacttttggagtttacctaaaatttctgaatgttataatttttgtggcctcttttaagaatgatattttaaaatagtaaatagttcaataaatggtttgcatattaaaaaaaaaaaa

SEQ ID NO: 52761 - DNA, 1567 bp, Homo sapiens
cgcacggcagttagtgggtaggcctgagagccgaggaaaactgagcgtgggcctcagaaagaagttaaggcacccgcgagccgggcaactgccctccttccgcgccggcggagcgattaaagtgaagaaacaatggccagcaatcacaaatcttcagcagctcgccctgtttcaagaggtggagttgggttaacaggaaggcctccttctgggatacgacccctatcaggaaatattcgagtggcaactgcaatgccacctgggacagcaagaccaggttctcgtggttgtcccatagggactggtggagttctgtcttctcaaatcaaagttgcccatcgccctgtaacacaacaaggtttgactggaatgaaaactgggacgaaaggtccccagaggcaaattttagacaaatcttactatcttgggcttcttagaagtaaaataagtgaacttacaactgaagttaataaacttcagaagggaatagaaatgtacaatcaagagaattcagtatatttgtcatatgaaaagagggctgagactttagctgttgagataaaagagcttcaaggacaactagcagactacaacatgttggtagataaacttaataccaacactgaaatggaagaagtaatgaatgattacaatatgcttaaagctcaaaatgatcgagaaacacaaagtttggatgtcatatttactgaaagacaagcgaaagaaaaacaaatcagaagtgtcgaagaagaaattgaacaggaaaaacaagcaacagatgacattatcaaaaatatgtcttttgaaaaccaagtcaagtacctagagatgaaaaccacaaatgagaaactgttacaggaattagatacacttcaacaacaattggattcacagaacatgaaaaaagagagcctggaagcagaaatagctcactcccaggtgaaacaggaggcggtattgctgcatgaaaaactttatgagttggagtcccatcgagatcaaatgattgcagaagacaaaagcataggatctccaatggaagagagagagaaattacttaagcagattaaagatgataatcaggaaatagccagcatggaaagacagttaacagatacaaaagaaaagataaatcagtttattgaagaaattagacaacttgacatggatttagaggaacaccaagatcctaccaactatggatggaaaatacttgaaaaaaatacaggaagtttcaaaaagcaagtttgaacctgccatgtgctaagcactatgctgaatccatttgaactgaagaataccctgctatagcctcccattgtttcacagatcttcagtctctctctagcacccactgtttgagcagtgttcatctggcattttattcattggctacttgtgttcactctttgcttctgtgaaaaaaaaaagactcctaaaaatcaattatatggtgaaagaaatcccttacagactaagagagagcgtaaagtgctgtctctcaacaagaaaataaaattcttagatcttttgaaaagtggcgtgtgatttaccaaagtgacacaat

SEQ ID NO: 52762 - DNA, 718 bp, Homo sapiens
  misc_feature (2)..(2): n is a, c, g, or t
  misc_feature (22)..(22): n is a, c, g, or t
tnaatttatggagggcggaatnaacaagacggttcagattgatttagacattcaacgtctgcagttggatctgcagaaaatggagcttctagaaagtaagatgactgaagaacagcattctctaaaaagcaaaattaagcaaatgacaactgatctggagatatataatgatttgccagctttaaaatcatcaggtgaagaaaagataaagaaattacatcaggagagaatgatattatcaacccacagaaatgcctttaagaaaataatggagaagcaaaacatagagtatgaggcactaaaaacacaattgcaagaaaatgagacacattctcagcttacaaatttggagagaaagtggcaacaccttgagcaaaataattttgcgatgaaagaattcatagcaaccaagagtcaagagagtgattaccagccaattaagaaaaatgtgaccaagcagattgcagagtacaataaaaccatcgtggatgctttacatagcaccagcggaaactgagtttaagtccactgaaagtctctaaggaagtatcctcttgctgctaaacttggtacaagttgactaccaaaaaaaaaaaaagcttacttttggagtttacctaaaatttctgaatgttataatttttgtggcctcttttaagaatgatattttaaaatagtaaatagttcaataaatggtttgcatattaaaaaaaaaaaa

SEQ ID NO: 52763 - DNA, 356 bp, Homo sapiens
ctggtgcttcctgctgccttttccaaagagattcccagatgaagagctggggagaccataaagggacagatttctgcagagccaggggacagcctgggcgaggtcagagtgccgggtttgggctgacagacattaattgtctcagcccagctcaacccagctttcctgaggtctgggtatttctctctctttgcagccacaatgccacctgctggccatcagtggaactgtagggctcgctaagcagagctgcagagtggaggttcttatcttacccgctggccttttgatcttacctgccctcctgtgccccgcctttcccctctgtgacacctcttcctgttgtctcatttcag

SEQ ID NO: 52764 - DNA, 2835 bp, Homo sapiens
tatgcctgtttttatgtttacctataattttcatatagccgtataaggattgatttaccattttttgcccaacatgacaattctggctatgaaaattatgtttaaactgtgtatgatctattttatgtgctctatgttcccatttgtttgtttggtctggacagtggttctggaatgaattctatctagtaaattagtaaatgtgctgttttgtataaagcatgataattactttttaacagaagttcatttttaaagattactcccttttctttctctctttttttttgagacaatttctctcttgttgcctaggcagtgcagtggcgcgatctcagctccctgcaacttctgcctcccaggttcaagcgattctcctgccttagcctcctgagtagctgggtcagccaccatggctgactcattttttgtatttttagtagagaaggggttttaccgtgttggccgggctggtcttgaactcctgaccttgggtgatccacctgcctcagcctcccaaagtgctgggattacaggcgtgagctatcccgcccggtccccttttctttattatcgaagatattgtttaaaagaaagaaaaagtaggtcccaataatatatgtgctattcaaaaaatgtgatcatttaggacattatcacaagttgctatggaaataactgaagacttcctcaggagaaggaaagaaaatgaggaacataatgatagagtcggggctcgatgcagctgaaatactgaatactgaaatactagaaaccaacaaaactggtttctagaattctccagggatttgggcttgggaaacttggtaagaatagtttttatttttgaacattcaactttggttcttcaaagtaatctttaaacatgggaatatgttttcaagacaatttataggacatacttatgtagttggtgaggtcttctcaaaagtatctacctttgttagataataacaagtgattaagaaaggggagatatggttttatactcataacaatttcctgtgccattctctgtacacagaggtgattcatttactctcccattagtagaacttgcactttgggctgtctgttctagtatttgggaagtgtttatgcttccttccagggaccatcttatgatcagaggcaggatgtctgtgagatggttagctagagttagcagtgtccggggagagtggctttagaccagtcagtaccttgctctttgtgcatggtgcatgtcaagtcaggaagccaagaaaccgttggcattaaaatctagatgcatagagatccttgctatgagttgtggataggagtggctccatctatccttgtggtgaaagagtccaggagctcctttagagattgtcaagtcctgagcgatgagctgcccttaatcctcagaagccttacaaaaattgagatgtaccatttctaccctttgagaaaaaagaaatagaaacttacttgatgcagaatggatatttatatttctgcttgcaccatttccatagcagctgacaaaggcaaaatcatgaaatagaatcatttctataaattgcttctttaagttttctctaaattttgcctctaggaaaaaattaaaactattcaatgacagctagctgtcactggtgctaccccaaagctttccaatcttttatgtattttttgtgaatgaaactgttgctgtaggaaagtcaaggttcatgtaagagtatcgtggtgtaaatataatggtttcacagctgtttgaatttttcttttcctgtgccagatatagaatgcagtcaaccctttttcagtaacttatgttcaccagtctgtgcttttcttctcccagaaggcttttcttagtggttgtaaatgcaagaatcctgagccctgtgttgcaaaggtgggtggtctgtcagcactttctggcaaattgagttgatggatttaagataagcctttggggttcctgtcagttttctgggccctgaggaagggttgggcctcctttactctcagtattttgagtgtttttcaaatgtttgtacgttatcttgcactgctctaataaaaatgaaagctctctgacaagaaatagttctggatggtttgaagatctgcggggaaaaataagtgtgcacctgagaccttcagttagtcttttatttatttagaataaaaaatagtttgataacctaccagagttagtgcttctttaaaaacactccttggaaagatggggactgtcccttaggaaagccataaaagtgattcccaatactttgcaattgcttttgatttttagtcctttggaacaaatgtgtgatgttatgtctgatgttgtgtttttagagctgtgaaaagtctgaaaaatttcaaggggtattatttaaatgatgattatctggctgaattatgtgtgagctagaatctagggtagctgtccacttctttttctgttgtcctgacagtaaagcaaatagtaagccatgtcttgaaagtgatttgcttgtttcatactgacatctaaagacatcagccttctctttggcaaccctggggatactcctctgcaccataacttattaatgtttttttagacaaggctaaacctgaatgactctacgtatctatagtttcactgctcatataccagctgctacaagaaaaaccatgacttgtaagtttgtctttactcctaattgctaaattaactgaaacccttcctgtctagggagaattgctgctagtaaggtcagtttgcaatgttcagctttagatatgtgtcgtaatgggagtctgaaaactgtaataaactgtattcatatcctg

SEQ ID NO: 52765 - DNA, 2862 bp, Homo sapiens
tatgcctgtttttatgtttacctataattttcatatagccgtataaggattgatttaccattttttgcccaacatgacaattctggctatgaaaattatgtttaaactgtgtatgatctattttatgtgctctatgttcccatttgtttgtttggtctggacagtggttctggaatgaattctatctagtaaattagtaaatgtgctgttttgtataaagcatgataattactttttaacagaagttcatttttaaagattactcccttttctttctctctttttttttgagacaatttctctcttgttgcctaggcagtgcagtggcgcgatctcagctccctgcaacttctgcctcccaggttcaagcgattctcctgccttagcctcctgagtagctgggtcagccaccatggctgactcattttttgtatttttagtagagaaggggttttaccgtgttggccgggctggtcttgaactcctgaccttgggtgatccacctgcctcagcctcccaaagtgctgggattacaggcgtgagctatcccgcccggtccccttttctttattatcgaagatattgtttaaaagaaagaaaaagtaggtcccaataatatatgtgctattcaaaaaatgtgatcatttaggacattatcacaagttgctatggaaataactgaagacttcctcaggagaaggaaagaaaatgaggaacataatgatagagtcggggaactcccactagctcacctgaggggggctcgatgcagctgaaatactgaatactgaaatactagaaaccaacaaaactggtttctagaattctccagggatttgggcttgggaaacttggtaagaatagtttttatttttgaacattcaactttggttcttcaaagtaatctttaaacatgggaatatgttttcaagacaatttataggacatacttatgtagttggtgaggtcttctcaaaagtatctacctttgttagataataacaagtgattaagaaaggggagatatggttttatactcataacaatttcctgtgccattctctgtacacagaggtgattcatttactctcccattagtagaacttgcactttgggctgtctgttctagtatttgggaagtgtttatgcttccttccagggaccatcttatgatcagaggcaggatgtctgtgagatggttagctagagttagcagtgtccggggagagtggctttagaccagtcagtaccttgctctttgtgcatggtgcatgtcaagtcaggaagccaagaaaccgttggcattaaaatctagatgcatagagatccttgctatgagttgtggataggagtggctccatctatccttgtggtgaaagagtccaggagctcctttagagattgtcaagtcctgagcgatgagctgcccttaatcctcagaagccttacaaaaattgagatgtaccatttctaccctttgagaaaaaagaaatagaaacttacttgatgcagaatggatatttatatttctgcttgcaccatttccatagcagctgacaaaggcaaaatcatgaaatagaatcatttctataaattgcttctttaagttttctctaaattttgcctctaggaaaaaattaaaactattcaatgacagctagctgtcactggtgctaccccaaagctttccaatcttttatgtattttttgtgaatgaaactgttgctgtaggaaagtcaaggttcatgtaagagtatcgtggtgtaaatataatggtttcacagctgtttgaatttttcttttcctgtgccagatatagaatgcagtcaaccctttttcagtaacttatgttcaccagtctgtgcttttcttctcccagaaggcttttcttagtggttgtaaatgcaagaatcctgagccctgtgttgcaaaggtgggtggtctgtcagcactttctggcaaattgagttgatggatttaagataagcctttggggttcctgtcagttttctgggccctgaggaagggttgggcctcctttactctcagtattttgagtgtttttcaaatgtttgtacgttatcttgcactgctctaataaaaatgaaagctctctgacaagaaatagttctggatggtttgaagatctgcggggaaaaataagtgtgcacctgagaccttcagttagtcttttatttatttagaataaaaaatagtttgataacctaccagagttagtgcttctttaaaaacactccttggaaagatggggactgtcccttaggaaagccataaaagtgattcccaatactttgcaattgcttttgatttttagtcctttggaacaaatgtgtgatgttatgtctgatgttgtgtttttagagctgtgaaaagtctgaaaaatttcaaggggtattatttaaatgatgattatctggctgaattatgtgtgagctagaatctagggtagctgtccacttctttttctgttgtcctgacagtaaagcaaatagtaagccatgtcttgaaagtgatttgcttgtttcatactgacatctaaagacatcagccttctctttggcaaccctggggatactcctctgcaccataacttattaatgtttttttagacaaggctaaacctgaatgactctacgtatctatagtttcactgctcatataccagctgctacaagaaaaaccatgacttgtaagtttgtctttactcctaattgctaaattaactgaaacccttcctgtctagggagaattgctgctagtaaggtcagtttgcaatgttcagctttagatatgtgtcgtaatgggagtctgaaaactgtaataaactgtattcatatcctg

SEQ ID NO: 52766 - DNA, 391 bp, Homo sapiens
caggaatgctggaatgattttgctgtagggaaagttatttaaaatgttgcccccaaataaatatgaggatagaccctgagcctgcctggagagagggcatttgtgttgctgtagttacttcaggcctcattccagctttgcatgacaccgtccatggaggagcttgtgatagggagggggctgcagaaatgaggttttatttcttcccctcttgatgtgataaacccgtgtaggcatctttggaatgtaaccataccaaagatcctgttgcctttacaactccatagggttctgggccatttccaagacattatctggagagagaaaaatgttcagggtgctgaaaaaaaaagcgccttaattatgtttagagccattttcagcatgactg

SEQ ID NO: 52767 - DNA, 365 bp, Homo sapiens
agattaattgcctactaggtggttaacctgggataattattgattactcttctgtcacttcaagtacaaaatgtctaaaatggaactactcatcagaacacttcctgtaatctcagcactttgggaggccaaggtgggtggatcacttgaggtcaggagctcaagaccagcctggccaacatggtgaaaccccatctctactaaaaatacaaaaaactagccggttgaggtggcaggcacctgtaatcccagctactcgggaggctaaggcgggagaattgcttgaacccgggaggtggaggttgcagtgagccgagattgtgtcactgcactacagcctgggcaacagagggagactccatctc

SEQ ID NO: 52768 - DNA, 297 bp, Homo sapiens
cttagattacctagcaaaagaaacgcaattcccaagacatatccatgtcaaatactatttcctccctaaaggaggctgtctactttctaggtatgttctttcttaccaaaagagaagatacaagcaaagaaacttgcataatctaaatccaggctggatcatttcagattttataatgcatactaccctatagaagccttaattaaacattttatagagccttaaactctcaaatagctgtgctgctatggcacaaggaggtccatgcagaaaaatcagttaaaaacaagtggttgt

SEQ ID NO: 52769 - DNA, 453 bp, Homo sapiens
tgatacaggagagatctttggtgaggcctgattataagtggatgacaagcttcatttttcctaggtgataggttggactgttagacaaaactttggattcagagaaaaggcactctaggtgcattttgcctcctttctttaccttgatggattttcatgttggtcaaatgaagacttgggctacatctatgaaatcccttccaatttttagaagtatataattctgttgtacgctctagtgagtccagactataaagcattttgaattttactatttcttttcccctaattgtgggccagaaaggaaaatttccaaataaggatgcacagtccactctgggaaacacagggaaacaataactagaatacaagtctagcctttgccctggcatgaaaagaatgcagactgttagctgacctaaaggtttctgttttatttcacgtttaggtgaa

SEQ ID NO: 52770 - DNA, 2381 bp, Homo sapiens
catgttatgtattcttttgaaaagtatctgttcatgtcctttgcccacttttgatggggttgtttgttttttttcttgtaaatttaagttcctggcagatgctggatattagacctttgtcagatggctaggttgcaaatattttctccctttctgtgagctgttcactctgttgatagtttcttttgccgtaaagaagctctttagtttaattaggtcccatttgccaatttttgtttttcttgcaattacttttggcatctttgtcatgaagactttgagtctgattacaaaaagtactgtgtgttacagcaaagctaccactctggctgctagacagcttggtggggagggagatgactccttgtagctgatacttggcaaagatgtcactgagaggcaagctaaatgtagttattttatcctgttagaatacaaattctaattaaaatagttaactttaagagtagtagtaattttattttgaagtctcatgcaagttgtctgatagagaactttcaggcagatcccaccattagcctgtaaacaaaaggtttggcaccagccacctgggaccaaataagaattcaattgtgcttgtccagatatgaacaaatatgtagtgagtatagagtttatcaataatcataacaaatattaaagatttccttggagtcaaagtaaagaacaaaaaattataatgttgtctagggatgacatgatatgctacctcctttttcctgaagttttattccattctgttgacaagatggagaaagcaagatcatgaaggtgtgcaaatgattcttacggcatgggcgaggatttttcaatttattttttaaagtttccataccctttctttgtctttcttgctttttgtttttgcctttgtgtttatgtttgagatacaaccagtcattggtggcaggggcatagagtggtcagtctgaaagggaggctctcttaagagctatgtgccttccacccagagggagacccagtagaaagaaaaacatcctgggaaatccagctaccatggccctcccagtggaggcatcttacatttaggatacttcaagtatcctcagaaatgtattctgcacccccggccccgcccatgctgagggaaggggagcagttgccaatatttgcaccatcttcacatgcacatgttgcaacaagagcttctgggaaggtaagcggcatcggagctagatcacgtttcacaattagtggttgttcttttccgtgtttattttgcactttaaaaaagagagaacgcatgcaaatgaacttgcttgtgtgtatttgatggctctaagggctataaattacaaacaaaacacatcccagacattaggagttcataagtatatttaatgaaattggtggttttaggaagtcaactttagttttgctttgtttgcatgtccactaatttttttattttgatattagtcttttttaaaaaattttacagtagtcattgaaagttatgtttctttgtttacttcattttttcctctaattattcaagactggcacaaaagtataaatattatttatttcaggtagaatttttttcgtgtagttttttaatatatacttgaaggaaatgtttcaccttatttttggtctttgtttattcatttagaccctgcaagttgattctcattaattgtcagattccactacactttcttcctcataggtagtaattaccagtgtaactaagcatttgtgttctgatatctgaggccagtaactattaatgtctagttctcagagcatttggaaaggttatcttaaatggctacctaaattgaaatccttttcagaaaaaatataattgcaaataggtaggagtggcctaaattatctaatgtaataaagtcagacaaaatgcatactttatagtttcaagattttcagtacataaaatctgtcctttcctacctggacatgtcccattaaaaagtgggagattttaaataatttctttacagatgttttatttaagcaggtagcacaatctactaatgttgtttgatctgtgtttgttatactggttgtaattaatttttttaattcatgaactagcggaaaatttattaaattaactattaaccacattcaccttgtaaatgactgtataaaacttgttgacaatgcactgactttagaaagatgttaatgtgcataaatagagtgtaaataaaatagtgttgatgtactgaaatatgaactgtataaaaagtattggtaattgtatatggggtgtacctatttatctgtaactattatccaaacaaattaaatactgtggatgcctctatgtactgtttttcctcatacaagtaaacacagaatgtcaaatt

SEQ ID NO: 52771 - DNA, 3788 bp, Homo sapiens
cttagctggaagggatctgttccagcgctgagcttttattttgcttagcatctactcagatgccttgactgtgtgtgtctcacagtcctactgactgacaaactccctgggggccgagatggcatggattcaggtctcagatgctctatggcacctgggagcatcttacacaggtgaagtgctcagtgatgatctggggtcactattctctgcagatcagcatgtctgagaggtaggggctcacagactgtggaactggtgtaagacctttgtcttttcccagctactaacaggtcctgcttgtcacagcccttccatgatacaaagttaagtcattttgtgtctgacacaggcaaaggaaaacgacaggcccttgccttcccggtcctcaagggtcagctgtaagatgatgtcataaagccggatcaggtcctggggccggggggaagcacttgctgtcatcctctggctgctgctgcagcagagccctctgcagacctttggccatgctctcattacacttgattgccattgacagcttgatgtaagtcaggttgtagatgagcatgagagtgtggagcagagtcggcgagcgcaagtcgagcccatcaacctggacagctgtctccgtgctttcaccggtgaggaagagctaggggaagatgagatgtactactgttccaagtgtaagacccactgcttagcaacaaagaagctggatctctggaggcttccacccttcctgattattcaccttaagtgatttcagtttgtaaatgatcagtggataaaatcacagaaaattgtcaaatttcctcgggaaagttttgacctgagtgcttttttggtaccacgagacccggctctctgccagcatcaaccactcacaccccagggggatgagctctccaagcccaggattctggcaagagaggtgaagaaagtggatgtgcagagtttggctggggaataggacatgctcctgagcaaaagcccatcctcactcagcgctaacatcagcagcagcccaaaaggttctccttcttcatcaagaaaaagtggaaccagctgtccctccagcaaaaacagcagccctaatagcagcccacggactttggggaggagcaaagggaggctctggctgccccagattggcagcaaaaataaactgtcaagtagtaagaagaacttggatgccagcaaagagaatggggctgggcagatctgtgagctggctgacgccttgagccgagggcatatgcggggggtgggcagccaaccagagctggtcactcctcaggaccatgaggtagctttggccaatggattcctttatgagcatgaagcatatggcaatggctatagcaatggtcagcttggaaaccacagtgaagaagacagcactgatgaccaaagagaagacactcatattaagcctatttatatgcaatttcatgccattcaggaattctgagtgggggccattacgtcacttatgccaaaaacccaaactgcaagtggtactgctacaatggcagcatctgtgaggaacgtcaccctgatgaaattgacaccaactctgcctacattcttttctatgagcagcagaggatagactacgcacaatttctgccaaagattgatggcaaaaagatggcagacacaagcagtatggatgaagactttgagtctgattacaaaaagtactgtgtgttacagcaaagctaccactctggctgctagacagcttggtggggagggagatgactccttgtagctgatacttggcaaagatgtcactgagaggcaagctaaatgtagttattttatcctgttagaatacaaattctaattaaaatagttaactttaagagtagtagtaattttattttgaagtctcatgcaagttgtctgatagagaactttcaggcagatcccaccattagcctgtaaacaaaaggtttggcaccagccacctgggaccaaataagaattcaattgtgcttgtccagatatgaacaaatatgtagtgagtatagagtttatcaataatcataacaaatattaaagatttccttggagtcaaagtaaagaacaaaaaattataatgttgtctagggatgacatgatatgctacctcctttttcctgaagttttattccattctgttgacaagatggagaaagcaagatcatgaaggtgtgcaaatgattcttacggcatgggcgaggatttttcaatttattttttaaagtttccataccctttctttgtctttcttgctttttgtttttgcctttgtgtttatgtttgagatacaaccagtcattggtggcaggggcatagagtggtcagtctgaaagggaggctctcttaagagctatgtgccttccacccagagggagacccagtagaaagaaaaacatcctgggaaatccagctaccatggccctcccagtggaggcatcttacatttaggatacttcaagtatcctcagaaatgtattctgcacccccggccccgcccatgctgagggaaggggagcagttgccaatatttgcaccatcttcacatgcacatgttgcaacaagagcttctgggaaggtaagcggcatcggagctagatcacgtttcacaattagtggttgttcttttccgtgtttattttgcactttaaaaaagagagaacgcatgcaaatgaacttgcttgtgtgtatttgatggctctaagggctataaattacaaacaaaacacatcccagacattaggagttcataagtatatttaatgaaattggtggttttaggaagtcaactttagttttgctttgtttgcatgtccactaatttttttattttgatattagtcttttttaaaaaattttacagtagtcattgaaagttatgtttctttgtttacttcattttttcctctaattattcaagactggcacaaaagtataaatattatttatttcaggtagaatttttttcgtgtagttttttaatatatacttgaaggaaatgtttcaccttatttttggtctttgtttattcatttagaccctgcaagttgattctcattaattgtcagattccactacactttcttcctcataggtagtaattaccagtgtaactaagcatttgtgttctgatatctgaggccagtaactattaatgtctagttctcagagcatttggaaaggttatcttaaatggctacctaaattgaaatccttttcagaaaaaatataattgcaaataggtaggagtggcctaaattatctaatgtaataaagtcagacaaaatgcatactttatagtttcaagattttcagtacataaaatctgtcctttcctacctggacatgtcccattaaaaagtgggagattttaaataatttctttacagatgttttatttaagcaggtagcacaatctactaatgttgtttgatctgtgtttgttatactggttgtaattaatttttttaattcatgaactagcggaaaatttattaaattaactattaaccacattcaccttgtaaatgactgtataaaacttgttgacaatgcactgactttagaaagatgttaatgtgcataaatagagtgtaaataaaatagtgttgatgtactgaaatatgaactgtataaaaagtattggtaattgtatatggggtgtacctatttatctgtaactattatccaaacaaattaaatactgtggatgcctctatgtactgtttttcctcatacaagtaaacacagaatgtcaaatt

SEQ ID NO: 52772 - DNA, 791 bp, Homo sapiens
ctcacccgccttcagagacttcttggcccatcttagctggaagggatctgttccagcgctgagcttttattttgcttagcatctactcagatgccttgactgtgtgtgtctcacagtcctactgactgacaaactccctgggggccgagatggcatggattcaggtctcagatgctctatggcacctgggagcatcttacacaggtgaagtgctcagtgatgatctggggtcactattctctgcagatcagcatgtctgagaggtaggggctcacagactgtggaactggtgtaagacctttgtcttttcccagctactaacaggtcctgcttgtcacagcccttccatgatacaaagttaagtcattttgtgtctgacacaggcaaaggaaaacgacaggcccttgccttcccggtcctcaagggtcagctgtaagatgatgtcataaagccggatcaggtcctggggccggggggaagcacttgctgtcatcctctggctgctgctgcagcagagccctctgcagacctttggccatgctctcattacacttgattgccattgacagcttgatgtaagtcaggtaggtggaatgcaccacacatcagctcaagttgtactcagagaagcagaggaactgggaggactggactacgagttggggctgacccagaggaagtgggggggtgagttggggcaaggccacagcagggccatttggcctgggcttcaagggaccctgtaatcccaactacttggcaggctgaggcaggagaatcacttgaatccg

SEQ ID NO: 52773 - DNA, 3700 bp, Homo sapiens
aacgtgctgggctgaccttcctctgatcacaggcaaggcaaaggaaaacgacaggcccttgccttcccggtcctcaagggtcagctgtaagatgatgtcataaagccggatcaggtcctggggccggggggaagcacttgctgtcatcctctggctgctgctgcagcagagccctctgcagacctttggccatgctctcattacacttgattgccattgacagcttgatgtaagtcaggtgaacaaatagaagctgagggtgaaggacctacagctgtcacctttatctcttctcaacactgccaactgtccccttggatctcccagacagacaacaagggacatctctggtttctcggtgccccctagaaacctcgggtcatttcaaggcattatgcaaatgagaagctttccttctcttcacctcatctcctgatctgcacaaaagtgactgtaggacccagtgttgtagatgagcatgagagtgtggagcagagtcggcgagcgcaagtcgagcccatcaacctggacagctgtctccgtgctttcaccggtgaggaagagctaggggaagatgagatgtactactgttccaagtgtaagacccactgcttagcaacaaagaagctggatctctggaggcttccacccttcctgattattcaccttaagtgatttcagtttgtaaatgatcagtggataaaatcacagaaaattgtcaaatttcctcgggaaagttttgacctgagtgcttttttggtaccacgagacccggctctctgccagcatcaaccactcacaccccagggggatgagctctccaagcccaggattctggcaagagaggtgaagaaagtggatgtgcagagtttggctggggaataggacatgctcctgagcaaaagcccatcctcactcagcgctaacatcagcagcagcccaaaaggttctccttcttcatcaagaaaaagtggaaccagctgtccctccagcaaaaacagcagccctaatagcagcccacggactttggggaggagcaaagggaggctctggctgccccagattggcagcaaaaataaactgtcaagtagtaagaagaacttggatgccagcaaagagaatggggctgggcagatctgtgagctggctgacgccttgagccgagggcatatgcggggggtgggcagccaaccagagctggtcactcctcaggaccatgaggtagctttggccaatggattcctttatgagcatgaagcatatggcaatggctatagcaatggtcagcttggaaaccacagtgaagaagacagcactgatgaccaaagagaagacactcatattaagcctatttatatgcaatttcatgccattcaggaattctgagtgggggccattacgtcacttatgccaaaaacccaaactgcaagtggtactgctacaatggcagcatctgtgaggaacgtcaccctgatgaaattgacaccaactctgcctacattcttttctatgagcagcagaggatagactacgcacaatttctgccaaagattgatggcaaaaagatggcagacacaagcagtatggatgaagactttgagtctgattacaaaaagtactgtgtgttacagcaaagctaccactctggctgctagacagcttggtggggagggagatgactccttgtagctgatacttggcaaagatgtcactgagaggcaagctaaatgtagttattttatcctgttagaatacaaattctaattaaaatagttaactttaagagtagtagtaattttattttgaagtctcatgcaagttgtctgatagagaactttcaggcagatcccaccattagcctgtaaacaaaaggtttggcaccagccacctgggaccaaataagaattcaattgtgcttgtccagatatgaacaaatatgtagtgagtatagagtttatcaataatcataacaaatattaaagatttccttggagtcaaagtaaagaacaaaaaattataatgttgtctagggatgacatgatatgctacctcctttttcctgaagttttattccattctgttgacaagatggagaaagcaagatcatgaaggtgtgcaaatgattcttacggcatgggcgaggatttttcaatttattttttaaagtttccataccctttctttgtctttcttgctttttgtttttgcctttgtgtttatgtttgagatacaaccagtcattggtggcaggggcatagagtggtcagtctgaaagggaggctctcttaagagctatgtgccttccacccagagggagacccagtagaaagaaaaacatcctgggaaatccagctaccatggccctcccagtggaggcatcttacatttaggatacttcaagtatcctcagaaatgtattctgcacccccggccccgcccatgctgagggaaggggagcagttgccaatatttgcaccatcttcacatgcacatgttgcaacaagagcttctgggaaggtaagcggcatcggagctagatcacgtttcacaattagtggttgttcttttccgtgtttattttgcactttaaaaaagagagaacgcatgcaaatgaacttgcttgtgtgtatttgatggctctaagggctataaattacaaacaaaacacatcccagacattaggagttcataagtatatttaatgaaattggtggttttaggaagtcaactttagttttgctttgtttgcatgtccactaatttttttattttgatattagtcttttttaaaaaattttacagtagtcattgaaagttatgtttctttgtttacttcattttttcctctaattattcaagactggcacaaaagtataaatattatttatttcaggtagaatttttttcgtgtagttttttaatatatacttgaaggaaatgtttcaccttatttttggtctttgtttattcatttagaccctgcaagttgattctcattaattgtcagattccactacactttcttcctcataggtagtaattaccagtgtaactaagcatttgtgttctgatatctgaggccagtaactattaatgtctagttctcagagcatttggaaaggttatcttaaatggctacctaaattgaaatccttttcagaaaaaatataattgcaaataggtaggagtggcctaaattatctaatgtaataaagtcagacaaaatgcatactttatagtttcaagattttcagtacataaaatctgtcctttcctacctggacatgtcccattaaaaagtgggagattttaaataatttctttacagatgttttatttaagcaggtagcacaatctactaatgttgtttgatctgtgtttgttatactggttgtaattaatttttttaattcatgaactagcggaaaatttattaaattaactattaaccacattcaccttgtaaatgactgtataaaacttgttgacaatgcactgactttagaaagatgttaatgtgcataaatagagtgtaaataaaatagtgttgatgtactgaaatatgaactgtataaaaagtattggtaattgtatatggggtgtacctatttatctgtaactattatccaaacaaattaaatactgtggatgcctctatgtactgtttttcctcatacaagtaaacacagaatgtcaaatt

SEQ ID NO: 52774 - DNA, 3667 bp, Homo sapiens
atgtgaccagaggactattaaactcttttagcatcagtgtagcaaggaggtaaaaaaacaaacaacaaaacaaacaaaaaaaaccctttttgtaaaataggtttgagtatcgttggattgagcacttaccaagcaactgtgccaggcatttgtgtccttcatttaattcttacaagcctgagtgttcggtattttaattttataggtgaacaaatagaagctgagggtgaaggacctacagctgtcacctttatctcttctcaacactgccaactgtccccttggatctcccagacagacaacaagggacatctctggtttctcggtgccccctagaaacctcgggtcatttcaaggcattatgcaaatgagaagctttccttctcttcacctcatctcctgatctgcacaaaagtgactgtaggacccagtgttgtagatgagcatgagagtgtggagcagagtcggcgagcgcaagtcgagcccatcaacctggacagctgtctccgtgctttcaccggtgaggaagagctaggggaagatgagatgtactactgttccaagtgtaagacccactgcttagcaacaaagaagctggatctctggaggcttccacccttcctgattattcaccttaagtgatttcagtttgtaaatgatcagtggataaaatcacagaaaattgtcaaatttcctcgggaaagttttgacctgagtgcttttttggtaccacgagacccggctctctgccagcatcaaccactcacaccccagggggatgagctctccaagcccaggattctggcaagagaggtgaagaaagtggatgtgcagagtttggctggggaataggacatgctcctgagcaaaagcccatcctcactcagcgctaacatcagcagcagcccaaaaggttctccttcttcatcaagaaaaagtggaaccagctgtccctccagcaaaaacagcagccctaatagcagcccacggactttggggaggagcaaagggaggctctggctgccccagattggcagcaaaaataaactgtcaagtagtaagaagaacttggatgccagcaaagagaatggggctgggcagatctgtgagctggctgacgccttgagccgagggcatatgcggggggtgggcagccaaccagagctggtcactcctcaggaccatgaggtagctttggccaatggattcctttatgagcatgaagcatatggcaatggctatagcaatggtcagcttggaaaccacagtgaagaagacagcactgatgaccaaagagaagacactcatattaagcctatttatatgcaatttcatgccattcaggaattctgagtgggggccattacgtcacttatgccaaaaacccaaactgcaagtggtactgctacaatggcagcatctgtgaggaacgtcaccctgatgaaattgacaccaactctgcctacattcttttctatgagcagcagaggatagactacgcacaatttctgccaaagattgatggcaaaaagatggcagacacaagcagtatggatgaagactttgagtctgattacaaaaagtactgtgtgttacagcaaagctaccactctggctgctagacagcttggtggggagggagatgactccttgtagctgatacttggcaaagatgtcactgagaggcaagctaaatgtagttattttatcctgttagaatacaaattctaattaaaatagttaactttaagagtagtagtaattttattttgaagtctcatgcaagttgtctgatagagaactttcaggcagatcccaccattagcctgtaaacaaaaggtttggcaccagccacctgggaccaaataagaattcaattgtgcttgtccagatatgaacaaatatgtagtgagtatagagtttatcaataatcataacaaatattaaagatttccttggagtcaaagtaaagaacaaaaaattataatgttgtctagggatgacatgatatgctacctcctttttcctgaagttttattccattctgttgacaagatggagaaagcaagatcatgaaggtgtgcaaatgattcttacggcatgggcgaggatttttcaatttattttttaaagtttccataccctttctttgtctttcttgctttttgtttttgcctttgtgtttatgtttgagatacaaccagtcattggtggcaggggcatagagtggtcagtctgaaagggaggctctcttaagagctatgtgccttccacccagagggagacccagtagaaagaaaaacatcctgggaaatccagctaccatggccctcccagtggaggcatcttacatttaggatacttcaagtatcctcagaaatgtattctgcacccccggccccgcccatgctgagggaaggggagcagttgccaatatttgcaccatcttcacatgcacatgttgcaacaagagcttctgggaaggtaagcggcatcggagctagatcacgtttcacaattagtggttgttcttttccgtgtttattttgcactttaaaaaagagagaacgcatgcaaatgaacttgcttgtgtgtatttgatggctctaagggctataaattacaaacaaaacacatcccagacattaggagttcataagtatatttaatgaaattggtggttttaggaagtcaactttagttttgctttgtttgcatgtccactaatttttttattttgatattagtcttttttaaaaaattttacagtagtcattgaaagttatgtttctttgtttacttcattttttcctctaattattcaagactggcacaaaagtataaatattatttatttcaggtagaatttttttcgtgtagttttttaatatatacttgaaggaaatgtttcaccttatttttggtctttgtttattcatttagaccctgcaagttgattctcattaattgtcagattccactacactttcttcctcataggtagtaattaccagtgtaactaagcatttgtgttctgatatctgaggccagtaactattaatgtctagttctcagagcatttggaaaggttatcttaaatggctacctaaattgaaatccttttcagaaaaaatataattgcaaataggtaggagtggcctaaattatctaatgtaataaagtcagacaaaatgcatactttatagtttcaagattttcagtacataaaatctgtcctttcctacctggacatgtcccattaaaaagtgggagattttaaataatttctttacagatgttttatttaagcaggtagcacaatctactaatgttgtttgatctgtgtttgttatactggttgtaattaatttttttaattcatgaactagcggaaaatttattaaattaactattaaccacattcaccttgtaaatgactgtataaaacttgttgacaatgcactgactttagaaagatgttaatgtgcataaatagagtgtaaataaaatagtgttgatgtactgaaatatgaactgtataaaaagtattggtaattgtatatggggtgtacctatttatctgtaactattatccaaacaaattaaatactgtggatgcctctatgtactgtttttcctcatacaagtaaacacagaatgtcaaatt

SEQ ID NO: 52775 - DNA, 2683 bp, Homo sapiens
agccgccacccggcgcccggcaggggggagcctggctgcgggcggggaccggggggcgggccgcgccgcgcggagaaaagcgctggccggagggcccgcggccgggccgccggggtgagcgtgccgaggcggctgtggcgcaggcttccagcccccaccatgccgtggcccctgctgctgctgctggccgtgagtggggcccagacaacccggccatgcttccccgggtgccaatgcgaggtggagaccttcggccttttcgacagcttcagcctgactcgggtggattgtagcggcctgggcccccacatcatgccggtgcccatccctctggacacagcccacttggacctgtcctccaaccggctggagatggtgaatgagtcggtgttggcggggccgggctacacgacgttggctggcctggatctcagccacaacctgctcaccagcatctcacccactgccttctcccgccttcgctacctggagtcgcttgacctcagccacaatggcctgacagccctgccagccgagagcttcaccagctcacccctgagcgacgtgaaccttagccacaaccagctccgggaggtctcagtgtctgccttcacgacgcacagtcagggccgggcactacacgtggacctctcccacaacctcattcaccgcctcgtgccccaccccacgagggccggcctgcctgcgcccaccattcagagcctgaacctggcctggaaccggctccatgccgtgcccaacctccgagacttgcccctgcgctacctgagcctggatgggaaccctctagctgtcattggtccgggtgccttcgcggggctgggaggccttacacacctgtctctggccagcctgcagaggctccctgagctggcgcccagtggcttccgtgagctaccgggcctgcaggtcctggacctgtcgggcaaccccaagcttaactgggcaggagctgaggtgttttcaggcctgagctccctgcaggagctggacctttcgggcaccaacctggtgcccctgcctgaggcgctgctcctccacctcccggcactgcagagcgtcagcgtgggccaggatgtgcggtgccggcgcctggtgcgggagggcacctacccccggaggcctggctccagccccaaggtggccctgcactgcgtagacacccgggaatctgctgccaggggccccaccatcttgtgacaaatggtgtggcccagggccacataacagactgctgtcctgggctgcctcaggtcccgagtaacttatgttcaatgtgccaacaccagtggggagcccgcaggcctatgtggcagcgtcaccacaggagttgtgggcctaggagaggctttggacctgggagccacacctaggagcaaagtctcacccctttgtctacgttgcttccccaaaccatgagcagagggacttcgatgccaaaccagactcgggtcccctcctgcttcccttccccacttatcccccaagtgccttccctcatgcctgggccggcctgacccgcaatgggcagagggtgggtgggaccccctgctgcagggcagagttcaggtccactgggctgagtgtccccttgggcccatggcccagtcactcaggggcgagtttcttttctaacatagccctttctttgccatgaggccatgaggcccgcttcatccttttctatttccctagaaccttaatggtagaaggaattgcaaagaatcaagtccacccttctcatgtgacagatggggaaactgaggccttgagaaggaaaaaggctaatctaagttcctgcgggcagtggcatgactggagcacagcctcctgcctcccagcccggacccaatgcactttcttgtctcctctaataagccccaccctccccgcctgggctccccttgctgcccttgcctgttccccattagcacaggagtagcagcagcaggacaggcaagagcctcacaagtgggactctgggcctctgaccagctgtgcggcatgggctaagtcactctgcccttcggagcctctggaagcttagggcacattggttccagcctagccagtttctcaccctgggttggggtcccccagcatccagactggaaacctacccattttcccctgagcatcctctagatgctgccccaaggagttgctgcagttctggagcctcatctggctgggatctccaaggggcctcctggattcagtccccactggccctgagcacgacagcccttcttaccctcccaggaatgccgtgaaaggagacaaggtctgcccgacccatgtctatgctctacccccagggtagcatctcagcttccgaaccctgggctgtttccttagtcttcattttataaaagttgttgcctttttaacggagtgtcactttcaaccggcctcccctacccctgctggccggggatggagacatgtcatttgtaaaagcagaaaaaggttgcatttgttcacttttgtaatattgtcctgggcctgtgttggggtgttgggggaagctgggcatcagtggccacatgggcatcaggggctggccccacagagaccccacagggcagtgagctctgtcttcccccacctgcctagcccatcatctatctaaccggtccttgatttaataaacactataaaa

SEQ ID NO: 52776 - DNA, 2573 bp, Homo sapiens
gcccgggtgccaatgcgaggtggagcatggccgggttgtctgggccccactcacggccagcagcagcagcaggggccacggcatggtgggggctggaagccggccatgcttccccgggtgccaatgcgaggtggagaccttcggccttttcgacagcttcagcctgactcgggtggattgtagcggcctgggcccccacatcatgccggtgcccatccctctggacacagcccacttggacctgtcctccaaccggctggagatggtgaatgagtcggtgttggcggggccgggctacacgacgttggctggcctggatctcagccacaacctgctcaccagcatctcacccactgccttctcccgccttcgctacctggagtcgcttgacctcagccacaatggcctgacagccctgccagccgagagcttcaccagctcacccctgagcgacgtgaaccttagccacaaccagctccgggaggtctcagtgtctgccttcacgacgcacagtcagggccgggcactacacgtggacctctcccacaacctcattcaccgcctcgtgccccaccccacgagggccggcctgcctgcgcccaccattcagagcctgaacctggcctggaaccggctccatgccgtgcccaacctccgagacttgcccctgcgctacctgagcctggatgggaaccctctagctgtcattggtccgggtgccttcgcggggctgggaggccttacacacctgtctctggccagcctgcagaggctccctgagctggcgcccagtggcttccgtgagctaccgggcctgcaggtcctggacctgtcgggcaaccccaagcttaactgggcaggagctgaggtgttttcaggcctgagctccctgcaggagctggacctttcgggcaccaacctggtgcccctgcctgaggcgctgctcctccacctcccggcactgcagagcgtcagcgtgggccaggatgtgcggtgccggcgcctggtgcgggagggcacctacccccggaggcctggctccagccccaaggtggccctgcactgcgtagacacccgggaatctgctgccaggggccccaccatcttgtgacaaatggtgtggcccagggccacataacagactgctgtcctgggctgcctcaggtcccgagtaacttatgttcaatgtgccaacaccagtggggagcccgcaggcctatgtggcagcgtcaccacaggagttgtgggcctaggagaggctttggacctgggagccacacctaggagcaaagtctcacccctttgtctacgttgcttccccaaaccatgagcagagggacttcgatgccaaaccagactcgggtcccctcctgcttcccttccccacttatcccccaagtgccttccctcatgcctgggccggcctgacccgcaatgggcagagggtgggtgggaccccctgctgcagggcagagttcaggtccactgggctgagtgtccccttgggcccatggcccagtcactcaggggcgagtttcttttctaacatagccctttctttgccatgaggccatgaggcccgcttcatccttttctatttccctagaaccttaatggtagaaggaattgcaaagaatcaagtccacccttctcatgtgacagatggggaaactgaggccttgagaaggaaaaaggctaatctaagttcctgcgggcagtggcatgactggagcacagcctcctgcctcccagcccggacccaatgcactttcttgtctcctctaataagccccaccctccccgcctgggctccccttgctgcccttgcctgttccccattagcacaggagtagcagcagcaggacaggcaagagcctcacaagtgggactctgggcctctgaccagctgtgcggcatgggctaagtcactctgcccttcggagcctctggaagcttagggcacattggttccagcctagccagtttctcaccctgggttggggtcccccagcatccagactggaaacctacccattttcccctgagcatcctctagatgctgccccaaggagttgctgcagttctggagcctcatctggctgggatctccaaggggcctcctggattcagtccccactggccctgagcacgacagcccttcttaccctcccaggaatgccgtgaaaggagacaaggtctgcccgacccatgtctatgctctacccccagggtagcatctcagcttccgaaccctgggctgtttccttagtcttcattttataaaagttgttgcctttttaacggagtgtcactttcaaccggcctcccctacccctgctggccggggatggagacatgtcatttgtaaaagcagaaaaaggttgcatttgttcacttttgtaatattgtcctgggcctgtgttggggtgttgggggaagctgggcatcagtggccacatgggcatcaggggctggccccacagagaccccacagggcagtgagctctgtcttcccccacctgcctagcccatcatctatctaaccggtccttgatttaataaacactataaaa

SEQ ID NO: 52777 - DNA, 2762 bp, Homo sapiens
agccgccacccggcgcccggcaggggggagcctggctgcgggcggggaccggggggcgggccgcgccgcgcggagaaaagcgctggccggagggcccgcggccgggccgccggggtgagcgtgccgaggcggctgtggcgcaggcttccagcccccaccatgccgtggcccctgctgctgctgctggccgtgagtggggcccagacaacccggccatgcttccccgggtgccaatgcgaggtggagaccttcggccttttcgacagcttcagcctgactcgggtggattgtagcggcctgggcccccacatcatgccggtgcccatccctctggacacagcccacttggacctgtcctccaaccggctggagatggtgaatgagtcggtgttggcggggccgggctacacgacgttggctggcctggatctcagccacaacctgctcaccagcatctcacccactgccttctcccgccttcgctacctggagtcgcttgacctcagccacaatggcctgacagccctgccagccgagagcttcaccagctcacccctgagcgacgtgaaccttagccacaaccagctccgggaggtctcagtgtctgccttcacgacgcacagtcagggccgggcactacacgtggacctctcccacaacctcattcaccgcctcgtgccccaccccacgagggccggcctgcctgcgcccaccattcagagcctgaacctggcctggaaccggctccatgccgtgcccaacctccgagacttgcccctgcgctacctgagcctggatgggaaccctctagctgtcattggtccgggtgccttcgcggggctgggaggccttacacacctgtctctggccagcctgcagaggctccctgagctggcgcccagtggcttccgtgagctaccgggcctgcaggtcctggacctgtcgggcaaccccaagcttaactgggcaggagctgaggtgttttcaggcctgagctccctgcaggagctggacctttcgggcaccaacctggtgcccctgcctgaggcgctgctcctccacctcccggcactgcagagcgtcagcgtgggccaggatgtgcggtgccggcgcctggtgcgggagggcacctacccccggaggcctggctccagccccaaggtggccctgcactgcgtagacacccgggaatctgctgccaggggccccaccatcttgtgacaaatggtgtggcccagggccacataacagactgctgtcctgggctgcctcaggtcccgagtaacttatgttcaatgtgccaacaccagtggggagcccgcaggcctatgtggcagcgtcaccacaggagttgtgggcctaggagaggctttggacctgggagccacacctaggagcaaagtctcacccctttgtctacgttgcttccccaaaccatgagcagagggacttcgatgccaaaccagactcgggtcccctcctgcttcccttccccacttatcccccaagtgccttccctcatgcctgggccggcctgacccgcaatgggcagagggtgggtgggaccccctgctgcagggcagagttcaggtccactgggctgagtgtccccttgggcccatggcccagtcactcaggggcgagtttcttttctaacatagccctttctttgccatgaggccatgaggcccgcttcatccttttctatttccctagaaccttaatggtagaaggaattgcaaagaatcaagtccacccttctcatgtgacagatggggaaactgaggccttgagaaggaaaaaggctaatctaagttcctgcgggcagtggcatgactggagcacagcctcctgcctcccagcccggacccaatgcactttcttgtctcctctaataagccccaccctccccgcctgggctccccttgctgcccttgcctgttccccattagcacaggagtagcagcagcaggacaggcaagagcctcacaagtgggactctgggcctctgaccagctgtgcggcatgggctaagtcactctgcccttcggagcctctggaagcttagggcacattggttccagcctagccagtttctcaccctgggttggggtcccccagcatccagactggaaacctacccattttcccctgagcatcctctagatgctgccccaaggagttgctgcagttctggagcctcatctggctgggatctccaaggggcctcctggattcagtccccactggccctgagcacgacagcccttcttaccctcccaggaatgccgtgaaaggagacaaggtctgcccgacccatgtctatgctctacccccagggtagcatctcagcttccgaaccctgggctgtttccttagtcttcattttataaaagttgttgcctttttaacggagtgtcactttcaaccggcctcccctacccctgctggccggggatggagacatgtcatttgtaaaagcagaaaaaggttgcatttgttcacttttgtaatattgtcctgggcctgtgttggggtgttgggggaagctgggcatcagtggccacatgggcatcaggggctggccccacagagaccccacagggcagtgagctctgtcttcccccacctgcctagcccatcatctatctaaccggtccttgatttaataaacactataaaatgaagactaaggaaacagcccagggttcggaagctgagatgctaccctgggggtagagcatagacatgggtcgggcaga

SEQ ID NO: 52778 - DNA, 1387 bp, Homo sapiens
cgagctcggtaccctcataggcccgcaggcctatgtggcagcgtcaccacaggagttgtgggcctaggagaggctttggacctgggagccacacctaggagcaaagtctcacccctttgtctacgttgcttccccaaaccatgagcagagggacttcgatgccaaaccagactcgggtcccctcctgcttcccttccccacttatcccccaagtgccttccctcatgcctgggccggcctgacccgcaatgggcagagggtgggtgggaccccctgctgcagggcagagttcaggtccactgggctgagtgtccccttgggcccatggcccagtcactcaggggcgagtttcttttctaacatagccctttctttgccatgaggccatgaggcccgcttcatccttttctatttccctagaaccttaatggtagaaggaattgcaaagaatcaagtccacccttctcatgtgacagatggggaaactgaggccttgagaaggaaaaaggctaatctaagttcctgcgggcagtggcatgactggagcacagcctcctgcctcccagcccggacccaatgcactttcttgtctcctctaataagccccaccctccccgcctgggctccccttgctgcccttgcctgttccccattagcacaggagtagcagcagcaggacaggcaagagcctcacaagtgggactctgggcctctgaccagctgtgcggcatgggctaagtcactctgcccttcggagcctctggaagcttagggcacattggttccagcctagccagtttctcaccctgggttggggtcccccagcatccagactggaaacctacccattttcccctgagcatcctctagatgctgccccaaggagttgctgcagttctggagcctcatctggctgggatctccaaggggcctcctggattcagtccccactggccctgagcacgacagcccttcttaccctcccaggaatgccgtgaaaggagacaaggtctgcccgacccatgtctatgctctacccccagggtagcatctcagcttccgaaccctgggctgtttccttagtcttcattttataaaagttgttgcctttttaacggagtgtcactttcaaccggcctcccctacccctgctggccggggatggagacatgtcatttgtaaaagcagaaaaaggttgcatttgttcacttttgtaatattgtcctgggcctgtgttggggtgttgggggaagctgggcatcagtggccacatgggcatcaggggctggccccacagagaccccacagggcagtgagctctgtcttcccccacctgcctagcccatcatctatctaaccggtccttgatttaataaacactataaaa

SEQ ID NO: 52779 - DNA, 2701 bp, Homo sapiens
agccgccacccggcgcccggcaggggggagcctggctgcgggcggggaccggggggcgggccgcgccgcgcggagaaaagcgctggccggagggcccgcggccgggccgccggggtgagcgtgccgaggcggctgtggcgcaggcttccagcccccaccatgccgtggcccctgctgctgctgctggccgtgagtggggcccagacaacccggccatgcttccccgggtgccaatgcgaggtggagaccttcggccttttcgacagcttcagcctgactcgggtggattgtagcggcctgggcccccacatcatgccggtgcccatccctctggacacagcccacttggacctgtcctccaaccggctggagatggtgaatgagtcggtgttggcggggccgggctacacgacgttggctggcctggatctcagccacaacctgctcaccagcatctcacccactgccttctcccgccttcgctacctggagtcgcttgacctcagccacaatggcctgacagccctgccagccgagagcttcaccagctcacccctgagcgacgtgaaccttagccacaaccagctccgggaggtctcagtgtctgccttcacgacgcacagtcagggccgggcactacacgtggacctctcccacaacctcattcaccgcctcgtgccccaccccacgagggccggcctgcctgcgcccaccattcagagcctgaacctggcctggaaccggctccatgccgtgcccaacctccgagacttgcccctgcgctacctgagcctggatgggaaccctctagctgtcattggtccgggtgccttcgcggggctgggaggccttacacacctgtctctggccagcctgcagaggctccctgagctggcgcccagtggcttccgtgagctaccgggcctgcaggtcctggacctgtcgggcaaccccaagcttaactgggcaggagctgaggtgttttcaggcctgagctccctgcaggagctggacctttcgggcaccaacctggtgcccctgcctgaggcgctgctcctccacctcccggcactgcagagcgtcagcgtgggccaggatgtgcggtgccggcgcctggtgcgggagggcacctacccccggaggcctggctccagccccaaggtggccctgcactgcgtagacacccgggaatctgctgccaggggccccaccatcttgtgacaaatggtgtggcccagggccacataacagactgctgtcctgggctgcctcaggtcccgagtaacttatgttcaatgtgccaacaccagtggggagcccgcaggcctatgtggcagcgtcaccacaggagttgtgggcctaggagaggctttggacctgggagccacacctaggagcaaagtctcacccctttgtctacgttgcttccccaaaccatgagcagagggacttcgatgccaaaccagactcgggtcccctcctgcttcccttccccacttatcccccaagtgccttccctcatgcctgggccggcctgacccgcaatgggcagagggtgggtgggaccccctgctgcagggcagagttcaggtccactgggctgagtgtccccttgggcccatggcccagtcactcaggggcgagtttcttttctaacatagccctttctttgccatgaggccatgaggcccgcttcatccttttctatttccctagaaccttaatggtagaaggaattgcaaagaatcaagtccacccttctcatgtgacagatggggaaactgaggccttgagaaggaaaaaggctaatctaagttcctgcgggcagtggcatgactggagcacagcctcctgcctcccagcccggacccaatgcactttcttgtctcctctaataagccccaccctccccgcctgggctccccttgctgcccttgcctgttccccattagcacaggagtagcagcagcaggacaggcaagagcctcacaagtgggactctgggcctctgaccagctgtgcggcatgggctaagtcactctgcccttcggagcctctggaagcttagggcacattggttccagcctagccagtttctcaccctgggttggggtcccccagcatccagactggaaacctacccattttcccctgagcatcctctagatgctgccccaaggagttgctgcagttctggagcctcatctggctgggatctccaaggggcctcctggattcagtccccactggccctgagcacgacagcccttcttaccctcccaggaatgccgtgaaaggagacaaggtctgcccgacccatgtctatgctctacccccagggtagcatctcagcttccgaaccctgggctgtttccttagtcttcattttataaaagttgttgcctttttaacggagtgtcactttcaaccggcctcccctacccctgctggccggggatggagacatgtcatttgtaaaagcagaaaaaggttgcatttgttcacttttgtaatattgtcctgggcctgtgttggggtgttgggggaagctgggcatcagtggccacatgggcatcaggggctggccccacagagaccccacagggcagtgagctctgtcttcccccacctgcctagcccatcatctatctaaccggtccttgatttaataaacactataaaaagttctttgctttactca

SEQ ID NO: 52780 - DNA, 2629 bp, Homo sapiens
agccgccacccggcgcccggcaggggggagcctggctgcgggcggggaccggggggcgggccgcgccgcgcggagaaaagcgctggccggagggcccgcggccgggccgccggggtgagcgtgccgaggcggctgtggcgcaggcttccagcccccaccatgccgtggcccctgctgctgctgctggccgtgagtggggcccagacaacccggccatgcttccccgggtgccaatgcgaggtggagaccttcggccttttcgacagcttcagcctgactcgggtggattgtagcggcctgggcccccacatcatgccggtgcccatccctctggacacagcccacttggacctgtcctccaaccggctggagatggtgaatgagtcggtgttggcggggccgggctacacgacgttggctggcctggatctcagccacaacctgctcaccagcatctcacccactgccttctcccgccttcgctacctggagtcgcttgacctcagccacaatggcctgacagccctgccagccgagagcttcaccagctcacccctgagcgacgtgaaccttagccacaaccagctccgggaggtctcagtgtctgccttcacgacgcacagtcagggccgggcactacacgtggacctctcccacaacctcattcaccgcctcgtgccccaccccacgagggccggcctgcctgcgcccaccattcagagcctgaacctggcctggaaccggctccatgccgtgcccaacctccgagacttgcccctgcgctacctgagcctggatgggaaccctctagctgtcattggtccgggtgccttcgcggggctgggaggccttacacacctgtctctggccagcctgcagaggctccctgagctggcgcccagtggcttccgtgagctaccgggcctgcaggtcctggacctgtcgggcaaccccaagcttaactgggcaggagctgaggtgttttcaggcctgagctccctgcaggagctggacctttcgggcaccaacctggtgcccctgcctgaggcgctgctcctccacctcccggcactgcagagcgtcagcgtgggccaggatgtgcggtgccggcgcctggtgcgggagggcacctacccccggaggcctggctccagccccaaggtggccctgcactgcgtagacacccgggaatctgctgccaggggccccaccatcttgtgacaaatggtgtggcccagggccacataacagactgctgtcctgggctgcctcaggtcccgagtaacttatgttcaatgtgccaacaccagtggggagcccgcaggcctatgtggcagcgtcaccacaggagttgtgggcctaggagaggctttggacctgggagccacacctaggagcaaagtctcacccctttgtctacgttgcttccccaaaccatgagcagagggacttcgatgccaaaccagactcgggtcccctcctgcttcccttccccacttatcccccaagtgccttccctcatgcctgggccggcctgacccgcaatgggcagagggtgggtgggaccccctgctgcagggcagagttcaggtccactgggctgagtgtccccttgggcccatggcccagtcactcaggggcgagtttcttttctaacatagccctttctttgccatgaggccatgaggcccgcttcatccttttctatttccctagaaccttaatggtagaaggaattgcaaagaatcaagtccacccttctcatgtgacagatggggaaactgaggccttgagaaggagcctcccagcccggacccaatgcactttcttgtctcctctaataagccccaccctccccgcctgggctccccttgctgcccttgcctgttccccattagcacaggagtagcagcagcaggacaggcaagagcctcacaagtgggactctgggcctctgaccagctgtgcggcatgggctaagtcactctgcccttcggagcctctggaagcttagggcacattggttccagcctagccagtttctcaccctgggttggggtcccccagcatccagactggaaacctacccattttcccctgagcatcctctagatgctgccccaaggagttgctgcagttctggagcctcatctggctgggatctccaaggggcctcctggattcagtccccactggccctgagcacgacagcccttcttaccctcccaggaatgccgtgaaaggagacaaggtctgcccgacccatgtctatgctctacccccagggtagcatctcagcttccgaaccctgggctgtttccttagtcttcattttataaaagttgttgcctttttaacggagtgtcactttcaaccggcctcccctacccctgctggccggggatggagacatgtcatttgtaaaagcagaaaaaggttgcatttgttcacttttgtaatattgtcctgggcctgtgttggggtgttgggggaagctgggcatcagtggccacatgggcatcaggggctggccccacagagaccccacagggcagtgagctctgtcttcccccacctgcctagcccatcatctatctaaccggtccttgatttaataaacactataaaa

SEQ ID NO: 52781 - DNA, 282 bp, Homo sapiens
ctcattaccctagcttgccccatatgattgcaataaaaatcaacaaggaaatgcatatgaaactatatttaagctgccaaatattagacacatatttatctatttattgagatgaagttttgctcttgttgcccaggttggagtgcaatggtgcgatctcggctcactgcaacctttgcctcccagctcaagcgattctcctgcctcagcctcccgagtagctgggactacaggtgccagtcaccatgcccagctaattttttgtatttttgtagagatggg

SEQ ID NO: 52782 - DNA, 762 bp, Homo sapiens
gtaatgaagttaatcagtaaaccacacaacctctgtcctctctcactccttacctagtctcattttcagtggctgtgaataagctaagaatggtaatgcagtttcaggggttagaaaatccaattcaaattagtcctcactgcagctgtacgccgtcaggatttttcatggaaatgatgagtatgaagcccgcgaaaggtaggacactgttcacaggtgctttcaggtcgagctcttgcaactggactgaggaaatctggggactttggttggagatgacagtaacagatgtctgtcaaagatagtggctcagtcagacccagaagactggaatgagagtttgggttggggtgatttttatagggttctaaacagacgaatatcttatggggatgaaatccaaggatgtttcccctaatattcttcatagactcttatgtcaaattatcactattcttccaaaccaaacattagacaattctaatattaatatcaatggacacttgaaaaaacattttaacagacattatttaatgcagtgctcctaaaatggcaagtctcagttcccaggggatcacaaaatttatttagtgtctcgtgaccagcattaaaaactggattagaatataatagaatagaaatattagtgtccctcaaggagtaaagacaagtggtatttcatgaaattttgtttcagttacatgtgtataagtatgtacgagggatatgagataaaatgtatctaaaaccgtaggttgtggt

SEQ ID NO: 52783 - DNA, 448 bp, Homo sapiens
gtaatgaagttaatcagtaaaccacacaacctctgtcctctctcactccttacctagtctcattttcagtggctgtgaataagctaagaatggtaatgcagtttcaggggttagaaaatccaattcaaattagtcctcactgcagctgtacgccgtcaggatttttcatggaaatgatgagtatgaagcccgcgaaagggcttctcagactcccctggagtccatccatgtgttctcatttaagaactcgtccctaaacttccatggagaaccgtcacaaaggaatcctaattctcatactctttgataggctaattccaaaataaagattcctaaatctaaattttaatatgtattttcccttttaaattgtatcaaaatagaaataaatttaccttttcagaaagcatactctaaattaaagtcgaactacctctactccctccac

SEQ ID NO: 52784 - DNA, 2753 bp, Homo sapiens
gctgctagcccagaaggccgcctgtgatcatgcacagtacactggaactctctcctcctcctcacctcattgtctccccgacttatcctaatgcgaaattggattctgagcatttgtagcaaaatcgctgggatctggagaggaagactcagtccagaatcctcccagggccttgaaagtccatctctgacccaaaacaatccaaggaggtagaagacatcgtagaaggagtgaaagaagaaaagaagacttagaaacatagctcaaagtgaacactgcttctcttagtttcctggatttcttctggacatttcctcaagatgaaacttcagacactttggagttttttttgaagaccaccataaagaaagtgcatttcaattgaaaaatttggatgggatcaaaaatgaatctcattgaacattcccatttacctaccacagatgaattttctttttctgaaaatttatttggtgttttaacagaacaagtggcaggtcctctgggacagaacctggaagtggaaccatactcgcaatacagcaatgttcagtttccccaagttcaaccacagatttcctcgtcatcctattattccaacctgggtttctacccccagcagcctgaagagtggtactctcctggaatatatgaactcaggcgtatgccagctgagactctctaccagggagaaactgaggtagcagagatgcctgtaacaaagaagccccgcatgggcgcgtcagcagggaggatcaaaggggatgagctgtgtgttgtttgtggagacagagcctctggataccactataatgcactgacctgtgaggggtgtaaaggtttcttcaggagaagcattaccaaaaacgctgtgtacaagtgtaaaaacgggggcaactgtgtgatggatatgtacatgcgaagaaagtgtcaagagtgtcgactaaggaaatgcaaagagatgggaatgttggctgaatgtatgatgcttgttaactgaaattcagtgtaaatctaagcgactgagaaaaaatgtgaagcagcatgcagatcagaccgtgaatgaagacagtgaaggtcgtgacttgcgacaagtgacctcgacaacaaagtcatgcagggagaaaactgaactcaccccagatcaacagactcttctacattttattatggattcatataacaaacagaggatgcctcaggaaataacaaataaaattttaaaagaagaattcagtgcagaagaaaattttctcattttgacggaaatggcaaccaatcatgtacaggttcttgtagaattcacaaaaaagctaccaggatttcagactttggaccatgaagaccagattgctttgctgaaagggtctgcggttgaagctatgttccttcgttcagctgagattttcaataagaaacttccgtctgggcattctgacctattggaagaaagaattcgaaatagtggtatctctgatgaatatataacacctatgtttagtttttataaaagtattggggaactgaaaatgactcaagaggagtatgctctgcttacagcaattgttatcctgtctccagatagacaatacataaaggatagagaggcagtagagaagcttcaggagccacttcttgatgtgctacaaaagttgtgtaagattcaccagcctgaaaatcctcaacactttgcctgtctcctgggtcgcctgactgaattacggacattcaatcatcaccacgctgagatgctgatgtcatggagagtaaacgaccacaagtttaccccacttctctgtgaaatctgggacgtgcagtgatggggattacaggggaggggtctagctcctttttctctctcatattaatctgatgtataactttcctttatttcacttgtacccagtttcactcaagaaatcttgatgaatatttatgttgtaattacatgtgtaacttccacaactgtaaatattgggctagatagaacaactttctctacattgtgttttaaaaggctccagggaatcctgcattctaattggcaagccctgtttgcctaattaaattgattgttacttcaattctatctgttgaactagggaaaatctcattttgctcatcttaccatattgcatatattttattaaagagttgtattcaatcttggcaataaagcaaacataatggcaaaacaggcattttctttgggaacaaaatttgataaatatacaaactcatttctttaaatgttgaaagacatcctattgaatctgagggggtaatttacagaaagatactgtctctcgcacttttgtcatctctggaaaagtcctggtgaatagtcattcatttgtaatagccctctgatcatttccttttctttgaagttcaaagagaatagcaaacagaaaagttaacaattttcacataaaatattccctcaagcaatcctttcccccatagttagtcttgaggcaggattcacaaattcagagtatgcagctaactgcagtgatgggaccttcgctttcctctcttaaaagtgaggaaatgattggcttcattgtatccaatcatctttctgttttgttttgcttttgaaaacattcctacagctgggagcacagctgctgtatacttcccccaaagcaggaattagttcatttccttccttcattgttacactgttgcattcttctccctattatcctttggtgaatacaataaaacaccttctataagtaatgggc

SEQ ID NO: 52785 - DNA, 2098 bp, Homo sapiens
gctgctagcccagaaggccgcctgtgatcatgcacagtacactggaactctctcctcctcctcacctcattgtctccccgacttatcctaatgcgaaattggattctgagcatttgtagcaaaatcgctgggatctggagaggaagactcagtccagaatcctcccagggccttgaaagtccatctctgacccaaaacaatccaaggaggtagaagacatcgtagaaggagtgaaagaagaaaagaagacttagaaacatagctcaaagtgaacactgcttctcttagtttcctggatttcttctggacatttcctcaagatgaaacttcagacactttggagttttttttgaagaccaccataaagaaagtgcatttcaattgaaaaatttggatgggatcaaaaatgaatctcattgaacattcccatttacctaccacagatgaattttctttttctgaaaatttatttgctggaagtggaaccatactcgcaatacagcaatgttcagtttccccaagttcaaccacagatttcctcgtcatcctattattccaacctgggtttctacccccagcagcctgaagagtggtactctcctggaatatatgaactcaggcgtatgccagctgagactctctaccagggagaaactgaggtagcagagatgcctgtaacaaagaagccccgcatgggcgcgtcagcagggaggatcaaaggggatgagctgtgtgttgtttgtggagacagagcctctggataccactataatgcactgacctgtgaggggtgtaaaggtttcttcaggagaagcattaccaaaaacgctgtgtacaagtgtaaaaacgggggcaactgtgtgatggatatgtacatgcgaagaaagtgtcaagagtgtcgactaaggaaatgcaaagagatgggaatgttggctgaatgtatgatgcttgttaactgaaattcagtgtaaatctaagcgactgagaaaaaatgtgaagcagcatgcagatcagaccgtgaatgaagacagtgaaggtcgtgacttgcgacaagtgacctcgacaacaaagtcatgcagggagaaaactgaactcaccccagatcaacagactcttctacattttattatggattcatataacaaacagaggatgcctcaggaaataacaaataaaattttaaaagaagaattcagtgcagaagaaaattttctcattttgacggaaatggcaaccaatcatgtacaggttcttgtagaattcacaaaaaagctaccaggatttcagactttggaccatgaagaccagattgctttgctgaaacttccgtctgggcattctgacctattggaagaaagaattcgaaatagtggtatctctgatgaatatataacacctatgtttagtttttataaaagtattggggaactgaaaatgactcaagaggagtatgctctgcttacagcaattgttatcctgtctccagatagacaatacataaaggatagagaggcagtagagaagcttcaggagccacttcttgatgtgctacaaaagttgtgtaagattcaccagcctgaaaatcctcaacactttgcctgtctcctgggtcgcctgactgaattacggacattcaatcatcaccacgctgagatgctgatgtcatggagagtaaacgaccacaagtttaccccacttctctgtgaaatctgggacgtgcagtgatggggattacaggggaggggtctagctcctttttctctctcatattaatctgatgtataactttcctttatttcacttgtacccagtttcactcaagaaatcttgatgaatatttatgttgtaattacatgtgtaacttccacaactgtaaatattgggctagatagaacaactttctctacattgtgttttaaaaggctccagggaatcctgcattctaattggcaagccctgtttgcctaattaaattgattgttacttcaattctatctgttgaactagggaaaatctcattttgctcatcttaccatattgcatatattttattaaagagttgtattcaatcttggcaataaagcaaacataatggcaa

SEQ ID NO: 52786 - DNA, 1918 bp, Homo sapiens
gtaatgaagttaatcagtaaaccacacaacctctgtcctctctcactccttacctagtctcattttcagtggctgtgaataagctaagaatggtaatgcagtttcaggggttagaaaatccaattcaaattagtcctcactgcagctgtacgccgtcaggatttttcatggaaatgatgagtatgaagcccgcgaaaggtgttttaacagaacaagtggcaggtcctctgggacagaacctggaagtggaaccatactcgcaatacagcaatgttcagtttccccaagttcaaccacagatttcctcgtcatcctattattccaacctgggtttctacccccagcagcctgaagagtggtactctcctggaatatatgaactcaggcgtatgccagctgagactctctaccagggagaaactgaggtagcagagatgcctgtaacaaagaagccccgcatgggcgcgtcagcagggaggatcaaaggggatgagctgtgtgttgtttgtggagacagagcctctggataccactataatgcactgacctgtgaggggtgtaaaggtttcttcaggagaagcattaccaaaaacgctgtgtacaagtgtaaaaacgggggcaactgtgtgatggatatgtacatgcgaagaaagtgtcaagagtgtcgactaaggaaatgcaaagagatgggaatgttggctgaatgtatgatgcttgttaactgaaattcagtgtaaatctaagcgactgagaaaaaatgtgaagcagcatgcagatcagaccgtgaatgaagacagtgaaggtcgtgacttgcgacaagtgacctcgacaacaaagtcatgcagggagaaaactgaactcaccccagatcaacagactcttctacattttattatggattcatataacaaacagaggatgcctcaggaaataacaaataaaattttaaaagaagaattcagtgcagaagaaaattttctcattttgacggaaatggcaaccaatcatgtacaggttcttgtagaattcacaaaaaagctaccaggatttcagactttggaccatgaagaccagattgctttgctgaaagggtctgcggttgaagctatgttccttcgttcagctgagattttcaataagaaacttccgtctgggcattctgacctattggaagaaagaattcgaaatagtggtatctctgatgaatatataacacctatgtttagtttttataaaagtattggggaactgaaaatgactcaagaggagtatgctctgcttacagcaattgttatcctgtctccagatagacaatacataaaggatagagaggcagtagagaagcttcaggagccacttcttgatgtgctacaaaagttgtgtaagattcaccagcctgaaaatcctcaacactttgcctgtctcctgggtcgcctgactgaattacggacattcaatcatcaccacgctgagatgctgatgtcatggagagtaaacgaccacaagtttaccccacttctctgtgaaatctgggacgtgcagtgatggggattacaggggaggggtctagctcctttttctctctcatattaatctgatgtataactttcctttatttcacttgtacccagtttcactcaagaaatcttgatgaatatttatgttgtaattacatgtgtaacttccacaactgtaaatattgggctagatagaacaactttctctacattgtgttttaaaaggctccagggaatcctgcattctaattggcaagccctgtttgcctaattaaattgattgttacttcaattctatctgttgaactagggaaaatctcattttgctcatcttaccatattgcatatattttattaaagagttgtattcaatcttggcaataaagcaaacataatggcaa

SEQ ID NO: 52787 - DNA, 895 bp, Homo sapiens
gctgctagcccagaaggccgcctgtgatcatgcacagtacactggaactctctcctcctcctcacctcattgtctccccgacttatcctaatgcgaaattggattctgagcatttgtagcaaaatcgctgggatctggagaggaagactcagtccagaatcctcccagggccttgaaagtccatctctgacccaaaacaatccaaggaggtagaagacatcgtagaaggagtgaaagaagaaaagaagacttagaaacatagctcaaagtgaacactgcttctcttagtttcctggatttcttctggacatttcctcaagatgaaacttcagacactttggagttttttttgaagaccaccataaagaaagtgcatttcaattgaaaaatttggatgggatcaaaaatgaatctcattgaacattcccatttacctaccacagatgaattttctttttctgaaaatttatttgatttcctgggttggttccaatctctgccatctactaccctgtggtcttggacaaattccttaactttgcacaagttacttgccttatttaaataaggtgataagaagaatgcctggcacatcacaagtactctatttgccactaaaattcactctcacaacacacctataagggcttctcagactcccctggagtccatccatgtgttctcatttaagaactcgtccctaaacttccatggagaaccgtcacaaaggaatcctaattctcatactctttgataggctaattccaaaataaagattcctaaatctaaattttaatatgtattttcccttttaaattgtatcaaaatagaaataaatttaccttttcagaaagcatactctaaattaaagtcgaactacctctactccctccac

SEQ ID NO: 52788 - DNA, 2193 bp, Homo sapiens
gctgctagcccagaaggccgcctgtgatcatgcacagtacactggaactctctcctcctcctcacctcattgtctccccgacttatcctaatgcgaaattggattctgagcatttgtagcaaaatcgctgggatctggagaggaagactcagtccagaatcctcccagggccttgaaagtccatctctgacccaaaacaatccaaggaggtagaagacatcgtagaaggagtgaaagaagaaaagaagacttagaaacatagctcaaagtgaacactgcttctcttagtttcctggatttcttctggacatttcctcaagatgaaacttcagacactttggagttttttttgaagaccaccataaagaaagtgcatttcaattgaaaaatttggatgggatcaaaaatgaatctcattgaacattcccatttacctaccacagatgaattttctttttctgaaaatttatttggtgttttaacagaacaagtggcaggtcctctgggacagaacctggaagtggaaccatactcgcaatacagcaatgttcagtttccccaagttcaaccacagatttcctcgtcatcctattattccaacctgggtttctacccccagcagcctgaagagtggtactctcctggaatatatgaactcaggcgtatgccagctgagactctctaccagggagaaactgaggtagcagagatgcctgtaacaaagaagccccgcatgggcgcgtcagcagggaggatcaaaggggatgagctgtgtgttgtttgtggagacagagcctctggataccactataatgcactgacctgtgaggggtgtaaaggtttcttcaggagaagcattaccaaaaacgctgtgtacaagtgtaaaaacgggggcaactgtgtgatggatatgtacatgcgaagaaagtgtcaagagtgtcgactaaggaaatgcaaagagatgggaatgttggctgaatgtatgatgcttgttaactgaaattcagtgtaaatctaagcgactgagaaaaaatgtgaagcagcatgcagatcagaccgtgaatgaagacagtgaaggtcgtgacttgcgacaagtgacctcgacaacaaagtcatgcagggagaaaactgaactcaccccagatcaacagactcttctacattttattatggattcatataacaaacagaggatgcctcaggaaataacaaataaaattttaaaagaagaattcagtgcagaagaaaattttctcattttgacggaaatggcaaccaatcatgtacaggttcttgtagaattcacaaaaaagctaccaggatttcagactttggaccatgaagaccagattgctttgctgaaagggtctgcggttgaagctatgttccttcgttcagctgagattttcaataagaaacttccgtctgggcattctgacctattggaagaaagaattcgaaatagtggtatctctgatgaatatataacacctatgtttagtttttataaaagtattggggaactgaaaatgactcaagaggagtatgctctgcttacagcaattgttatcctgtctccagatagacaatacataaaggatagagaggcagtagagaagcttcaggagccacttcttgatgtgctacaaaagttgtgtaagattcaccagcctgaaaatcctcaacactttgcctgtctcctgggtcgcctgactgaattacggacattcaatcatcaccacgctgagatgctgatgtcatggagagtaaacgaccacaagtttaccccacttctctgtgaaatctgggacgtgcagtgatggggattacaggggaggggtctagctcctttttctctctcatattaatctgatgtataactttcctttatttcacttgtacccagtttcactcaagaaatcttgatgaatatttatgttgtaattacatgtgtaacttccacaactgtaaatattgggctagatagaacaactttctctacattgtgttttaaaaggctccagggaatcctgcattctaattggcaagccctgtttgcctaattaaattgattgttacttcaattctatctgttgaactagggaaaatctcattttgctcatcttaccatattgcatatattttattaaagagttgtattcaatcttggcaataaagcaaacataatggcaa

SEQ ID NO: 52789 - DNA, 2004 bp, Homo sapiens
gctgctagcccagaaggccgcctgtgatcatgcacagtacactggaactctctcctcctcctcacctcattgtctccccgacttatcctaatgcgaaattggattctgagcatttgtagcaaaatcgctgggatctggagaggaagactcagtccagaatcctcccagggccttgaaagtccatctctgacccaaaacaatccaaggaggtagaagacatcgtagaaggagtgaaagaagaaaagaagacttagaaacatagctcaaagtgaacactgcttctcttagtttcctggatttcttctggacatttcctcaagatgaaacttcagacactttggagttttttttgaagaccaccataaagaaagtgcatttcaattgaaaaatttggatgggatcaaaaatgaatctcattgaacattcccatttacctaccacagatgaattttctttttctgaaaatttatttgctggaagtggaaccatactcgcaatacagcaatgttcagtttccccaagttcaaccacagatttcctcgtcatcctattattccaacctgggtttctacccccagcagcctgaagagtggtactctcctggaatatatgaactcaggcgtatgccagctgagactctctaccagggagaaactgaggtagcagagatgcctgtaacaaagaagccccgcatgggcgcgtcagcagggaggatcaaaggggatgagctgtgtgttgtttgtggagacagagcctctggataccactataatgcactgacctgtgaggggtgtaaaggcttgttaactgaaattcagtgtaaatctaagcgactgagaaaaaatgtgaagcagcatgcagatcagaccgtgaatgaagacagtgaaggtcgtgacttgcgacaagtgacctcgacaacaaagtcatgcagggagaaaactgaactcaccccagatcaacagactcttctacattttattatggattcatataacaaacagaggatgcctcaggaaataacaaataaaattttaaaagaagaattcagtgcagaagaaaattttctcattttgacggaaatggcaaccaatcatgtacaggttcttgtagaattcacaaaaaagctaccaggatttcagactttggaccatgaagaccagattgctttgctgaaagggtctgcggttgaagctatgttccttcgttcagctgagattttcaataagaaacttccgtctgggcattctgacctattggaagaaagaattcgaaatagtggtatctctgatgaatatataacacctatgtttagtttttataaaagtattggggaactgaaaatgactcaagaggagtatgctctgcttacagcaattgttatcctgtctccagatagacaatacataaaggatagagaggcagtagagaagcttcaggagccacttcttgatgtgctacaaaagttgtgtaagattcaccagcctgaaaatcctcaacactttgcctgtctcctgggtcgcctgactgaattacggacattcaatcatcaccacgctgagatgctgatgtcatggagagtaaacgaccacaagtttaccccacttctctgtgaaatctgggacgtgcagtgatggggattacaggggaggggtctagctcctttttctctctcatattaatctgatgtataactttcctttatttcacttgtacccagtttcactcaagaaatcttgatgaatatttatgttgtaattacatgtgtaacttccacaactgtaaatattgggctagatagaacaactttctctacattgtgttttaaaaggctccagggaatcctgcattctaattggcaagccctgtttgcctaattaaattgattgttacttcaattctatctgttgaactagggaaaatctcattttgctcatcttaccatattgcatatattttattaaagagttgtattcaatcttggcaataaagcaaacataatggcaa

SEQ ID NO: 52790 - DNA, 1283 bp, Homo sapiens
gctgctagcccagaaggccgcctgtgatcatgcacagtacactggaactctctcctcctcctcacctcattgtctccccgacttatcctaatgcgaaattggattctgagcatttgtagcaaaatcgctgggatctggagaggaagactcagtccagaatcctcccagggccttgaaagtccatctctgacccaaaacaatccaaggaggtagaagacatcgtagaaggagtgaaagaagaaaagaagacttagaaacatagctcaaagtgaacactgcttctcttagtttcctggatttcttctggacatttcctcaagatgaaacttcagacactttggagttttttttgaagaccaccataaagaaagtgcatttcaattgaaaaatttggatgggatcaaaaatgaatctcattgaacattcccatttacctaccacagatgaattttctttttctgaaaatttatttgctggaagtggaaccatactcgcaatacagcaatgttcagtttccccaagttcaaccacagatttcctcgtcatcctattattccaacctgggtttctacccccagcagcctgaagagtggtactctcctggaatatatgaactcaggcgtatgccagctgagactctctaccagggagaaactgaggtagcagagatgcctgtaacaaagaagccccgcatgggcgcgtcagcagggaggatcaaaggggatgagctgtgtgttgtttgtggagacagagcctctggataccactataatgcactgacctgtgaggggtgtaaaggtaagcatctttgattggcagttttctccttcaggttttactatattggttgttgaaatcccttgaactaattgcttcccttttcccaggcaacttcccattttctcctcctgtgcgcctacctcctcctacatcctcacctttgttgtgtagtcaaagatctgtaggaaaagactgttagagtatttagcttaatgtttaagactgttagagtatctagcttagagtgtttagctttcttccttttcacaacctcacacgtagctaaagggaacttatgattaaattgaattttttgtaggttttgtttgtttttgttgtttttttaaaaaagaaagaagaaagtgatgaacacatctcttttaaaattaagatctagaagaatacaactttattcaataaatatttaaaaatatttttcatgtactttagttaattgagaaagagagaaagaaagagccaagtaataatagcttatattacaa

SEQ ID NO: 52791 - DNA, 1861 bp, Homo sapiens
  misc_feature (230)..(230): n is a, c, g, or t
  misc_feature (1631)..(1631): n is a, c, g, or t
cgcgcggggaagggaagaagaggacgaggtggcgcagagaccgcgggagaacacagtgcctccggaggaaatctgctcggtccccggcagccgcgcttcccctttgatgttttggtacgccgtggccatgcgcctcacattagaattactgcactgggcagactaagttggatctcctctcttcagtgaaaccctcaattccatcaaaaactaaagggatgtggagagtncggaaaaggggctactttgggatttggtccttccccttaataatcgccgctgtctgtgcgcagagtgtcaatgaccctagtaatatgtcgctggttaaagagacggtggatagactcctgaaaggctatgacattcgtctgagaccagattttggaggtccccccgtggctgtggggatgaacattgacattgccagcatcgatatggtttctgaagtcaatatggattataccttgacaatgtactttcaacaagcctggagagataagaggctgtcctataatgtaatacctttaaacttgactctggacaacagagtggcagaccagctctgggtgcctgatacctatttcctgaacgataagaagtcatttgtgcacggagtgactgttaagaaccgcatgattcgcctgcatcctgatggcaccgtcctttatggactcagaatcacaaccacagctgcctgcatgatggacctaaggaggtacccactggatgaacaaaactgcaccttggaaattgagagctatggatacacaactgatgacattgagttttactggcgtggcgatgataatgcagtaacaggagtaacgaaaattgaacttccacagttctctattgtagattacaaacttatcaccaagaaggttgttttttccacaggttcctatcccaggttatccctcagctttaagcttaagagaaacattggctactttatcctgcaaacatacatgccttccatcctgattaccatcctctcctgggtctccttctggattaattacgatgcttcagctgcaagggtggcattaggaatcacaactgtcctcacaatgaccacaatcaacacccacctccgggaaactctccctaaaatcccctatgtgaaggccattgacatgtacctgatggggtgctttgtcttcgttttcatggcccttctggaatatgccctagtcaactacatcttctttgggagggggccccaacgccaaaagaaagcagctgagaaggctgccagtgccaacaatgagaagatgcgcctggatgtcaacaagatggacccccatgagaacatcttactgagcactctcgagataaaaaatgaaatggccacatctgaggctgtgatgggacttggagaccccagaagcacaatgctagcctatgatgcctccagcatccagtatcggaaagctgggttgcccaggcatagttttggccgaaatgctctggaacgacatgtggcgcaaaagaaaagtcgcctgaggagacgcgcctcccaactgaaaatcaccatccctgacttgactgatgtgaatgccatagatcggtggtcccgcatattcttcccagtggttttttccttcttcaacatcgtctattggctttantatgtgaactaaaacatggcctcccactggaagcaaggactagattcctcctcaaaccagttgtacagcctgatgtaggacttggaaaacacatcaatccaggacaaaagtgacgctaaaataccttagttgctggcctatcctgtggtccatttcataccatttgggttgcttctgctaagtaatgaatacactaaggtccttgtggttttccagttaaaacgcaagta

SEQ ID NO: 52792 - DNA, 630 bp, Homo sapiens
  misc_feature (400)..(400): n is a, c, g, or t
tgcctagtaagcacctgtaaagcttcattgttctgattgtctttttgattctcttcccttgcagatggacccccatgagaacatcttactgagcactctcgagataaaaaatgaaatggccacatctgaggctgtgatgggacttggagaccccagaagcacaatgctagcctatgatgcctccagcatccagtatcggaaagctgggttgcccaggcatagttttggccgaaatgctctggaacgacatgtggcgcaaaagaaaagtcgcctgaggagacgcgcctcccaactgaaaatcaccatccctgacttgactgatgtgaatgccatagatcggtggtcccgcatattcttcccagtggttttttccttcttcaacatcgtctattggctttantatgtgaactaaaacatggcctcccactggaagcaaggactagattcctcctcaaaccagttgtacagcctgatgtaggacttggaaaacacatcaatccaggacaaaagtgacgctaaaataccttagttgctggcctatcctgtggtccatttcataccatttgggttgcttctgctaagtaatgaatacactaaggtccttgtggttttccagttaaaacgcaagta

SEQ ID NO: 52793 - DNA, 1975 bp, Homo sapiens
  misc_feature (230)..(230): n is a, c, g, or t
  misc_feature (1745)..(1745): n is a, c, g, or t
cgcgcggggaagggaagaagaggacgaggtggcgcagagaccgcgggagaacacagtgcctccggaggaaatctgctcggtccccggcagccgcgcttcccctttgatgttttggtacgccgtggccatgcgcctcacattagaattactgcactgggcagactaagttggatctcctctcttcagtgaaaccctcaattccatcaaaaactaaagggatgtggagagtncggaaaaggggctactttgggatttggtccttccccttaataatcgccgctgtctgtgcgcagagtgtcaatgaccctagtaatatgtcgctggttaaagagacggtggatagactcctgaaaggctatgacattcgtctgagaccagattttggaggtccccccgtggctgtggggatgaacattgacattgccagcatcgatatggtttctgaagtcaatatggattataccttgacaatgtactttcaacaagcctggagagataagaggctgtcctataatgtaatacctttaaacttgactctggacaacagagtggcagaccagctctgggtgcctgatacctatttcctgaacgataagaagtcatttgtgcacggagtgactgttaagaaccgcatgattcgcctgcatcctgatggcaccgtcctttatggactcagaatcacaaccacagctgcctgcatgatggacctaaggaggtacccactggatgaacaaaactgcaccttggaaattgagagctatggatacacaactgatgacattgagttttactggcgtggcgatgataatgcagtaacaggagtaacgaaaattgaacttccacagttctctattgtagattacaaacttatcaccaagaaggttgttttttccacaggttcctatcccaggttatccctcagctttaagcttaagagaaacattggctactttatcctgcaaacatacatgccttccatcctgattaccatcctctcctgggtctccttctggattaattacgatgcttcagctgcaagggtggcattaggaatcacaactgtcctcacaatgaccacaatcaacacccacctccgggaaactctccctaaaatcccctatgtgaaggccattgacatgtacctgatggggtgctttgtcttcgttttcatggcccttctggaatatgccctagtcaactacatcttctttgggagggggccccaacgccaaaagaaagcagctgagaaggctgccagtgccaacaatgagaagatgcgcctggatgtcaacaagattttttataaagatattaaacaaaatgggacccaatatcgatccttgtgggaccctactggaaacctctccccaactagacggactaccaattacgatttctctctgtatacgatggacccccatgagaacatcttactgagcactctcgagataaaaaatgaaatggccacatctgaggctgtgatgggacttggagaccccagaagcacaatgctagcctatgatgcctccagcatccagtatcggaaagctgggttgcccaggcatagttttggccgaaatgctctggaacgacatgtggcgcaaaagaaaagtcgcctgaggagacgcgcctcccaactgaaaatcaccatccctgacttgactgatgtgaatgccatagatcggtggtcccgcatattcttcccagtggttttttccttcttcaacatcgtctattggctttantatgtgaactaaaacatggcctcccactggaagcaaggactagattcctcctcaaaccagttgtacagcctgatgtaggacttggaaaacacatcaatccaggacaaaagtgacgctaaaataccttagttgctggcctatcctgtggtccatttcataccatttgggttgcttctgctaagtaatgaatacactaaggtccttgtggttttccagttaaaacgcaagta

SEQ ID NO: 52794 - DNA, 787 bp, Homo sapiens
cctcagaattctaccagtgcacctcattcagacattcatcaagaaaaaggccagctgaaggcagacagccaacaaaactcagtcgttagccacagccctggctgtcctcgtccatcaagcctgcccattgtgagcttccattcatcttacctgtctgttatggaagagtgaagtggaaaaggcatggaggactcagaagacctgctaccgagaagagccccattgcaatcagaagattatttatggaaaaaagcaaaatggagatatttaaaagactgagagagacagcagaaagctgcttaagaaattgctttgagtccacaggagggaagcacaaaggagatgggataatagtgttatacactacatgatatcacagagctggcagagttaatgagtatcttggacaattgcaccaaatgcaatggattgggatcactaaatcaagacgtaatttgatagaaataaaggtaaggccactttattccagataccaactgcaaaagagacaagataatagagaaagtttgggctttagcagcactaatgattgaaaaagtcacagggctttagttagtatcagtcaactttatgaatcagctacccagaaaggctaatatgattttaggatgcactactataaatgaagtaactagaatgacaagaaaattgacctttattttatgccaatcattccacatcaaatgtgcctcaggttaggtgccaaactctaggaggctattcataaattaacctatattcggagaaaccaacaagtctgaaaaag

SEQ ID NO: 52795 - DNA, 366 bp, Homo sapiens
tcatctctgtacccttatgtctatcatgttgtaggttctgcataaatggattttgaagtgattaaaaccaccattattcctggctcaatcagctggttgaagaagcagctctcctatttcacctttcctctctcttccagccccattgcaatcagaagattatttatggaaaaaagcaaaatggagatatttaaaagactgagagagacagcagaaagctgcttaagaaattgctttgagtccacaggagggaagcacaaaggagatgggataatagtgttatacactacatggtaagtgtaataaactccaagctgggaggacagcaagggcactctgtgtgggttaattggtgccctgcctacg

SEQ ID NO: 52796 - DNA, 979 bp, Homo sapiens
cctcagaattctaccagtgcacctcattcagacattcatcaagaaaaaggccagctgaaggcagacagccaacaaaactcagtcgttagccacagccctggctgtcctcgtccatcaagcctgcccattgtgagcttccattcatcttacctgtctgttatggaagagtgaagtggaaaaggcatggaggactcagaagacctgctaccgagaagagccccattgcaatcagaagattatttatggaaaaaagcaaaatggagatatttaaaagactgagagagacagcagaaagctgcttaagaaattgctttgagtccacaggagggaagcacaaaggagatgggataatagtgttatacactacatgatatcacagagctggcagagttaatgagtatcttggacaattgcaccaaatgcaatggattgggatcactaaatcaagacgtaatttgatagaaataaagtgacctcttcctgatgtatctccaaggctcccttgctaccaacttcgcactaggtttggctgatggagataagaagaaagaatatatggatagtacatcttctaagcatttgtatctcttgaagtatgaagttcttgcctccatttctgacaggcaatttggctggaattatttgaaataatccctgtttgattatctgctggcattttagtgggagagatggggtctctctcttccccaggccggagtgctagagtgcactggcatgattacagctcactgcagcctcgacctcctgggctcaattgatcctctagcctcagcctctggtcctaggaaaactaacacagcaggcttatgctgatggagcagatgcaagcctgtgagccagcacggatttcccaggaacgttgctgttcgctaggccacgtgctggcctcacagctggtgatgagaaggcgaagacagagtcagcttaaccaaggcactgtgggctctgtgaaagcctt

SEQ ID NO: 52797 - DNA, 459 bp, Homo sapiens
ctggctattttaagtactcacttattcctgtgggacttgaaccaaggtcatttgctttggccagcttagtagcccagagacttgctttcagaatggatgttcttgtattggattactgagtctgatccctcttttatttttctcctccaaaagtacaaaacaaagaggagctcatgatacaattgatactgagaatcatggcatagatttgtatccgtgactgctgccttaaaaaaccatcccaaaacagtggctttaagcaacagctacttctatacttcctgtaagtctatggattgcctgggtaattctgctaatacggacaggcttgattcatcttgactggtgtccctcatacattgtgcactggggcctggctcatcttagatgtcctcagctgcaatgactcacctctctcaccctccttagcaggctaactccagaatatttccatagtgg

SEQ ID NO: 52798 - DNA, 475 bp, Homo sapiens
ggacaatagcttgtgtagaaatattctaaaaataaaaagatttagaagaggaaggctctgactgtaaaaaaattttagggatatcttaaccaatttatttttcttcacctattttcctttttatatattcacaaaaatatgtaaaatttatatttaattaaatctaaaagagttctttcaataagcataagacaaaaatcctgaacgataagagagatttgtgttaccacataattattatttttctttgtttcttagggagtgcctaaaacaatggtgccttcgaggtgatgaaataccatccttgtttagggtcttgattttcagcgacagggaagccggctctgcctcattcacagctgtatcccctgcggctgacacagagctgggacagagcagccattcaataaacatctgatgaagtgacttaaggtagcgcctctgccaggcaaagggccacaccaaatggctaaca

SEQ ID NO: 52799 - DNA, 604 bp, Homo sapiens
tgggtgcctagaggacccgaacattgtgtctcagtgatgctgtgcaaagtaacctgtggcctaagtcaagtcagaaaatgcttttgactctatatttctcaaaaatgtaagtcttaaaatttggctatggatgggaaaatattacataattgaaaggataaatataagtatgccaatcagccaaaaacactgcaaatgtttaatgcagatttaagttttccctcaaaaactgttaataaattaatagtgcagcttacaaatgatgaaaagagctgagacgtttaaaaaaactttccaagtgtcaggtcctggtactttacatttattctacctcctaatccttatactaggtcaaagctcattttatgtcttcaagattcagatgtaacactgggaatgagaaaggttaatataagtgatatgtccaggactatacttctagtaattatagctcactgatggagagaacattaaaatctgtttggccttcacttaaaaacaaataatatttgtgttatagaagcaagacctttttagtcacaagttaataattttaaagaaaagattcaacatgtaaatttatctggaaaggccaggggtgagg

SEQ ID NO: 52800 - DNA, 328 bp, Homo sapiens
  misc_feature (311)..(311): n is a, c, g, or t
aacttccagaagtgggcagctgtggtggtgccttctggagaggaacagagatacatgtgccatgtgcagcatgaggggttgcccaagcccctcaccctgagatggaagcagtcttctcagcccaccatccccatcgtggggtatcgttgctggcctggttctccttggagctgtagtcactggagctgtggtttctgctgtgatgtgcaggaagaagaactcagatagagtgagctactctgaagctgcaagtaagtatgaagtgggcagggttctgatgtgtctctcacggcttgtaaagtgtgagacanctgccttctgtgggact

SEQ ID NO: 52801 - DNA, 229 bp, Homo sapiens
ggaaaataaaaagacaaaactaacataaaaatttcaggagcttctttgtaaaatgaatagaaattcttcaataggcctctggggctgagatgtgaggaggaggaggaagaaaatgagagtgggaaggacgcactggaggactgttactatctgaatcctatcgcctacaaaacatcaactgatcaatcaggcacaagaaagtgttctgcttctttctgtcaccttagaa

SEQ ID NO: 52802 - DNA, 1132 bp, Homo sapiens
gttcaagaaataggcaggaggaaacacgatggattgggtgggagtagggaaacagatgagaagaggtatcaggaaagctgcctaggtttctggtctgtgccactgtgtggatgatgagagaatgtgtcagtggtggaggccaaggtctgaaagtggagtggggaagagtgagagagaaaattgtaagtttacctttatgttcagctgaggtcattttgaaacatacaagcagcagtatgaagaattccattgatatatttgtccggagcccagagtgaggtttaaataagaagaaataaactcgctagtaaaaattgcagacacacaaaaggcttgaacaggcacttcacaaaatagattatccaaatgaccaataaatacataagtactcaacatcattagccattagaaaaatgcaagttaaaaccacaatgagataccatttcacactagaatgaataaaatattaaaagactgacaatgctaaatattcccaggatgcagaacaaccaaaaccctcatatattatgggggacatggaaaattgtacaactcctttggaaaacaggtagtttctacagaatttcaatatatacataccatacaactcagccattgcattcctatttaccccacagatataaaatcatttgtctactgaaaaatttgcaaaataatgttcattgcggctgtagccattataaccctcaaacggaaacaacccaatgtgcatggattgtgaatagatgacaaatggtggtccatctatacaatggaatattgctcttcaacagaaacaaactacaggtccatgtaacaacatgatgattgaaagaagtcagatgtaaaaaagtacatatgtatgatgcaatttatacgaaactctaggcaaaactaatccttagtgatgaaatcagatctgaggttgcctggggcagagatgggggtagctgactgcaaggaggtgtggggagggttgtgaattttggggagtgatggagctgctctgtatctcaattgtgatgtggttacacaactgtatgcatttgtcaaaactcacagaactacactctaaaacatataaattttactgcatgtaaatcttaccttaattaaaaattaaaaaaattga

SEQ ID NO: 52803 - DNA, 278 bp, Homo sapiens
atgcaatcccactacatagctgtgggactttcggcaagtttcttagatcttttcagtcactgtttcatcatctttaaaacgaaaatgataccaaccaactttaaggctactatgaggaataaaagagattgcatacttaatgattcagcacagtacttggcacattgctctcatttttagatcattcataccacatccaacttccctgcacccattcctcagcttctaactcaccccctcaccataatttgaagtactactgagaagttaacacccga

SEQ ID NO: 52804 - DNA, 599 bp, Homo sapiens
agaagatgtaagaacttaaagtttagattacttacaagacaaagagacatatgcatctcaatagtccctaataggctttaaatataataaactgatgctgctgttgatggtcctgagttatgactgaaatgttaatattcattcaatctattccatttgactggctaggaactaataattttaggtagacttctaatgaaatggataaaatagaataaaatttgatgcctcaaataacagctaacatttactgggggcttatcatgtattaggaactattctgaaagttcaacacatgcttagaggaggttagcttcaattatctgaaaaaattcaattataagaaacatttcaatccgcaaaggcactgggtaaggcatcattgtgttattacagttttctgcatccagtcaaggcttgtacttacctatagggacaaagggggagtctctagatttcctgattagtcgggataattggccttcatcctcatctgctgaccactggttatctgaagacatttttttctctagtaacaataggatataaatgtggttgccgtgaatcattaaaaataatttgtttttcctctcccatca

SEQ ID NO: 52805 - DNA, 261 bp, Homo sapiens
gtccttttatcagggcttctgagatgttcattaagattgtcaattgaatttggcaacacggtggttattggttttggtcattggtcttcctgtccatagttctggaagtgggaggtgggaaccggatgtgaggaaatgaaactaatgagtgcaaattagaaaaaaagtgccccatttccatctgccccaaaactaaacttaatcgatgaaaaatggtgtcttgtgtttttttcatttattgattactagtatgtttgaaca

SEQ ID NO: 52806 - DNA, 340 bp, Homo sapiens
tataaaacgaagcacataatagcaactaacttaaagggtgattctgatgttaaatgaggtagtgcatggtgagaaaccccattcagtgcatggtaagcactcaatgagtgttggctattactgaccttgaggagttcagaaatctttcccttgtaaaggagcttaatccattgcgtccttactgctcatccatttacgttcctggtcagtgatgtgttgaaggaatgattttttaatagaggcttcaaattttctttgcttataactgcagaaagtttagaaaaacaatgaattacctctgtgaaaatacaccttatttctgcatgccaccaagacctgc

SEQ ID NO: 52807 - DNA, 851 bp, Homo sapiens
catcctggagaagatatactgtgttcactattgaaatgaaaccataaagctagagttaggaagattgaagaaatgaaaaaggagctcacatgattttgtctcaggagaggctcttccaggattctttggagatatggtagattccatagctggagcagggaaaggacaggatgagcctgtgggtgtagaaaggaagggagtgcttgaaagatgatgaggagatgtcagcaggtcacagaaaccctctgaaggaggctccaactggccaggctggggacaatttgggccccaaaataatgacagtaacaaattgtaactcattgaatgaaataggaatccatacattggtaattatataaataagggaataaaaccatgatgcaaaaagggatgtttatgtcatcacgcaaaatatgttcacagaaaatatgtactaattaaaagagggaaaagagtaactttacagtggatgaagcctggcaatcatcactttaagcaagtggtcagagttaatattatcagtaatggtcaaatcaaaaccatatgcaagaagactctaaaatgcaagaagactcctgaagtacttcttaccaaagatgtagaacttaaattcagtcataacaatacatgagacaaacccaagttagagcacagtctgcaaaataactggcctgtaatcttcaaatgcatcaagatcatgaaagacaaggaaagagtgaagagctgctccagttggaagagacttaaaactaaatgcaatgtatgatcctagattggatctttttgctctaaggacattaatgggccagttagtgatatttgaaggggatccgagggttccattgtagtaa

SEQ ID NO: 52808 - DNA, 255 bp, Homo sapiens
tggacaggaggtttgctagggagtggtcttgggatcaccacctctggaaggggaaaggaagaaggatggggcaggaagagaagttggctgatgcattagtcagggttcactagagggaaagaactaataggatagatgtatatatgaaggggagtttattaggaagaatcaactcacaagatcacaaggtgaagtcccacaataggctgtctgcaagctaaggagcaaggaagccagtctgagttccaaaacctc

SEQ ID NO: 52809 - DNA, 754 bp, Homo sapiens
aaagcaggagcaggcacttcacatggtgaaagcaggaacaagagagagagagtatgttggggtaggtgcactaccatggagacagcaccaagtcacgaaggattcgacctcatgatccaaacacttcccaccaagctccaccttcagcactggggatctggtttcaacatgagatttgggcgggacatccaaactatatcagctgtctccctcatccaagaccatgtgatccgtagctcacttttgtctagcaacagattaaatacagcattttctgtgtgatatctttgttgaggtctttgcagatggctgtttctttgtcctgaaactttcttcatctgctctttcaaaatgagtgactcttcatcctcgaagtctatgcttatatattgcttttcagaggaatcttttctgaactgggcattctgccttcaaccaactattttctattatagtttcctgtttgtgagttaatagtccttttgaaaatttgactactcatttaccttcttgggttatttgaaattatctcctcttcactagattctatagaagcatagccatgcctgccctctttactgtttctctactgacttgttgcaatgaatattgtcagtaaacatggaaataaatcagttattcagatatcctaccttggtgcttgcttagataactccacactgtgatgcctaatgacctacacagggctttctagcaaggagtgactttctttctgctacgtgtaataatgatc

SEQ ID NO: 52810 - DNA, 234 bp, Homo sapiens
aaaaaaggtattttttctaaaaataggtattgttataaataagcacttacttagctttagtttagttttgttttgtttttgttttttttgagacggagtctctgttgcccaggctggagtgcggtggcgctttctgggctcactgcaacctccgcctcctgggttcaagcatttctgcttcagcctcccaagtagctgggattacaggcgcccgccaccaaattttttattaaa

SEQ ID NO: 52811 - DNA, 319 bp, Homo sapiens
cttttccaggccaagctcctcccgtgtgtgctatcttcaggggtatccataaacatgcttaagaaaccaaaaattacattatttgtcatgagttttaaaaagataattacacctggccgggcatggtggctcacacctgtaatcccagcactttgggaggctgagatgggtggatcacgaggtctggagatcgagaccatcctggctgacgtggtgaaaccccgtctctactaaaaatacaaaaaaattagccgggcgtggtggggggcgcctgtagtcccagttactccggaggctgaggcaggagaatggcgtgaac

SEQ ID NO: 52812 - DNA, 242 bp, Homo sapiens
gagaagttacagctaattgtttacttgagaggtcaaccaatcatttcagcagtgtagttgtaactaagttaaatagctgctaaatagctactggctattcagttagaaagggggtgaggatgacaggctgtgcagaacctgaacagggttaaagctacaatgagaagccataattttgtgagttttgctgagaccaattctccatcctgtcataattagagaacccgatgctgattattttt

SEQ ID NO: 52813 - DNA, 281 bp, Homo sapiens
catgtggcttcctcatcgttatgtgatttccttggggaggggctggctccattccaggcttactgaagagtaacaacactgggcttagccctgtctcaaaaccttaacctgactgggtcacatcccagagatgtcccccgctgccctgaggtcaaagaatgcaaggcctgctttatctctgccagctgcctttcctgtgctggtccccacgaggttttcttgacttttcctctaatttaccagcttactactctgtatcttttgaggaactttgatgccct

SEQ ID NO: 52814 - DNA, 164 bp, Homo sapiens
atcttcacatcatgacgacttggacacttttattgaaatatcaaattctctttttaaaaaaattcccgattcccctctctccctttcgcccacccccctgagcccatgtttagaaggtttagtagaaaaataaatcatggaaacaaagagaatctttacataat

SEQ ID NO: 52815 - DNA, 2691 bp, Homo sapiens
taggcggagcgggctgagcagcccgggcgcgatgcgttgagcgctcggagggccaaccgccggtccccttggcggcaaccggcggcacccatggaaccactgggcaactggaggagcctgcgggcgccactgcctccgatgctgttgctgctgctcctgcaggtggcggggcccgtgggcgccctggcggagaccttgctgaacgcgccgagggccatgggcaccagttccagcccgcctagccctgcgagcgtggtggctcccggaacgacgctgttcgaggagagccggctgcctgtgtttacgctggattacccccacgtgcagatccccttcgagatcaccctttggatcctgctggcctccctggccaagattggcttccatctgtatcacaagttgcccacaatagtgcctgagagctgccttcttataatggttggacttctactaggtgggattatttttggtgttgatgagaagtctccccctgcaatgaagactgatgtatttttcttgtacctcctcccacccatcgtgctggatgccggctatttcatgcccactcgcccattctttgagaacattggcacgattttctggtatgctgtggtagggacactttggaattccattggcattggggtgtctttgtttggtatctgccagatcgaagcattcggcctcagcgacatcactttgctccagaacctgctctttggcagcttaatctcagctgtcgatcctgtggctgtgcttgctgtctttgagaacattcacgtcaatgagcagctctacatcctggtctttggagagtccctgctgaatgatgcagtaacagtggtcctgtacaacttgttcaagtcgttttgccagatgaaaaccattgagaccattgatgtgtttgcaggaatcgccaacttctttgttgtgggaatcggtggggtgctgattggcatcttcttgggctttatagcggcatttactactcgattcacccataatatccgagtgatcgagccactgtttgttttcctgtacagttatttgtcctacatcacagctgaaatgtttcacctctcaggcatcatggcaatcactgcttgtgcaatgactatgaataagtacgtagaagaaaatgtatctcagaaatcctacacgaccatcaagtacttcatgaagatgctgagcagtgtcagcgaaaccttgatcttcatcttcatgggtgtgtctaccgtgggcaagaaccacgagtggaactgggccttcgtctgcttcaccctggccttctgcctcatgtggcgagccctgggtgtttttgtcctgactcaggtcattaataggttccggaccattcccctgacctttaaggaccagttcatcattgcctatggaggacttcgaggtgccatctgttttgcgttagtgtttctccttcctgctgctgtgtttcctcggaaaaaattgtttattacggctgccattgttgtcatattctttactgtcttcattctgggaataactattcgaccactggtggagtttcttgatgtcaagaggtccaataagaaacaacaagctgtcagtgaagaaatctattgtcggttgtttgatcatgtgaagactggaattgaagatgtttgtggacattggggtcacaacttttggagagacaagtttaagaagtttgatgataaatatctgcggaagcttttgattcgggaaaaccaaccaaagtcaagtattgtatctttatataaaaagcttgaaataaaacatgccattgagatggcagagactgggatgataagtactgtccctacatttgcatctctaaatgattgtcgtgaagaaaaaataaggaaggtcacgtccagtgaaactgatgaaattcgagaactcttatcaagaaatctctatcaaatccgtcagcgaactttatcctacaacagacacagtctgacagccgacacaagtgagagacaagccaaggagattctgattcgccggcgacacagtttgcgagaaagcattaggaaggacagcagcttgaatcgagaacacagggcttccacttcaacctcccgatatttatccttacctaaaaatacgaagcttccagaaaagctacaaaagaggaggactatttctattgcagatggcaatagcagcgactcagacgcagatgccgggaccaccgtgctcaatttgcagcccagagccaggcgcttcttgccagaacagttctccaagaaatccccccagtcctataaaatggaatggaagaatgaggtagatgttgattctggccgagatatgcccagcacccccccaacaccccacagcagagaaaagggcacccagacgtcaggcttactacagcagccccttctctctaaagaccagtctggctcagagagggaagacagtttgactgaaggcatcccgcccaagccgccaccacggctggtctggagggcatcggaacctggaagccggaaagcccgatttgggagtgagaagccttaagagaagcagcgaaagcagatctgagtgtctgacccaggacagctgtggtttgtcactctgaaacctgatgcaacagtggaatccatgtaaaactctctgtgcatctaaatacttctggagggcgacagattcatgccacggataaatgaggcaaatccgaag

SEQ ID NO: 52816 - DNA, 2410 bp, Homo sapiens
tgaaacaggacccactggttctatcaaagggaaccaatttcctgtctcccaaattcctccataacccaagttgtgtgtttttattttttccttaccaggcttccatctgtatcacaagttgcccacaatagtgcctgagagctgccttcttataatggttggacttctactaggtgggattatttttggtgttgatgagaagtctccccctgcaatgaagactgatgtatttttcttgtacctcctcccacccatcgtgctggatgccggctatttcatgcccactcgcccattctttgagaacattggcacgattttctggtatgctgtggtagggacactttggaattccattggcattggggtgtctttgtttggtatctgccagatcgaagcattcggcctcagcgacatcactttgctccagaacctgctctttggcagcttaatctcagctgtcgatcctgtggctgtgcttgctgtctttgagaacattcacgtcaatgagcagctctacatcctggtctttggagagtccctgctgaatgatgcagtaacagtggtcctgtacaacttgttcaagtcgttttgccagatgaaaaccattgagaccattgatgtgtttgcaggaatcgccaacttctttgttgtgggaatcggtggggtgctgattggcatcttcttgggctttatagcggcatttactactcgattcacccataatatccgagtgatcgagccactgtttgttttcctgtacagttatttgtcctacatcacagctgaaatgtttcacctctcaggcatcatggcaatcactgcttgtgcaatgactatgaataagtacgtagaagaaaatgtatctcagaaatcctacacgaccatcaagtacttcatgaagatgctgagcagtgtcagcgaaaccttgatcttcatcttcatgggtgtgtctaccgtgggcaagaaccacgagtggaactgggccttcgtctgcttcaccctggccttctgcctcatgtggcgagccctgggtgtttttgtcctgactcaggtcattaataggttccggaccattcccctgacctttaaggaccagttcatcattgcctatggaggacttcgaggtgccatctgttttgcgttagtgtttctccttcctgctgctgtgtttcctcggaaaaaattgtttattacggctgccattgttgtcatattctttactgtcttcattctgggaataactattcgaccactggtggagtttcttgatgtcaagaggtccaataagaaacaacaagctgtcagtgaagaaatctattgtcggttgtttgatcatgtgaagactggaattgaagatgtttgtggacattggggtcacaacttttggagagacaagtttaagaagtttgatgataaatatctgcggaagcttttgattcgggaaaaccaaccaaagtcaagtattgtatctttatataaaaagcttgaaataaaacatgccattgagatggcagagactgggatgataagtactgtccctacatttgcatctctaaatgattgtcgtgaagaaaaaataaggaaggtcacgtccagtgaaactgatgaaattcgagaactcttatcaagaaatctctatcaaatccgtcagcgaactttatcctacaacagacacagtctgacagccgacacaagtgagagacaagccaaggagattctgattcgccggcgacacagtttgcgagaaagcattaggaaggacagcagcttgaatcgagaacacagggcttccacttcaacctcccgatatttatccttacctaaaaatacgaagcttccagaaaagctacaaaagaggaggactatttctattgcagatggcaatagcagcgactcagacgcagatgccgggaccaccgtgctcaatttgcagcccagagccaggcgcttcttgccagaacagttctccaagaaatccccccagtcctataaaatggaatggaagaatgaggtagatgttgattctggccgagatatgcccagcacccccccaacaccccacagcagagaaaagggcacccagacgtcaggcttactacagcagccccttctctctaaagaccagtctggctcagagagggaagacagtttgactgaaggcatcccgcccaagccgccaccacggctggtctggagggcatcggaacctggaagccggaaagcccgatttgggagtgagaagccttaagagaagcagcgaaagcagatctgagtgtctgacccaggacagctgtggtttgtcactctgaaacctgatgcaacagtggaatccatgtaaaactctctgtgcatctaaatacttctggagggcgacagattcatgccacggataaatgaggcaaatccgaag

SEQ ID NO: 52817 - DNA, 278 bp, Homo sapiens
cctgacctcatgatccaccctcctcggcctcccaaagtgctgggattacaggcgtgagccaccgcgcccggccgaaaccttatttattagcagttactgcctgtccccttttttcccccagcccctgccaaccaataatcaatctttatgaacagatttgcctgttctggagacttcacgtgactggaatcatactgtgtgctcttcgtgacaggcttctttcatttagcgtggtatcttaaacattcatccatgttgtagcctgtgtcagtatttca

SEQ ID NO: 52818 - DNA, 1058 bp, Homo sapiens
ccacaccctaccttctaagtcaccaggccatcaagtccagacaaagggatcgaaagagtgagacagtgccagccacctcccacccaagccactagcaagactccacaatgtcagagcaacaaatggacctgaaggatttaatgcccacaaagaggaaatacatgtggaagactgctgaagataggcgcatgtctgacctcacctgtgtgctggagtggctggagcggaggcaggggaagaagaaacaagctcccgagaagcaaaagcccaaagtggtgacagtccttaaacgaaataagaagaaggaagagaagaaaggcaaaggcctcatgacagcacggggagggaaccgcagggacacggagacttcccagcaggccttaggaaagagattcaggaaggacgccgcctcctaccgaagcctctatggagtggagcaaaaggggaaacacctcagcatggtccctggcagctacatcaaggatggccccaagaaatctgatacagacatcaaggatgcagtcgacccagagtccactcagcggccaaacccattccgtcgacaaagcattgtcttagatcccatgttacaggagggtacctttaacagccagagggcaaccttcataagagactggtccaacaagatgcctgacatggcttacgaacgcaagctaaagagcctcatggagaaaagcaccgaacctaagatggaaaccatgaggatgttgaagccagaggaggtgctgagctgccgatacctgaggttatccaaggagaacattcggaccttgctcaagttgtgcaaggatgcaggaatgaatgtggatatccacccccacatggtcgaagaggacatagatgctaaaaaggtgttcaccggaatacccagcatggccctctaaatagctcctctcgccaccaccttcaggctccttctgtcatgggacccttcacctccagatgccatcctctggcacactacaagtggtccttccaacttagtgcatccctttagaaagtaagcaatcagaaaacaagcctcggctgtgtgatca

SEQ ID NO: 52819 - DNA, 236 bp, Homo sapiens
  misc_feature (52)..(52): n is a, c, g, or t
  misc_feature (66)..(66): n is a, c, g, or t
gaaacgagaacttacgaaactctgctgatttttgcctattgtataacttggnatattaaacgtttnaatgaaagcctgcaacaagacaatgcactaatccccccccaaaaggtttgttctgccctcctgcatccactttgtgtttctccttgagcaaagtcgacacatttactcatttaacaaatcctacagggcctcttacagtttcagaactgttttacccatactgtcataat

SEQ ID NO: 52820 - DNA, 1820 bp, Homo sapiens
tgggggtgtccaagagaggggtcttattcgaggaactcacataccccaaataaccatcagtgcacaaatcattccatgctctttggcaccaggcaggagatgctgcaggcaggtgtccgtagttggcaaaaatgggcagtaggggaaatggagttgcttcaacctttctcagtcccggccctcactgcacccaccaagtcaagcagagctgggtgggctgagaccagcatcccagctggactgagcctggggggaggggctggagccaaggagcccccctgggtgggggcatcaggagcaggggcagggcctgaggactgctccccctgcatggagggcaggccaggatggagcccagggtagactttgaggaaggctcagtgggctcagcagaaggaaggctcttctcatagttgtggtttttcacagatggatttgggtgatctgagtgtggtcaggccctgccgttggggaatgaatgccacacggggtttgtctgtaagctgcagtgtctgtgattctgtgtgaactgacagcagggagctgaaggacaggccccggccttgggagaggacacgggcatgggctgctggatgcagggctcccagggctgtgaaggcagaggggtctctggaggcagacagggtgggctgggggccagcagcagggggcagagccccagccagggcagctgcttcctgcacatagacattcctcctgcgcagggccaagtgcccatgagcacagccccagacagacacggtggggagcttggagccctccgctcacctagaggagccctgggacacgcactggaaagtattctaggggcttcctgccttatccttctgtttgttcatacacttagtgaaagcagatcctgtactaggatgtgaggatatctgtcacctgcgtggtccattccataaacaccagattccatttcagttgccacacattttggggctagacttccctaaacaacatgccattgtgaaataatgcatatatttgtatttttaaatttccctgaaaatttaatctattctgttccatatgaagtctgtttcactaccttaaaaaatagatactccactagaggctgtgcttaattcaaatccatgtgtgtgcctgcattacatgtgtgaacacgtgtttctgtcgtgtgtgtcatgcacatctgtgtgttgcatagcataagccaaatgaaaatcatttgttcatgggattcatatgaggaacaaaattaaatttgaatacagtcagataactgccacgcagggcatttggggaaccatccccgaatgccctgatgtgatttccctcagaaaatccttgttattagaggagaaggtctgggcaggggcagcagcatctcagacatcaagtcaactttatcatctactacatcagcactgaagtccagggcattgaggcactaactaggttccattttcttggttggttacttattttttcttttgggttctcggtgtgcagaggctgtagagagagcctcagggcggtgaccgctgcaggaattcggcctccagctcccctccagttaccaggagccgatttggaggccaggccttcccagctgagtgtctgtcagttcattctctctcagctgtgcagtggaagagcaacaacagacaggtgaacttcttgggtgtgcttcacgatggactgcgaaaacacctctctggaatccggaaatcaggccgggcaggggtcaagcctgtaaaccaggaactgggaggggaggggggaccctcgagtcagagcccaaacagcctgtcacatgtgaacccgctcct

SEQ ID NO: 52821 - DNA, 2400 bp, Homo sapiens
ctgagtgggtggacgtggtcgtggatgacctgctgcccatcaaggacgggaagctagtgttcgtgcactctgccgaaggcaacgagttctggagcgccctgcttgagaaggcctatgccaagtgagtagcggctgagggggcaactccagcttccagctccccctaggggtgggggctcatgactgtcttctcagagggtcctgcttgatgccagagtgctgacctggagctgcccacagggtaaatggcagctacgaggccctgtcagggggcagcacctcagagggctttgaggacttcacaggcggggttaccgagtggtacgagttgcgcaaggctcccagtgacctctaccagatcatcctcaaggcgctggggcggggctccctgctgggctgctccatagacatctccagcgttctagacatggaggccatcactttcaagaagttggtgaagggccatgcctactctgtgaccggggccaagcaggtactgccctgggtggggccttccctgaagggcggttcctgccccctggcctgtccttgcctctctggcacctgaccagggctgtggaaggtgctggctcctcctttcccctcctgcagcaccttatctctcttctggggacacccatctgagatgcctatcatgtcctgccctgactgactgtagttcatgtgtgcagctgcctgcctgggctgtgaattccaagaggacaggcttcatctgggtgctgagcagggcttggagaggatgagggtatgggaggcggagtgttaaagtgcgtgcatgggccaggtgcactggctcacacctgtaatcccaacactttgggaggctgaggtgggcagatcacctgaggtcaggctgtctcgaattcccgacctcaggtgatccactggcctcggcctcccaaagtgctgggattacaggcgtgagccaccgcgcctggccaaaacctgtgatttagagagctctggtgactgcgatgctggattagaaggaggagctaaggactagaggttgtagagtaattagtggaagatgatgagggcctgacctaggctggtacagtggtaataaaaaaaagaaatggatgtcactgcacgatagaatagacaggacttggtgaccagcggagtgtgtgggaaggttgagggtgaggagaccggaagagtctctgcagagtctctcgaggatgcacaggtggatggtggtgccttccgctgagataggacatctgggaggatgagcagagccgatttggggtggaaggcaatgattttaggcttgaagtaccgagtcgcgggtgcctggagtatatccagagggcagaaagcaagttacatcaaaggggtaacgaaggtgaatgcttcccgaggccgggtaggtgatgtcaacaggtcagactgaagcagacagatgatcattttacctgtgagtcaggtcaggctcctttctgaaacgcccggatggcttcccattgcacttacgtcaattccgcatttctttccatggcctgcaaggtctgatttgaattggccctgcttttttttcccacctcatttactacacatttttctctctgactgtgttccagccacagtgatcttagtgattttcaagcatatcaaatttgttcctgtgtcagagcccccttctccctggccaagccctcgccaccagatgttctcccactggttcctcatcaggtagctcgtagcttgcctggtatctcaaggaagccttcctgcctataccgccgcatctgaagaggttactgtgtccaccctgtcttgggtttttttccatagcacttgtcactacctgaaatacttatgtgctatctccctccttccattcattccatgaggccacaagtgtgttttgctcatcagtatctctcattgcctagcgtagtgttgggcatgttccacagcatggagagccagtgcttctgggcattgcagtaggtaccagtgagaaaaaaggggaaaatctgcatattgagtatttattaaaaaaaaaaaaaaaaaggagccaaatgaggaagacaggaggaagttaaatgagagaggagaccagctatgatcatgacagggaagtcagtggtaaggtatcgcagagtggttgtcagagggtcatcgatttggccctgcttggggtaattgaagtgtgctagcgaatctaattagtccttgcggtcgttgctgtggggtcagcgagatggaagggtcacagaacactgacttcaaaggagcaaatccagagggcctgtgtgagaggagtctgattgggaggctcgttcctttcactccaaattacttatcctttcaatcccttgacttccacaggaagctcttttgaggccggaagctcttttcaggtgttgc

SEQ ID NO: 52822 - DNA, 2342 bp, Homo sapiens
ctgagtgggtggacgtggtcgtggatgacctgctgcccatcaaggacgggaagctagtgttcgtgcactctgccgaaggcaacgagttctggagcgccctgcttgagaaggcctatgccaagtgagtagcggctgagggggcaactccagcttccagctccccctaggggtgggggctcatgactgtcttctcagagggtcctgcttgatgccagagtgctgacctggagctgcccacagggtaaatggcagctacgaggccctgtcagggggcagcacctcagagggctttgaggacttcacaggcggggttaccgagtggtacgagttgcgcaaggctcccagtgacctctaccagatcatcctcaaggcgctggggcggggctccctgctgggctgctccatagacatctccagcgttctagacatggaggccatcactttcaagaagttggtgaagggccatgcctactctgtgaccggggccaagcaggtactgccctgggtggggccttccctgaagggcggttcctgccccctggcctgtccttgcctctctggcacctgaccagggctgtggaaggtgctggctcctcctttcccctcctgcagcaccttatctctcttctggggacacccatctgagatgcctatcatgtcctgccctgactgactgtagttcatgtgtgcagctgcctgcctgggctgtgaattccaagaggacaggcttcatctgggtgctgagcagggcttggagaggatgagggtatgggaggcggagtgttaaagtgcgtgcatgggccaggtgcactggctcacacctgtaatcccaacactttgggaggctgaggtgggcagatcacctgaggtcaggctgtctcgaattcccgacctcaggtgatccactggcctcggcctcccaaagtgctgggattacaggcgtgagccaccgcgcctggccaaaacctgtgatttagagagctctggtgactgcgatgctggattagaaggaggagctaaggactagaggttgtagagtaattagtggaagatgatgagggcctgacctaggctggtacagtggtaataaaaaaaagaaatggatgtcactgcacgatagaatagacaggacttggtgaccagcggagtgtgtgggaaggttgagggtgaggagaccggaagagtctctgcagagtctctcgaggatgcacaggtggatggtggtgccttccgctgagataggacatctgggaggatgagcagagccgatttggggtggaaggcaatgattttaggcttgaagtaccgagtcgcgggtgcctggagtatatccagagggcagaaagcaagttacatcaaaggggtaacgaaggtgaatgcttcccgaggccgggtaggtgatgtcaacaggtcagactgaagcagacagatgatcattttacctgtgagtcaggtcaggctcctttctgaaacgcccggatggcttcccattgcacttacgtcaattccgcatttctttccatggcctgcaaggtctgatttgaattggccctgcttttttttcccacctcatttactacacatttttctctctgactgtgttccagccacagtgatcttagtgattttcaagcatatcaaatttgttcctgtgtcagagcccccttctccctggccaagccctcgccaccagatgttctcccactggttcctcatcaggtagctcgtagcttgcctggtatctcaaggaagccttcctgcctataccgccgcatctgaagaggttactgtgtccaccctgtcttgggtttttttccatagcacttgtcactacctgaaatacttatgtgctatctccctccttccattcattccatgaggccacaagtgtgttttgctcatcagtatctctcattgcctagcgtagtgttgggcatgttccacagcatggagagccagtgcttctgggcattgcagtaggtaccagtgagaaaaaaggggaaaatctgcatattgagtatttattaaaaaaaaatatgatcatgacagggaagtcagtggtaaggtatcgcagagtggttgtcagagggtcatcgatttggccctgcttggggtaattgaagtgtgctagcgaatctaattagtccttgcggtcgttgctgtggggtcagcgagatggaagggtcacagaacactgacttcaaaggagcaaatccagagggcctgtgtgagaggagtctgattgggaggctcgttcctttcactccaaattacttatcctttcaatcccttgacttccacaggaagctcttttgaggccggaagctcttttcaggtgttgc

SEQ ID NO: 52823 - DNA, 379 bp, Homo sapiens
taacaaatgcctaaataactaatggatcacagaaaaaaaatcacaagggaaattagttaagtttcgaaatgaattaaaatgaaacacaatataccaaacttatgaaatgcagcaaaagcaattctcagagagaaatttatggctataaacaccaatactgtattacaaaaagaagaaagacttcaattaataatctaaacttccaccttaagtaacttgaaaaagaagaaccaactaaacccaaagcaatagaaaaaaaggaaataacaaacaaataaataaaacagagaatagaaaaacaatacagaaaaatcaatgaaacaaaaagttagatctttgaaaaggtcagcaaaattgaaaaacctttacctaaactgac

SEQ ID NO: 52824 - DNA, 417 bp, Homo sapiens
ttttccctttttttgggtgattagataacttactgtccaaactgtgacacacgtgagaaaggggacactaatgagataaaacaatgggaaagcagatgcaaactggggtagtaccctgcaaactggcctatggtcaccccactcgtcattggcccagtgaattcatcatcactgtgatctcactacctaacactcagtgcgtgcttcaaaaatcttagctaaaatttattatgtactgtacgatctattgctgtttttactgctctctctaaccttggtcaccacttacacatatagaaactttgtgtcagttacaaaatgtgccctttcttcttgggcagcaaattccagactatatggtgaatggacaccaggctggatttcacaactttcccctcccatgaacatttttgtgta

SEQ ID NO: 52825 - DNA, 152 bp, Homo sapiens
aattagattcagctttggcagttttatgcctagaaatgcaaaagaattttaaaagctcataagtttggcatttttaaaggagacattgtttgctttatgttgcagagccaatttttcttcctatcataaaaggccagaaacacagagaaagc

SEQ ID NO: 52826 - DNA, 316 bp, Homo sapiens
ctttaaagaaatgaaagaaaccctggtgtttctgtacagaggtgaggccagggagggggcagtgaaaagtaaggtcacctaaggcctgagacatcgggttgggtggtttggcctttatcataggagtaatgggaagtcattgaaggtttttaagcctggaggtaatagaatctgatttacattttaaaaagattattctgactgctgtgctcagcatggatgatgggaagacaagagccaaaatagagagaccaaaattttgcaaggatatagatttatctgtaaccatggggaagatgttcaaacattattaagt

SEQ ID NO: 52827 - DNA, 272 bp, Homo sapiens
aatctgcctgcctcggcctcccaaagtgcagggattacaggcgtgcaggtgcctggtcacctgcaatttttcattccattcatggttactcccctttccccagtcccaaattgaagatggtttgatttacaattttttgactttaccgtgggatgaaagccatacaaattcagtagaaattgtaattcaagaacccataggggctgggcgcggtggctcaagcctataatcccaacactttgggaggccaaggtgggcagatcacgaggtca

SEQ ID NO: 52828 - DNA, 195 bp, Homo sapiens
cttctgttattttgttaatttttaacttcacaactgatatatgaatatgttcttataaaagagtcaaacaagtctgtaatcccagatacttgagaggctgaggagggagaattgcttgagcccagaagttcaaggctgcaatgagctacgatcatgccacttcactccagcctgggtgacagagtgagcccctgt

SEQ ID NO: 52829 - DNA, 325 bp, Homo sapiens
aagagtgcaaggctgcagtgagctaccatcgggccaccacagtccagcctgggtgacagaatgagatccatctcttaagaaaacaaaaaacaaaaattacagtctttaggttatgatctacattcttacctgggatctgtttctggatttagggttttgatctatataaatacttcggggtttcatcacttttaaaaactgacctggccgggcatggtggctcacgcctgtaatcctagcactttcggaggccgaggcaggcagatcacctgaggtcaggagttccagaccagcctggtaaacatcgtgaaaccccatctctact

SEQ ID NO: 52830 - DNA, 1502 bp, Homo sapiens
tttttttttaccaagaccaaaacagccatttcaacttttctgcaagaatggtgcttatggcttctacgttaccggaaagcaaacttcaaacaccacacaatacaacagcttataaagaatatttaggcccaggtgttgatactttttcttctgcaaaattgttccagaagctgtactgtctttctagatggtggtatttgctaacatcatatccaactcagggaagtggactgagtgctgggatccaaggcattctacagggttcactgctggtttacacttcacctgtgtcagcaccatcttcaggtgcttagaatggcctgggagcctgttctgtcttgcatcttccatgacatgaaagggaggctggcacttgtcagtcaggtagaggttacaaaccgtttcaggccctgcctaccacattcactgtttgaatctttaattcccaagaataagtttacatttcacaatgaatgacctacaacagctaaattttctggggctgggagtaatactgacaatccatttactgtagctctgcttaatgtactacttaggaaaatgtccctgcttaataatgtaagccaagctaaatgatggttaaagttatcaggcctcccatgaaattgcgttcttcctgcattgaaataaaaacattattgggaaactagagaacacctctatttttaaaaggactttaacgaagtcaaacaacttataagactagtgattcactggggcattattttgttagaggaccttaaaattgtttattttttaaatgtgattcctttatggcattagggtaaagatgaagcaataatttttaaattgtgtatgtgcatatgaagcacagacatgcatgtgtgtgtgtgtctgtgtgtgtgtgtccgtgtatgtgtgtgtgggttctaatggtaatttgcctcagtcatttttttaatatttgcagtacttgatttaggatctgtggtgcagggcaatgtttcaaagtttagtcacagcttaaaaacattcagtgtgactttaatattataaaatgatttcccatgccataatttttctgtctattaaatgggacaagtgtaaagcatgcaaaagttagagatctgttatataacatttgttttgtgatttgaactcctaggaaaaatatgatttcataaatgtaaaatgcacagaaatgcatgcaatacttataagacttaaaaattgtgtttacagatggtttatttgtgcatatttttactactgcttttcctaaatgcatactgtatataattctgtgtatttgataaatatttcttcctacattatatttttagaatatttcagaaatatacatttatgtctttatattgtaataaatatgtacatatctaggtatatgctttctctctgctgtgaaattatttttagaattataaattcacgtcttgtcagatttcatctgtataccttcaaattctctgaaagtaaaaataaaagtttttaaatatttg

SEQ ID NO: 52831 - DNA, 964 bp, Homo sapiens
tggagagggacaggaggaaacgcagcgccagcagcatctcatctaccctccttgacacctccccgtggctccagcaagccctagaggtcagccttgcggaccaacaggaggactcccagctttcccttttcaagaggtaccccagacaccggccaccctcttccagcccctgcggccagtgcaaggaggcaccaatgctctgaggctgtcgcgtggtgcagcgtcgagcatcctcgccgaggtcctttctgctgcctgtcccgcctcaccccgctccatcacaccagctggccctctttgcttccttttcccagaatcgttaagccccgactcccactagcacctcgtaccaacctcgccccaccccatcctcctgccttcccgcgctccggtgtcccccgctgccatgagctcccccatcagcaagagccgctcgcttgccgccttcctgcagcagctgcgcagtccgaggcagcccccgagactggtgacatctacggcgtacacgtcccctcagccgcgagaggtgccagtctgcccgctgacagctggtggcgagactcagaacgcggccgccctgccgggccccaccagctggccactgctgggcagcctgctgcagattctctggaaagggggtctcaagaaacagcacgacaccctggtggagtaccacaagaagtatggcaagattttccgcatgaagttgggttcctttgagtcggtgcacctgggctcgccatgcctgctggaagcgctgtaccgcaccgagagcgcgtacccgcagcggctggagatcaaaccgtggaaggcctatcgcgactaccgcaaagaaggctacgggctgctgatcctgtgagtccaatccgagggacctgggcatgcggccagacctgatgagcctgacggcgcctggaaattgtgaagaggcggagttagagttccctggggttggaagcttctt

SEQ ID NO: 52832 - DNA, 447 bp, Homo sapiens
accagctggccactgctgggcagcctgctgcagattctctggaaagggggtctcaagaaacagcacgacaccctggtaaaccccttttcgcgcccctgactctctcctccctcttccgccctcccagtggcgctccaaaccctccccgacatgcgcgcctcgggcgcatggtgcgcttcggcgtctgggcagggagggtccccggtcccctaggaggaaggaggcgggaggagggaaagcgcttcgggcacggcggaggatgcgcgctgacaccgcgctgtgcccggccggctgcaggtggagtaccacaagaagtatggcaagattttccgcatgaagttgggttcctttgagtcggtgcacctgggctcgccatgcctgctggaagcgctgtaccgcaccgagagcgcgtacccgcagcggctggagatcaaaccgtggaaggcc

SEQ ID NO: 52833 - DNA, 3278 bp, Homo sapiens
  misc_feature (1572)..(1572): n is a, c, g, or t
  misc_feature (1576)..(1576): n is a, c, g, or t
tggagagggacaggaggaaacgcagcgccagcagcatctcatctaccctccttgacacctccccgtggctccagcaagccctagaggtcagccttgcggaccaacaggaggactcccagctttcccttttcaagaggtaccccagacaccggccaccctcttccagcccctgcggccagtgcaaggaggcaccaatgctctgaggctgtcgcgtggtgcagcgtcgagcatcctcgccgaggtcctttctgctgcctgtcccgcctcaccccgctccatcacaccagctggccctctttgcttccttttcccagaatcgttaagccccgactcccactagcacctcgtaccaacctcgccccaccccatcctcctgccttcccgcgctccggtgtcccccgctgccatgagctcccccatcagcaagagccgctcgcttgccgccttcctgcagcagctgcgcagtccgaggcagcccccgagactggtgacatctacggcgtacacgtcccctcagccgcgagaggtgccagtctgcccgctgacagctggtggcgagactcagaacgcggccgccctgccgggccccaccagctggccactgctgggcagcctgctgcagattctctggaaagggggtctcaagaaacagcacgacaccctggtggagtaccacaagaagtatggcaagattttccgcatgaagttgggttcctttgagtcggtgcacctgggctcgccatgcctgctggaagcgctgtaccgcaccgagagcgcgtacccgcagcggctggagatcaaaccgtggaaggcctatcgcgactaccgcaaagaaggctacgggctgctgatcctggaaggggaagactggcagcgggtccggagtgcctttcaaaagaaactaatgaaaccaggggaagtgatgaagctggacaacaaaatcaatgaggtcttggccgattttatgggcagaatagatgagctctgtgatgaaagaggccacgtcgaagacttgtacagcgaactgaacaaatggtcgtttgaaagtatctgcctcgtgttgtatgagaagagatttgggcttctccagaagaatgcaggggatgaagctgtgaacttcatcatggccatcaaaacaatgatgagcacgtttgggaggatgatggtcactccagtcgagctgcacaagagcctcaacaccaaggtctggcaggaccacactctggcctgggacaccattttcaaatcagtcaaagcttgtatcgacaaccggttagagaagtattctcagcagcctagtgcagatttcctttgtgacatttatcaccagaatcggctttcaaagaaagaattgtatgctgctgtcacagagctccagctggctgcggtggaaacgacagcaaacagtctaatgtggattctctacaatttatcccgtaatccccaagtgcaacaaaagcttcttaaggaaattcaaagtgtattacctgagaatcagagtgccacgggcaggaagatttgaggaatatgccgtatttaaaagcctgtctgaaagaatctatgaggcttacnccgngtgtaccatttacaactcggactcttgacaaggcaacagttctgggtgaatatgctttacccaaaggaacagtgctcatgctaaatacccaggtgttgggatccagtgaagacaattttgaagattcaagtcagtttagacctgaacgttggcttcaggagaaggaaaaaattaatccttttgcgcatcttccatttggcgttggaaaaagaatgtgcattggtcgccgattagcagagcttcaactgcatttggctctttgttggattgtccgcaaatacgacatccaggccacagacaatgagcctgttgagatgctacactcaggcaccctggtgcccagccgggaactccccatcgcgttttgccagcgataatacgcctcagatggtggtatttgctaacatcatatccaactcagggaagtggactgagtgctgggatccaaggcattctacagggttcactgctggtttacacttcacctgtgtcagcaccatcttcaggtgcttagaatggcctgggagcctgttctgtcttgcatcttccatgacatgaaagggaggctggcacttgtcagtcaggtagaggttacaaaccgtttcaggccctgcctaccacattcactgtttgaatctttaattcccaagaataagtttacatttcacaatgaatgacctacaacagctaaattttctggggctgggagtaatactgacaatccatttactgtagctctgcttaatgtactacttaggaaaatgtccctgcttaataatgtaagccaagctaaatgatggttaaagttatcaggcctcccatgaaattgcgttcttcctgcattgaaataaaaacattattgggaaactagagaacacctctatttttaaaaggactttaacgaagtcaaacaacttataagactagtgattcactggggcattattttgttagaggaccttaaaattgtttattttttaaatgtgattcctttatggcattagggtaaagatgaagcaataatttttaaattgtgtatgtgcatatgaagcacagacatgcatgtgtgtgtgtgtctgtgtgtgtgtgtccgtgtatgtgtgtgtgggttctaatggtaatttgcctcagtcatttttttaatatttgcagtacttgatttaggatctgtggtgcagggcaatgtttcaaagtttagtcacagcttaaaaacattcagtgtgactttaatattataaaatgatttcccatgccataatttttctgtctattaaatgggacaagtgtaaagcatgcaaaagttagagatctgttatataacatttgttttgtgatttgaactcctaggaaaaatatgatttcataaatgtaaaatgcacagaaatgcatgcaatacttataagacttaaaaattgtgtttacagatggtttatttgtgcatatttttactactgcttttcctaaatgcatactgtatataattctgtgtatttgataaatatttcttcctacattatatttttagaatatttcagaaatatacatttatgtctttatattgtaataaatatgtacatatctaggtatatgctttctctctgctgtgaaattatttttagaattataaattcacgtcttgtcagatttcatctgtataccttcaaattctctgaaagtaaaaataaaagtttttaaatatttg

SEQ ID NO: 52834 - DNA, 1871 bp, Homo sapiens
tggagagggacaggaggaaacgcagcgccagcagcatctcatctaccctccttgacacctccccgtggctccagcaagccctagaggtcagccttgcggaccaacaggaggactcccagctttcccttttcaagaggtaccccagacaccggccaccctcttccagcccctgcggccagtgcaaggaggcaccaatgctctgaggctgtcgcgtggtgcagcgtcgagcatcctcgccgaggtcctttctgctgcctgtcccgcctcaccccgctccatcacaccagctggccctctttgcttccttttcccagaatcgttaagccccgactcccactagcacctcgtaccaacctcgccccaccccatcctcctgccttcccgcgctccggtgtcccccgctgccatgagctcccccatcagcaagagccgctcgcttgccgccttcctgcagcagctgcgcagtccgaggcagcccccgagactggtgacatctacggcgtacacgtcccctcagccgcgagaggtgccagtctgcccgctgacagctggtggcgagactcagaacgcggccgccctgccgggccccaccagctggccactgctgggcagcctgctgcagattctctggaaagggggtctcaagaaacagcacgacaccctggtggagtaccacaagaagtatggcaagattttccgcatgaagttgggttcctttgagtcggtgcacctgggctcgccatgcctgctggaagcgctgtaccgcaccgagagcgcgtacccgcagcggctggagatcaaaccgtggaaggcctatcgcgactaccgcaaagaaggctacgggctgctgatcctggaaggggaagactggcagcgggtccggagtgcctttcaaaagaaactaatgaaaccaggggaagtgatgaagctggacaacaaaatcaatgaggtcttggccgattttatgggcagaatagatgagctctgtgatgaaagaggccacgtcgaagacttgtacagcgaactgaacaaatggtcgtttgaaagtatctgcctcgtgttgtatgagaagagatttgggcttctccagaagaatgcaggggatgaagctgtgaacttcatcatggccatcaaaacaatgatgagcacgtttgggaggatgatggtcactccagtcgagctgcacaagagcctcaacaccaaggtctggcaggaccacactctggcctgggacaccattttcaaatcagtcaaagcttgtatcgacaaccggttagagaagtattctcagcagcctagtgcagatttcctttgtgacatttatcaccagaatcggctttcaaagaaagaattgtatgctgctgtcacagagctccagctggctgcggtggaaacggtaagggtgggctggatttgagtttgctaaatgaacggtctgtaccatttttagatgacagattttaaatagtaattcatctcattcatttcactgggattcactagcatcaactccacaaaaatgaaaagtctcatactagatgccacggtgcctccgcgcacagcatctatgccacggtgcctcagcgcacggcctcataccagacgccacggtgcctccatgcacgggcttctgtgcttaaactctgggtaggaggagacttcatgtgccccagtgacaaaaagccagagtaggatgtgatgagtgccatgatgtccatgcaaactgctacgggagttcaggagcagtaaagttctctgccctggcaagatacagaatccagatttttcaaaattggaagtattttgttcagttgcacatgttaccccaaagtgcctaactgtggctgttacttactgtaaaaaaaaaaaaa

SEQ ID NO: 52835 - DNA, 357 bp, Homo sapiens
ccaaagcccaagagttttaaattccaggtagttttttttttttttcaaaagaaaaatacatgtcaatgttacctagaggaaaaaaggaaagaaattgcgaatacctaaattaacatacactgtaagaaatcacttttagcagtgtctataagtcaaaatatctttgacttgcacatatgtatatatatacacacacacacacatatcagaaaaataaatggcaaattctgcttgcagctgcagtgttttctggatggctgcaaattaatgtaagtctttaaactttagggtacacaagactattaagtatctttctttgaagtcatataaatgtagacaaatttcaaatgtattgcc

SEQ ID NO: 52836 - DNA, 752 bp, Homo sapiens
agaaatggtgtttgaaagctcctttcaatatagagaacccccttacctgtcagtgcccaaaggcccccaactggggagatctgaagtgagaggaggaagctgcccaggttttcctgtccctggagagccatgggtcctgaggattggagcttatcattgagcaggctgttgtcacatacacagccttccagcttctattatgatgcattgtactgtttatataatcttgtatttgggaaatgcctaattatattttttaaaattactccaatatctgtcactgttagataaacacttctagaatctcattcccagtgttttctttctcctggcatgggtcaacaaccttcctgtgagcatattttcattatataatggcccctttatttacatatttactctttctaaaaggttaatttctttgtggggagggaaggtgatatatacacagtgtaatatttaaactgtacaagatggcttatttggaaaggaaatctcttcacgcctggcctttgccttcaagttctcttccccagaggcaatccactggtaacaattccttgtatattttagcaaagatacgctagataaaaatactcgtacatatattctttctctacctccccatccccctttaagaagaagcacactatacactgttctttactttgcttttttcctcaatatatcctggagatcaggaattcaagaccaggctgggcaaaatagcgagaccctgtctctaaaaaaaa

SEQ ID NO: 52837 - DNA, 350 bp, Homo sapiens
ctttacctagtacagaatttaccttacagtattgtgtaagtatagtttcttaaagagagaaatattagccgggtgcggtggcccacacctgtaatcccagcactttgggagaccgaggcgggtggatcatgaggtcaggagatagagaccatcctggctaacacggtgaaaccccatctctactaaaaatgcaaaaaattagccgggcatggtggcacgcacctttagtcccaactacttaggaggctgaggtaggagaatcgcttgaacctgggaggcggaggttgcagtgagctgagattgcaccactgcactccagcctgggcaacagagtgagactccatttcaag

SEQ ID NO: 52838 - DNA, 564 bp, Homo sapiens
tccatgatggtgacattttgccgtcatcgtctttacggcatacccgccctgcatctcctgcgagggctccttgcccctcctaagaccctccaggtcagtgtgccattcctgtcgcatcagctgcatcagtgcagacagaggtgaccgctcttttggcagacctccctgaggctgaaccctggagaaggctggatgtaggccgaggttccagagtgtggggtttcccgaaggttccctcttccctcaggcctgaactttcccaatcagtaacccagtggagcctggggccctgccagaccagttcctcctgacccctcatatctgagagtggctccctgagctccaagctgagccagagccagccccagccaccatgctggggaccagagcgtggggggcagctgcagatccaccccacgttgtgcctttgcagaagcgcaacacagcaggattcttaagttctttattagagatatttttaaaaggcttttaagtatttttttcttcccccacaccagcaaatgaaataattgcataattagtaataaatttgttcctacacta

SEQ ID NO: 52839 - DNA, 310 bp, Homo sapiens
gtatctggatgcaacaaaaaatttaaaaaaaaaattgtttctgaatactagaaagtcaaaagacaagctaaggaaatgaagaggaagattctgaaagaaggaaacaaataatttggcaaagtcctgctttagaccttgaggcaacaattaaatttgcagacaggcgcccacattatgtggcccaggaggttatcaatttggatatcatacagtctgtttctgagagagaccaatgatacataaacaaacctatcctcagggattgttctaaaaagcaactttcaggcatgtcattgggtcagtacatccc

SEQ ID NO: 52840 - DNA, 233 bp, Homo sapiens
ctgggatggcattctgattcctgatttccctggtcagaaatctttgttcctggatttgttctcacgttaccttgcgtctctgtggaagcatttatttgccatattctgcaaacatgttgtcgccagatagattgaatgctacccgaaggtttgtcacagtgctgtgcacaaagtgggacttcaagtgttatggaggcctggaaagccaggtacaatggctcacccagcacttt

SEQ ID NO: 52841 - DNA, 358 bp, Homo sapiens
atattttacattctttcttttggactaaagcttcaaaatcaagtgtgccttccatgcctacagcacagctcagtttggattggctccatctcaagtgaccgaagatacacatgcgtggctgccatgtgggacagcgagctccaggccaccctggccttcatctttcacccggggctcctgacttctaacttcaggcttgctgccctctcctcccactgtggccccattcctgtctcctggggtcctgttggtttctgagagccctccaggctcaacctaaaggcagactctccaggccgccagtgaaatggtgagtgaaattgtaagcatgaatgtatgcacgttttcctggaaaagg

SEQ ID NO: 52842 - DNA, 324 bp, Homo sapiens
ttgttctaaggtaccgccattcattgttattattttaaaatacgagtgtcgactgatgttaaaacacaaaatggggccgggagtggtggctcccgcctgtaatcccaacactttgggaggtgggtggatcacctgaggtcaggagtttgagaccagcctggccaacatggtgaaaccccgtctctactaaaaatacaaaaattagctgggcatgtgttgcgcgcccgtaatcttagctacccgggaaactgagtcaggagaattgctggaatctgggaggcggaggctgcagtgagccgagatcacaccagtgcactctagact

SEQ ID NO: 52843 - DNA, 145 bp, Homo sapiens
gcactgttacgaaatgtcagggattatgctgggttcttccaaaaattagctcatggaatcctcacaacagccaaatgggaataggcgttattattatcttcacttaacagaggaggaaatggacactcagagaggttgggtaact

SEQ ID NO: 52844 - DNA, 119 bp, Homo sapiens
gaggaaactgaggtgcagaaacgctgcatgactctctcaaggtcattcagcactgaggttagaaccccggcagctggattccaaagcctcacccttccagcgccaggaaagactacatg

SEQ ID NO: 52845 - DNA, 284 bp, Homo sapiens
tccctgggttttcaaaaaacaacttatttgtttcagtatatgtttaatttggcacaaaatctttctacagtcctatatttttaaagtttcatcttaatgcatttccatcctgctggaaaaaaaaattaaatgtaatcagacattttgtatacagtgatgaagtggttaacatctgctttgaagatgatactttaattaataaagcatcataaaaatatctggagtaatgtctgtcatgaagtctattcatgccacatgatcaatgggggatttctgttcgctct

SEQ ID NO: 52846 - DNA, 336 bp, Homo sapiens
aaattgcacacacataactctgtggagtgtctaatagtcaaaaataggttgagtgtgatcaggataaatagctaatgcatgtgggacctaatacctaggtgatgagttgataggtgcagccaactaccagggcacatgtttacgaatgtaacaaacctacacgtcctgcacatgtatcctggaacttaaaataaaataaaatattttaaaactaggttgagtatgaatgagagggaaaacagaagtgagccagttcataattataggctaaagattatagtgaaatcagatcacatcttacatttcacattattttttctgtacttagacattaag

SEQ ID NO: 52847 - DNA, 272 bp, Homo sapiens
actggaggaacagggcctgtcacataacacatagtcactgaataaacaaaagttaacaaatattgatcatatgtagggacatgtgtctagctaataatgttactctctggccaaccctaaacttagaaaaatccccaaagcttcccttagcctgtttaccctactttggatcttaacttaaagggggcatatcaaatactaggacagtgattctcaacctcagtgacacatgtaaacagcttgggaactttaaaaattctgatgcccaggcc

SEQ ID NO: 52848 - DNA, 402 bp, Homo sapiens
cttccacatatagtaaggagcaagttgttttatctctagtttgtatatagagaaacttaatcatacatatggaaacaaaaaaagtctgtttatattcagttctactataatatctcttaaaattaatgttaagcagagtggactttcttctacaagaaaagctgggactactataacatgtcaggataaagaatcctatcaagctacacagggtgctagaaatgccaaaatggcattgaaggcattcttcacccactggtattcagcaggcacagaaaaggcttaaattaagaaatctcatacatgagatactttgaattctaagtcatgtgggtgttcctctctgtgattctgtatccacacaaaatttttattaaataaaaaacatgtcatattttgaga

SEQ ID NO: 52849 - DNA, 404 bp, Homo sapiens
ggaattggcagtagttgaataatctgaggtgaggaatatcacttctaaaattactatatttaaaaaggtgtaatatcttcccatcttgttttttggccttatgctcaatgggtcctctgtaattaatattatatatgacacactggtgcttttttatgaccccttgaacaatttcattaattgaatcaacctgcataaaataaacattcctgactctgtcacatatttgtctttatatgtttatatattttttaaatctttaaagttttaggcctgcaatatatgtaatttgagatgatgagagctagtttagttgtagatattttcattgcagaagagcatgtgcagcagggaggaagatggtggattctgctttctttttttttgtttgaaactccttctcc

SEQ ID NO: 52850 - DNA, 520 bp, Homo sapiens
tacaaatttaattctattgctcttatgatgaaaatacaactgcagtgaaatgataactttttggagtctccatagatcatacaaagagagaacagagaaacaaggcaacaaattgggatacgctgcaacactctgcactgaacatctgacttcaattagccaaccctcaatttccaatacaaaaatcacaaaaggattactaagggagaatttataatggaaaagagattcagcctatatttatcctgatgtggctgtgaactggaccatctgctataggaaggagcacctgaagacttgttggctgaagttctctgtctggcctcgaaagacattcaaattagccaccactggagtagatgacctaaaagttcttacaactctcaattatacccagtgatgtctcgattagcacttattataaaaattaaaatttataattcaaaatttataccatccagaaaaagttaaaatatattaatagcctatttctcttcaataaagcgtatatataactcta

SEQ ID NO: 52851 - DNA, 472 bp, Homo sapiens
ctgctgttccactgggagctgaagccagggctcatggtcactcgtgacttactagtttgataggctctcactgtggagctagactcgtttgcttgttatttcttaagaatctctgtatctttctccttttttaccttctgtggttgtgatctgtgaggaaaaatgtgtatttctcccagattcagcctatatttatcctgatgtggctgtgaactggaccatctgctataggaaggagcacctgaagacttgttggctgaagttctctgtctggcctcgaaagacattcaaattagccaccactggagtagatgacctaaaagttcttacaactctcaattatacccagtgatgtctcgattagcacttattataaaaattaaaatttataattcaaaatttataccatccagaaaaagttaaaatatattaatagcctatttctcttcaataaagcgtatatataactcta

SEQ ID NO: 52852 - DNA, 366 bp, Homo sapiens
atgagggggaaagaaaagagaattgtttttgagagtgagatatctgtttctcttctctatgtttaactgtgtatgtatagccatccatatcagtatctgtatttgtccttatttatctacttttatctctgtttatctttaactatgtctatctccaaagaaagagtatagcttttggcttagagcatagatcctggatctggactgcgtaggtttaaatcccagctctccattttgagcattgtgcttttaaggaattgtaattttaaataagccacaaagtagcctccaggtgaggtgcacacctggacctatccctgcaaaatcactttcaaaagcagggaagggatagagggcctgtccttt

SEQ ID NO: 52853 - DNA, 205 bp, Homo sapiens
cgcttacttagacttgccgtgggaccttagtaaactaggtggctttacttgcatcacccttaatattatctacattattaaggggatattatctatagtattttgttgttgttttgagacagagtccactctgtcacccaggctggagtacagtgacgcaatctcagctcactgcaacctccacctcccaggttcaagcaattct

SEQ ID NO: 52854 - DNA, 462 bp, Homo sapiens
gttaacaaaatacagaactttcctgaagttgtcagtctttcagttaacctgttaacagatgcctaatccatgaatctgcccttattaatagtaaagaaagctaccatctctcaagcactgacctggggcctcccctgggctaagcgttttgactcgatgacatagcaaccctgagaagtaggtaccattatccccattttacaggtgaagaaaccagggctcaaagttaaggtcacataactagtaagtaaaaaactggaactcaaacccagagcttccagactccagaggccacccttgcagcgttgagactggcacttctccctgtagtgttcttgattccagaaagagctgaacacaggatccagaggccggacctcagcctccaagaagcagtgctaatgttctgtgtacttaagtgggttcctttattcacacatctcccacaaattaaataagtaa

SEQ ID NO: 52855 - DNA, 478 bp, Homo sapiens
gcacgagctggaagctctccttgcatttttattggttttgctttatttgaagtttgtttttgtccattttacttcatggcttttatcagtgtatctggtgtgtcatttattgctctttatcttgatttttttaactttttaaaaatttgcaaaatctatgaaagtataaatcagtataataaaactccttggatgggcacagtggtttatgcttgtaaccccagcactttgggaggtcgaggcaggaggatctcttgagcccaggagtttgagaccagcctgggcaacgtgctgaaaccccatctctacaaaaaatacaaaaattacctgggtgtggtggtgtgcacctgtacccgagctacccgggaggctgaggtggagaatcacctgagcctggggaggtagaggctgcagtgagccatgatcacaccactgcactgcagcctaggcaacagaatgagactgtcaaaaaagaaaa

SEQ ID NO: 52856 - DNA, 419 bp, Homo sapiens
atatcagtatatcgtgaagtaactgaattaaagtgcctgtcacagttttctgagaattgaattaccatttttctttatgaagacaaaaatgcctccacatgggaaaacaacctgaataaagtaaataacttatttgtgtactttaacaataaagaatggctcacaaatttggcttatttgccaaatgctttataaagactgagcagttagtaacaaatggcaaatggagtgctattgctgtatattggcagggctactttagggcatattactgatgataaatgtgaaggaagcacaggttagctcacctttactacatgaaaaaggaaggggattttatctggagtatttgaatagattcacacaaactatgacagaagtcttccaaactgtctgtactgataaacttcactttagga

SEQ ID NO: 52857 - DNA, 205 bp, Homo sapiens
ggttcccctgaattccgaggcatcccacatttcacatgagcaaatagccttgacacctgccgcgtctccaggacaataggcatttctgacccacatgatctgcacaaagaagaaagcctctctctctttctcaccactgcatccccaactgatgtggaccgtgatacataattggagttaaataaatagttgaggttgtcctggg

SEQ ID NO: 52858 - DNA, 578 bp, Homo sapiens
gtaaacaaaggaaaacaaattcatcttataaggaaattgagtttactaaaaattattataaagtctttacagaaatttgtattttactttggcaaaagaattttatatatatgtattattgaaatgctttgtatagtgaacacagggaggttgatttaaaacaggctatttgataaatttgctgagtgtgtacctctctactcagtttgtattaccgttttgacttttctctgcagcaattgtctctaagataataaaacctggcgagcatttatcatgggatacaatggacactgattttatgaaattgacttcagagaaacccttgtgctcacaggcatgctgagctcagagaggtcctgccaccttcccaggtccagtacaacaatcttacaggtgtaacagcagattcgtgaatgaacacaaaaggcctgtgctcacaaaggtcttttgttcatggacagaaccacttagactggcaacagtctacatttcactagtgtctttctttgttcgtttaaaacagtaaatccagaatgagtccagtgacagtaataaaggaagaaaattagcactgc

SEQ ID NO: 52859 - DNA, 294 bp, Homo sapiens
acaagccctatcagcacatcccagaaaatgggaaaccgaatcacccaggggatggcaaggaatgaccagagggaaagttccagttctgtccaacatgcactaccagccccattttggaaaagaacagatttaatagacctcaccaagacaagaattgtttttcgtcaaaggaaatcaaaggaacaaacaagaggcagtgaccaccagagacttcaccttttggtgtaggaaaacccaagcagacagtgtctacatccatcaaagcccaatgtattaaatatttattgaataaga

SEQ ID NO: 52860 - DNA, 372 bp, Homo sapiens
aaatttaagcagtgataaatttgaggtctctactgttcatttgtatgaagattttcttatgaacttgatgtcagtcctttgattagaaaattgatttttatgactttaaaatggtcataaaatcacagtgatgggatgaaactatgatccagattaatttcttactttataaatggagaaactgagcttccccatttaaagaagttattcaaggtctcacctctcattggtaacaaaagcatggataggaaaccagatcctctgactcccagtccattactcttttatgccacatcaattgccaagtgataaattttctctgggaaccccaggcttgtccccacccccattcccaaccctctatttatgcat

SEQ ID NO: 52861 - DNA, 312 bp, Homo sapiens
agtaatttgaagtcattactaacaacaagtaaaagatatatactaacttaaccacatgacaggcactattctaagtgctttacaggtacttgcccatttaatcatagcaatcaaatgggctagatagtgtggttatccccagtttactcttgagtagcctgaaacacggaaaggttatatgacttacgcaaggtcacatagcttaataagttgagaagccagaaactgaacccaagctgtctggttccagagtttgtactctaaaatactagcgttaagtgggcacagtgactcactcctataatcccacca

SEQ ID NO: 52862 - DNA, 682 bp, Homo sapiens
attcgcaaatgaaagactattttccagacttcccaagctaccaataaagaaatttctacatgattttaataaatacacaaaagttaccgaagttgaatgataacgtttaagtaaaaaggcttagtataagttcgtgtcccttcattggttcaagaacctcttaagtctgaaaatttttcaagtcttgaaaattgtaaaacaaggataattgagggttttataagaggaagtaaaaaagaagtttgacatgttcaggtgaaaaagtaaaactaacactttttcttatttttaagtgagggatctgactccttaattttctagtttttcttttaatcaagggctctattactgtcaccattgagaaattgtaataatatcaagagacatgtaggtaagtggtcactttaggtacaaaatattgattgggttaagcccagttgctggcattggttgggtgtagagagtaacaaaaaaagaaagaaggacgtagatatgactatttaaaagaggctcttaattttgtaactcctgttatgtgaatctaaaggtctgattgttaaagcagttgaacccaaagttcttgttttatgtggcttactcatggtagtttggcattgctaaccactctgggcttgcaactttcttgttaatttttgcaacattattctcgcttgattttttt

SEQ ID NO: 52863 - DNA, 430 bp, Homo sapiens
gcataattttactaaatagtatttcacaaatattaaagcacttgaagacaatggttatagtagatttgattaccaaggatcactatctgtactggagattagaacaattatatgaccagaagcatctaaccattatgtaaaaagaaatgatgagacaaaaagattaagatacaaattttgtgcagtactaaagaaaaagcagtctaccattgtggtccttgaaaataactatagatatttttgttatttgttagacacaaattataattttgttgttaatgtatttaagcattttatagttatgctttgtgtttttgatattctttgtattgttaataacaagtgttatgggtttttaatgttgaaatcatgtgttaatttttgtacttgaattcaaattttttgacattaaatatgtgatgcttcaaaa

SEQ ID NO: 52864 - DNA, 393 bp, Homo sapiens
ttacaggcgcctgccaccatgcccggctaatttttgtattttttagtagagatgaggtttcaccatgttggccaggctggtctcaaactcctgacctctggtgatctgcccacctcagcctcccaaagtgttgggattacaggcgtgagcgaccgtgcctggccttctccactgttttcatagtgaagaaaggacacccaaattttgatctggttcagctattcactattctatcctgtgtggtcttaagcaagttacataacttgcctatatctcagtttacttagctataatataaattaattggtcaaatgttctctaaagtcttactagttacagtgttccatggcccaacagcatctacattacctgagaggctggtagaaatgcaga

SEQ ID NO: 52865 - DNA, 258 bp, Homo sapiens
caaagataagattggactatgtttaatacacttcagcttttcttttaggtcagaacaggaggttggcaaggcaactgttgcatatgctaaaatctatttcccaaatcgctccccataaccgatggtcgtttgggctttcgtcttaccccagcctcttatttctgctttgagaacacctttagatttcagtggcgtctaactgatttagaagacattgggtaaagtagtcagttctgttaatttgctgtgaattaaacc

SEQ ID NO: 52866 - DNA, 542 bp, Homo sapiens
caggactgaagtgacggcgaggactcagctaaactggagggacagtgttgaccatggctatgggaccaagaaccacactgtggggtatgtccttctgaggacaggtcagccttgtttccgtccattgagtgtccgtgggcccaatgttatgaaatcttgttccctcatcttatccagagggagctgtgatggttaaattttgtgtcacctttgctggctgaggggttcccagacactgagttaaacattatttctgggtgtgtctgtgagcgtgtttcccgcggagattggtggtctcagtggactcagggaaagtaggtggcccttcttcatgtgggtgggcttcatgcagtccctcgaggttcagtgcagaatagaacaaaatggagatttaacctctcggcgtggctgcgtgagccgggacaccaaccttctcccccacttgggctgagactgagaccatcagctctcctggttcaagggccttcagacttggactgaaccacaccgccaggcttcctgagtctccagtgggcagaagg

SEQ ID NO: 52867 - DNA, 285 bp, Homo sapiens
gtcggaattaaatcacatcaaaacgccccctgaaacccacatcctgaaggagtgaacctacaacagccaacctccagtcgttcgctcgagttcacacgaacaacttgcctctaacatccgagtgaagggggcggcgggtgcctctcccgcaccgcacccaccacatcccggacctgggatcccactcgcacccgaagaggcggctgcttatgttaatatcagcccccacacgaattagaaaagaccgcccggtgacagaattgcttatgccaggaactacactga

SEQ ID NO: 52868 - DNA, 294 bp, Homo sapiens
acaggttcaactgtctctacagtgctgtggctgtggctggaagtccatggggtgggaagtggagaagaggagatggatgtcaagtggaaaagagcaaggacaagctggaccccatgaggatgatctccatgtgctgcaggagaaatgggtgtcctttgtcactgagctctgccacggccttcaggatgctgaagaaggatccaggcagaggcaaagcacttgcaggcccgcccaccacactctgacaatgaaatgagcctggcgacactgcctgacctttggagcttgacttct

SEQ ID NO: 52869 - DNA, 559 bp, Homo sapiens
attcaaatcagcaagtgtttattgaggaactcctataaataaaacactgctctagggattgtaagggatgtgaagtttcattcttgagctcgtatatagtagtgaatgaggcctctgtaaaataatcaccttgagctgtccctcacttaatcagatgattatgctcttatataaaccatatgaggagcagccttgtgaaattgttttcagaatttacagtatatgctttcagagaaacttagtgcataatcgtcataggtttaaggttggatttgatttagaaatagtcagaaaaaatttagaacaaaagatagtgattaaaggtagtggttagattttttttttgatgtccttgtaaccatgacattaatttacctgtgtgctttgtaaaaggacacttaagatatttattaaagaagagttgtggaaatgttttatctacacccccttccttttttttttaaatgacacaaacagattaacattctttattaagtgtttctttcatgtactttatttccaactccactgggattgaagcatttataatcttctttca

SEQ ID NO: 52870 - DNA, 516 bp, Homo sapiens
gagaataaccaagttagctgtatggatggctatgaggggtgcacacagcccgttcaccaactgaggaatggagaactcgaagggaggaacggagactcggccgagcctcagcactcacagcggcagggtggatgagttctaataagggtagtttcctgtgacagtccggaatctggaactaggcatcagcccaaatggctcctgcatgaaaagctgcggtggatctaagtggcagctaggagtcaaggcaactagcttcctccgaagcgaggcaagacaaggcacagccgagaagccactcaacctctgttcccaatgaatccatttccatgtccctgcttcgctgtacgacaccccacaccctgatgtgcatcttgtgaaaaatcaagatgaaaataaaaggtcaggagaaaactctgtggagactgttgtcaatgtagtcaaactgactctgatatagacaccttccgcattctgcacttactcatgcaatttcatttactttttagagagaaa

SEQ ID NO: 52871 - DNA, 627 bp, Homo sapiens
gagaataaccaagttagctgtatggatggctatgaggggtgcacacagcccgttcaccaactgaggaatggagaactcgaagggaggaacggagactcggccgagcctcagcactcacagcggcagggtggatgagttctaataagggtagtttcctgtgacagtccggaatctggaactaggcatcaggtgagagtgccctggagtggagtgggctgggggaagaggatggggcttgctggtggtgtaggtgtgggtgtggcagccaggtctccagtggctgcaggatcctgccctcagcccaaatggctcctgcatgaaaagctgcggtggatctaagtggcagctaggagtcaaggcaactagcttcctccgaagcgaggcaagacaaggcacagccgagaagccactcaacctctgttcccaatgaatccatttccatgtccctgcttcgctgtacgacaccccacaccctgatgtgcatcttgtgaaaaatcaagatgaaaataaaaggtcaggagaaaactctgtggagactgttgtcaatgtagtcaaactgactctgatatagacaccttccgcattctgcacttactcatgcaatttcatttactttttagagagaaa

SEQ ID NO: 52872 - DNA, 212 bp, Homo sapiens
ccaaacgacatggatttggaacttggattcaaactcaagcagtctggttccaaagatttcattcctaaccacttaagtgatagatttttcatttctgttcacctttagtattaagccaatacagtttgctttgaagccccagttccatctttttaagtaaatgtgggcaagaggcttagtagttatggctaattctggtttgctcctgctgc

SEQ ID NO: 52873 - DNA, 788 bp, Homo sapiens
atttcttcctaaaatgttaccaagcaactgttcttcatgttaatactaagattcttgatagttccatttaaaagccacaagaagtcattctggtttattcctcactccaagggaacacttactttgtgtagacaagaagatgagagtctttccttcaggatttctaaacacagagcaagaagattcaatgaaaaattgggctcagggcagtaattggggctggcatttattcttaagagttttctccctcaaaaggtgaaggagtgacattgcgtattcactctgtgtgtgtgtgtgtgtgtgtgtgtgtgtgtgtgtgtgtgtgtgtgtgtagctctagagggagtagggagaaaatacaggatgaaattgaaaacagggactaacaacttttcactgaatgccagcaagctctctaaaattagttttctttggttgaacaaatttacaattcattgtacttcatttcacagcattaaacatttactcgaggcagtttattctgtttgctctttcatcccccttcttatttacttttttcttgtgctctaaaacttttgtcaatctttaacaaaactgtgctgttaccttttttaatgttaaaagaattttaacactgtcaactgtagtttgtgcagatgtatgtcagaaaaaaatgtacagtatgtgtcaaaatatatttgaatatcttgttgctgttgctgttagttcctggctctctaattttctgtctgttagggagtttcttaagatttgaaatacaagttaagaactatggaaagcatatt

SEQ ID NO: 52874 - DNA, 831 bp, Homo sapiens
atttcttcctaaaatgttaccaagcaactgttcttcatgttaatactaagattcttgatagttccatttaaaagccacaagaagtcattctggtttattcctcactccaagggaacacttactttgtgtagacaagaagatgagagtctttccttcaggatttctaaacacagagcaagaagattcaatgaaaaattgggctcagggcagtaattggggctggcatttattcttaagagttttctccctcaaaaggtgaaggagtgacattgcgtattcactctgtgtgtgtgtgtgtgtgtgtgtgtgtgtgtgtgtgtgtgtgtgtgtgtgtgtgtgtgtgtagtatactactacgagagagaaggagaagaaaactaagagaagagaagagaagaagaagagaagaaaaacaggagatgagatgatgtgagagcgcatctctctcaacgagagctgatgagagagcgaacactactacaagcagcagagcagctgccacccatcacagagacacacactatacagcgagagaacagtagagagcgcgcgcgcacacacccaccatacataaaacagcagacgcgcgcgcgcggcaaagcgccgagacaacaactctccacacagaagagtggcggccgacaaccaagaagcgtaggaagaaaaaacgacgactgagacagagcagagaagggagcagtgtcgctgtgcgaccaaaaagacgagcagtggcgtggtagcatatatatgtcgagcactagcgagcaaaacaacaaccaaacaaccaccacaacaaaccacacaaaaaaaaaccaaaaacaacacacaaca

SEQ ID NO: 52875 - DNA, 311 bp, Homo sapiens
agattctaccttccactcttctgcctccagctgcccctgggtttacccgtcctccactcagtgcagaagaagctgccctgcgtcgggccctggaacacacggatggtgaccacagttctctgatccaggtgtatgaagcctttatacaaagtgagttctgcatccttttatagaatcccagattttccaaagaggggaaattttatgcagccagctgacagatctctatgctcagaaagaggaggccctttggctaagggttgggttatttcaggggtctcaaggactttagtttagctggtccctttcct

SEQ ID NO: 52876 - DNA, 345 bp, Homo sapiens
caaagtagctttgtcacccaggctggtgtgcagtggcacaatcatggctcactgcagcctcaacctcttgggctcaagcaatcctcccacctcagcctcctgagtagctgggactacaggcactactaccacgtccagcgaattttttattttattttattttattttgtagagacagagtcttattatgttgcctagactggtctcaagtgatcctcctgcctcagcctcctgaagtgctgggattacaggtgtgaccaacagtgcttgaacagaaagataaatggcaccaagaaaaggccatgtgaggactcatcaagaggatggccacctacaagccaggaa

SEQ ID NO: 52877 - DNA, 365 bp, Homo sapiens
aaatgttctttggccagaattacttggtttagtttatttcattctcctcttccttcagacaatatagacctggtatcctttagtcacttccctgacctttttctcattttgctgtgcagacgaaatccaagttcttatttagaaacctggatagcataagcctaggaaacaagattttgtgtttttaaaacttatgtttaagatgtgactcatacactctcctctgagaggccaaggacaatcttgatagtgtggccagatcccagcataattgcaagggagacaggggcttcaaacataattgcaagggagacagaggcttcagaatgcctccacccagccagcgttcaacacactctttgccc

SEQ ID NO: 52878 - DNA, 149 bp, Homo sapiens
gtccacaccgacagataccacctgccatctcccattttctcctcccccaacctccccagcatccctgatcacttcaagggctgctgagccctgggaagattttccacggaagaacttgtttaataaatgggaaactgacctttgctaaa

SEQ ID NO: 52879 - DNA, 311 bp, Homo sapiens
tctcaaagaaagtgaatgattcctgtaaacagggaactcctcccactggcccacttcctgccctcacacataagtgaagcctgatcattgaggcgttaccatcagcaccccccaccacccccacctgaagtcagggagaaacatcttggggaaaatgatctatacaatctgctgacattagctattctcattcttcactcaaaaatataaagaagacacaataattgccagacatttgagagaaataaactgcacatcaatagcacacagacacagagacacacacacacacacaaggccagaatgtacaa

SEQ ID NO: 52880 - DNA, 872 bp, Homo sapiens
aattgttcaccactttggcaaggtggatataatccgtgaatttgtattctcagagcacatgttgaccactggttggtaaagtggtccaggaagaacctctttatgggagagtgtagtgatctggggattcaacctttactgggcatgaaatgataggcagttaattgacagttggcagtagagataaaggtaattctttctttaattttcgggcttagagaatggcttatctccacggttgctttaaactcccagtactccagtgtggtagtgacattttggcctgccttttacagaggcagagtccatggtggccccaggcacggtctttgatttaaagtctgagctcctgatacccaggtgcgccctctgcaaagtcatgttctttcaggctaaataacagaagggtaaccttcagctgggttccctaagatgatttctttcgccagcaatcatcactttccccaccggtttttaatgcagccatttctttcatctgtattcctatcttgatttgtgagaaattaaatgagcatgtaagatgtggtttagataatgattaattaggggaaaaggcgtcattccaatagcaagtcactattatatgctaaggaaattagttcatatttttggatggcaaattgacttgtcctgcatttaaaaagataccttttaaaaaatgcctgttatggctttttttggttcattagtagagcaacctgcacttaatcctttggatgattttaataggcatctattattttccctacaagtcatgaagcaaccagtttgggatatcattaattcttttgtttaatattaatttaatgataatgcattattattttcagcacaaagtacttttgttagca

SEQ ID NO: 52881 - DNA, 454 bp, Homo sapiens
aggacgagtgtatgtctcctcgtggttgtgtggccaggcttttgtttcccttgcagcacttaaaatgctgggcatgcgtgtctagatacctcaccagatgtgttcccacccaccctgctggttgctgccacactccactgtgacttttcagagctcttgggctgtttctcttgcccttctcctctactggatgaccacctgctgtgagattatccctgggttctctgattatagcccaaggcacacctaagaagtttctagggaaatcagatagccagtaagtttttcaaacttgaattagatctcttttctgcccaatgtgactattctttggtgcacactgtaggaaaatcaggtccttcctgtgctaaacttaaactcgatagttgttgagtgactccttttactagtgatgattacaaatagagatccagagtcattttaatcatggttc

SEQ ID NO: 52882 - DNA, 241 bp, Homo sapiens
cgacatgagatcaatgaccagacagggtgctgcggcagaagaggatggcataaaggccagacagcttggtggagggtgctggtgctgggaagagcacagtttgaggctggccgtgtgactccaagccaattaaactctccgacctccttctgaacaggcaaaatggaggagcggaaaccaatttccctgggttgtggtaataagaactgaataaattaatatacctgcttggctcttcatg

SEQ ID NO: 52883 - DNA, 235 bp, Homo sapiens
caaccctagcagaaagacagaggaggtatttatccatccctgctgcttccttcctaccctagtctaaatccttgaccaagtagggctggataccaggattgagatgtcacaattttaaggggggtttcaagcaggggaaatcacaatacttcatcttctcttgccattagctttttctgttaaaaatacgatgtttaaaaagcacataaacatttatccatttatcatttacttt

SEQ ID NO: 52884 - DNA, 410 bp, Homo sapiens
aacaaaattacgaagatatgatttctttcattgttgtagaaccattaaataagtcatcagattatgatttgaacccagggcacccagtcaagtgctctttccctatgcggccttagctacggggatttacatttacagttgagaagtgaaacaagaaaaatttgtttttgaaacataatagtaccatctagcctggctgaccaacccttccccagcaccaccagtggacatgcgcatgtacatacacacatacatacccacactttaggctgagggagagtcttgtctttttgaatagccttcatagtaacctctgggattcaagggtacctgatatttaagacctttattaaaccttggttcagtggttttcaaacatttttgaatatcagaaccccttttcctaatgg

SEQ ID NO: 52885 - DNA, 977 bp, Homo sapiens
gcagccccacagcaccaaagagtcaatggtagttttggtcagaaatcttcagtgggccttttttgctcaatggataagttattttcatattttatttatttgtatgtttaattttaaaatattagttgacagataatattggatatattcaagatatctccaaatacacattgtgtggtaattgttacaaaatcagtatcatctgccgtgacttaaaagtttgtcctccgcctaaattcatgttgaaactttaaactccaaaacaatagtgttaacaggtgggggcctttaggaggtggtgaggtcataaaggctgtgccctcatcattgagatgaatgacttcataaaaggacttgagggagtgagttctgccctttctgcccctctgctgtctgtgaacataacattcaggatgtcatcttgaaagcagagaccaaggtcttcaccagagacagtctgccaatggcttgattttgcacttcccagcctatataactgtaagcaattgagtttatgtcatgtataaactacctagtcaggtattttgttaaagcagcaggaagggactgagacaacatctattgccacccgtgctgtacattagaatgccagaacttattcatcttataactgaaagtttgtaccttttcagcaatgtctccccatttcccctaccttctggcccctggaaaccactatgtagtctgtttctacgagttcaatgtttttaagctccatctataagtaagatcatataacatttgtctttctgtgtctgacttattttacttaatattctccagcttcatattttcacaaatgactttattcttttttatggctgaataatatttcattgcgtgtgtgtatcacaatttctgtatccattcatctattaatgagcatttaggttgtttccgtgtctttggctattgtggaaaatgctgcaataaacctgggattgcagaagtctctc

SEQ ID NO: 52886 - DNA, 2087 bp, Homo sapiens
cgaccattttttttttttttttaacaatcggatctttcaggaactaatagagcgagaagtcactcattaccacaacagtgccacttatgtggaatctgctcccatgacccaagcacctcacaccaggtcatacctccaacatgaggatcaaatttcagcatgaaatttgaagggagaaaatacccaaactgtattcaatactaagaaactgcatatgagaatattactgtattgttaatagctataggggagggagccatgttgtagactaatcaatccatttatgttcaatttgtttatgttagaaaacctgcactttctctgatattggtagcagtgtaagttcagacttagtaataaaagaaaataactaataaaccattaatgatggggttgtcattttttgcagaagtcatatgatagacatactgtgtaaaattaaataagtcagtgtagaaaaacctccagatgccaaattttaatctgaacaaaaaattcctgctagagtaaaaccacatgaatgcattgtgtgtgaaaaattcttcatacgttcattcatcccttcataggcacatcatatctcattctggaaacaacccatatgggtgtgaggaatgcggaaagaagccatgtacatgtaaacaatgtcagaaaacttccctttctgtcacaagggttcacagagacacagtaatgcacactggaaatggacattatggttgtacaatatgtgagaaagtttttaatattcccagttcatttcagatacatcagagaaatcacactggagagaaaccctatgaatgtatggaatgtgggaaagccttaggtttttcccgttctcttaatagacataaaaggattcacactggagaaaaacgctatgaatgtaagcaatgtgggaaagccttcagtcgttccagtcaccttcgtgaccatgaaagaactcatactggagagaaaccctatgaatgtaagcactgtgggaaagccttccgttactccaattgccttcattaccatgaaagaactcacactggagagaaaccttatgtgtgcatggaatgtggcaaagctttcagttgtctcagttccttgcaaggacatataaaggctcatgctggtgaagaaccctatccatgtaagcaatgtgggaaagccttcagatacgccagttcccttcagaaacacgagaaaactcatattgcacagaaaccctatgtatgtaacaattgtggtaaaggcttcagatgttccagttcccttcgtgaccatgaaaggactcatactggagagaaaccctatgaatgtcagaaatgtggcaaagcctttagtcgtgctagtaccctttggaagcataaaaaaactcatactggagaaaagccctataaatgtaaaaaaatgtaaaggctttaatcactacagtttttgtcaaaaacatgaacagtcacatacttgagagaaactgtgaatgtaaggtgtaggaaagtacttaattttcccagatttcctcaaatacatgaaacgaatcaaactggagataaaccctatgactataagcaataaggtaaagcattcaatttttccatttctttttgaaaacttgaaaggactcactgaagaaaatccatatgaatgtttaaaatgtggtaaggcctgcagttgttccagtggtatttgatggtataacataactcattctagagaaaaactttatgaaggtatcgaatgtgagaatgccttcatttatcctataactcactcagagacacatggtaacacatactccagattgaccttataaataaaagaatgcccaccagattgaaatcctagaaatacagaaaattctgaattttaacaattactttaaaggtcatgtgaaaactcccactggaaataaatcctgtaaatgtaaatattatggaaaaccttatggaaaataattatagtacaattctcaagaaaattcactatgtgaatgagatgttttaggagctataaataaattgaatatattggttgctcatttttgaagagagtctctagaatatagattttcacttcttttgaaaaaaaaaaaattg

SEQ ID NO: 52887 - DNA, 971 bp, Homo sapiens
  misc_feature (642)..(643): n is a, c, g, or t
ctttgtctctcgtgcccgcacgtgcgtgtctcggtcagtagccctgcgcttctccttcactctcggcggttcaggaggctctgccgcagccggggccctcctgtgacctgcatgtactgggggattcgcagggaggatgtcgggacaccccggaagctgggaaatgaactcggttgcctttgaggatgtggctgtgaacttcacccaggaggagtgggctttgttggatccttcccagaagaatctctatagagacgtgatgcaggaaaccttcaggaatctggcttccataggaaacaaaggggaagaccagagcattgaagatcagtacaaaaattcttcaagaaatctaagatgtactggttcatgaagatgtgcttatgggtttctactctactctagtaagttttgggtctatgtatgtacctttctttctctgcactcttggggcaaggaattgccatgtgattgatcggagaattgttcattttaaattagtccagaatttttatgttttatttcttctaaaacaaacgaaaacgggatacgtgtagaacatgtgagtttgttacatgggtatacatgtgccgcggtggtttgctgcacctattgacctgtcctctaagttccctcccctcaccnncaacccccaacagcccctggtgtgtgttgttccccctctgtttccatgtgttctcaatgttcagctctcacttatgagtgagaacgtgcagtgtttagttttctgttcctgtgtttgctgaggatgatgacttccagcttcatccatgtccctgcaaagcacatgatctcattcctttttatgtctacatagtgttctatggtatatatatacacatatatatatacaccacattttctttatccagtctatcattgatgggcatttgggttggttccatgtctttgctgttgtaaataatgttgcaataaacatacgtgtgcacgtg

SEQ ID NO: 52888 - DNA, 542 bp, Homo sapiens
ctttgtctctcgtgcccgcacgtgcgtgtctcggtcagtagccctgcgcttctccttcactctcggcggttcaggaggctctgccgcagccggggccctcctgtgacctgcatgtactgggggattcgcagggaggatgtcgggacaccccggaagctgggaaatgaactcggttgcctttgaggatgtggctgtgaacttcacccaggaggagtgggctttgttggatccttcccagaagaatctctatagagacgtgatgcaggaaaccttcaggaatctggcttccataggaaacaaaggggaagaccagagcattgaagatcagtacaaaaattcttcaagaaatctaagatgtactggttcatgaagatgtgcttatgggtttctactctaatccttgaagaatcgccacactgtcttccacaatggttgaactaatttacattcccaccaacagtgtaaaagcgttcctatttccccacagcctcaccaacatctattgtttcctgactttttaataatcaccattctgactggca

SEQ ID NO: 52889 - DNA, 815 bp, Homo sapiens
ctttgtctctcgtgcccgcacgtgcgtgtctcggtcagtagccctgcgcttctccttcactctcggcggttcaggaggctctgccgcagccggggccctcctgtgacctgcatgtactgggggattcgcagggaggatgtcgggacaccccggaagctgggaaatgaactcggttgcctttgaggatgtggctgtgaacttcacccaggaggagtgggctttgttggatccttcccagaagaatctctatagagacgtgatgcaggaaaccttcaggaatctggcttccataggaaacaaaggggaagaccagagcattgaagatcagtacaaaaattcttcaagaaatctaagatgaggtttatataactttccaagacaaggaagttgtgcaaagcctcacagctactaagaggctgggctgggactcaggattaacttcgtgactccaaagcccatgcacctctgcaagccacacgaatcaagcagcttctctaaacctttgaagtcctggaaagtaactcttctgcaatagaagcaagaatcctgtgagattgggatccatctagtactcttcaccatttggaacaactgcctccagagaatgcttctgacgcatcttggaagaacttggaataacctgaggaaatggtcgatttgctaatttaggaaaccaatgttcgatacgtgtgtgatcccaataaagctattaacaaaaaacggctcacgtaggccgggcgcagtggctcacgcctgtaatcccagcactttgggaggccgaggcgggcagatcacaaggtcaggagatcgagacc

SEQ ID NO: 52890 - DNA, 806 bp, Homo sapiens
gcagccccacagcaccaaagagtcaatggtagttttggtcagaaatcttcagtgggccttttttgctcaatggataagttattttcatattttatttatttgtatgtttaattttaaaatattagttgacagataatattggatatattcaagatatctccaaatacacattgtgtggtaattgttacaaaatcagtatcatctgccgtgacttaaaagtttgtcctccgcctaaattcatgttgaaactttaaactccaaaacaatagtgttaacaggtgggggcctttaggaggtggtgaggtcataaaggctgtgccctcatcattgagatgaatgacttcataaaaggacttgagggagtgagttctgccctttctgcccctctgctgtctgtgaacacaacatctattgccacccgtgctgtacattagaatgccagaacttattcatcttataactgaaagtttgtaccttttcagcaatgtctccccatttcccctaccttctggcccctggaaaccactatgtagtctgtttctacgagttcaatgtttttaagctccatctataagtaagatcatataacatttgtctttctgtgtctgacttattttacttaatattctccagcttcatattttcacaaatgactttattcttttttatggctgaataatatttcattgcgtgtgtgtatcacaatttctgtatccattcatctattaatgagcatttaggttgtttccgtgtctttggctattgtggaaaatgctgcaataaacctgggattgcagaagtctctc

SEQ ID NO: 52891 - DNA, 1740 bp, Homo sapiens
ctttgtctctcgtgcccgcacgtgcgtgtctcggtcagtagccctgcgcttctccttcactctcggcggttcaggaggctctgccgcagccggggccctcctgtgacctgcatgtactgggggattcgcagggaggatgtcgggacaccccggaagctgggaaatgatttccagtgctttcagtctcatccatcctctacaaaaatgtggaatattttagaactcggttgcctttgaggatgtggctgtgaacttcacccaggaggagtgggctttgttggatccttcccagaagaatctctatagagacgtgatgcaggaaaccttcaggaatctggcttccataggaaacaaaggggaagaccagagcattgaagatcagtacaaaaattcttcaagaaatctaagttcatttcagatacatcagagaaatcacactggagagaaaccctatgaatgtatggaatgtgggaaagccttaggtttttcccgttctcttaatagacataaaaggattcacactggagaaaaacgctatgaatgtaagcaatgtgggaaagccttcagtcgttccagtcaccttcgtgaccatgaaagaactcatactggagagaaaccctatgaatgtaagcactgtgggaaagccttccgttactccaattgccttcattaccatgaaagaactcacactggagagaaaccttatgtgtgcatggaatgtggcaaagctttcagttgtctcagttccttgcaaggacatataaaggctcatgctggtgaagaaccctatccatgtaagcaatgtgggaaagccttcagatacgccagttcccttcagaaacacgagaaaactcatattgcacagaaaccctatgtatgtaacaattgtggtaaaggcttcagatgttccagttcccttcgtgaccatgaaaggactcatactggagagaaaccctatgaatgtcagaaatgtggcaaagcctttagtcgtgctagtaccctttggaagcataaaaaaactcatactggagaaaagccctataaatgtaaaaaaatgtaaaggctttaatcactacagtttttgtcaaaaacatgaacagtcacatacttgagagaaactgtgaatgtaaggtgtaggaaagtacttaattttcccagatttcctcaaatacatgaaacgaatcaaactggagataaaccctatgactataagcaataaggtaaagcattcaatttttccatttctttttgaaaacttgaaaggactcactgaagaaaatccatatgaatgtttaaaatgtggtaaggcctgcagttgttccagtggtatttgatggtataacataactcattctagagaaaaactttatgaaggtatcgaatgtgagaatgccttcatttatcctataactcactcagagacacatggtaacacatactccagattgaccttataaataaaagaatgcccaccagattgaaatcctagaaatacagaaaattctgaattttaacaattactttaaaggtcatgtgaaaactcccactggaaataaatcctgtaaatgtaaatattatggaaaaccttatggaaaataattatagtacaattctcaagaaaattcactatgtgaatgagatgttttaggagctataaataaattgaatatattggttgctcatttttgaagagagtctctagaatatagattttcacttcttttgaaaaaaaaaaaattg

SEQ ID NO: 52892 - DNA, 979 bp, Homo sapiens
gcagccccacagcaccaaagagtcaatggtagttttggtcagaaatcttcagtgggccttttttgctcaatggataagttattttcatattttatttatttgtatgtttaattttaaaatattagttgacagataatattggatatattcaagatatctccaaatacacattgtgtggtaattgttacaaaatcagtatcatctgccgtgacttaaaagtttgtcctccgcctaaattcatgttgaaactttaaactccaaaacaatagtgttaacaggtgggggcctttaggaggtggtgaggtcataaaggctgtgccctcatcattgagatgaatgacttcataaaaggacttgagggagtgagttctgccctttctgcccctctgctgtctgtgaacataacattcaggatgtcatcttgaaagcagagaccaaggtcttcaccagagacagtctgccaatggcttgattttgcacttcccagcctatataacttatcatgccttttcttgcagatgaggtttatataactttccaagacaaggaagttgtgcaaagcctcacagctactaagaggctgggctgggactcaggattaacttcgtgactccaaagcccatgcacctctgcaagccacacgaatcaagcagcttctctaaacctttgaagtcctggaaagtaactcttctgcaatagaagcaagaatcctgtgagattgggatccatctagtactcttcaccatttggaacaactgcctccagagaatgcttctgacgcatcttggaagaacttggaataacctgaggaaatggtcgatttgctaatttaggaaaccaatgttcgatacgtgtgtgatcccaataaagctattaacaaaaaacggctcacgtaggccgggcgcagtggctcacgcctgtaatcccagcactttgggaggccgaggcgggcagatcacaaggtcaggagatcgagacc

SEQ ID NO: 52893 - DNA, 959 bp, Homo sapiens
gcagccccacagcaccaaagagtcaatggtagttttggtcagaaatcttcagtgggccttttttgctcaatggataagttattttcatattttatttatttgtatgtttaattttaaaatattagttgacagataatattggatatattcaagatatctccaaatacacattgtgtggtaattgttacaaaatcagtatcatctgccgtgacttaaaagtttgtcctccgcctaaattcatgttgaaactttaaactccaaaacaatagtgttaacaggtgggggcctttaggaggtggtgaggtcataaaggctgtgccctcatcattgagatgaatgacttcataaaaggacttgagggagtgagttctgccctttctgcccctctgctgtctgtgaacataacattcaggatgtcatcttgaaagcagagaccaaggtcttcaccagagacagtctgccaatggcttgattttgcacttcccagcctatataactatgaggtttatataactttccaagacaaggaagttgtgcaaagcctcacagctactaagaggctgggctgggactcaggattaacttcgtgactccaaagcccatgcacctctgcaagccacacgaatcaagcagcttctctaaacctttgaagtcctggaaagtaactcttctgcaatagaagcaagaatcctgtgagattgggatccatctagtactcttcaccatttggaacaactgcctccagagaatgcttctgacgcatcttggaagaacttggaataacctgaggaaatggtcgatttgctaatttaggaaaccaatgttcgatacgtgtgtgatcccaataaagctattaacaaaaaacggctcacgtaggccgggcgcagtggctcacgcctgtaatcccagcactttgggaggccgaggcgggcagatcacaaggtcaggagatcgagacc

SEQ ID NO: 52894 - DNA, 907 bp, Homo sapiens
  misc_feature (578)..(579): n is a, c, g, or t
ctttgtctctcgtgcccgcacgtgcgtgtctcggtcagtagccctgcgcttctccttcactctcggcggttcaggaggctctgccgcagccggggccctcctgtgacctgcatgtactgggggattcgcagggaggatgtcgggacaccccggaagctgggaaatgaactcggttgcctttgaggatgtggctgtgaacttcacccaggaggagtgggctttgttggatccttcccagaagaatctctatagagacgtgatgcaggaaaccttcaggaatctggcttccataggaaacaaaggggaagaccagagcattgaagatcagtacactctagtaagttttgggtctatgtatgtacctttctttctctgcactcttggggcaaggaattgccatgtgattgatcggagaattgttcattttaaattagtccagaatttttatgttttatttcttctaaaacaaacgaaaacgggatacgtgtagaacatgtgagtttgttacatgggtatacatgtgccgcggtggtttgctgcacctattgacctgtcctctaagttccctcccctcaccnncaacccccaacagcccctggtgtgtgttgttccccctctgtttccatgtgttctcaatgttcagctctcacttatgagtgagaacgtgcagtgtttagttttctgttcctgtgtttgctgaggatgatgacttccagcttcatccatgtccctgcaaagcacatgatctcattcctttttatgtctacatagtgttctatggtatatatatacacatatatatatacaccacattttctttatccagtctatcattgatgggcatttgggttggttccatgtctttgctgttgtaaataatgttgcaataaacatacgtgtgcacgtg

SEQ ID NO: 52895 - DNA, 381 bp, Homo sapiens
aaagagcaaatgcatagcattggcactggtggtgtgaaagcacagcccaggatgcctcttcagtcacagtcacccactaaagctattcgatgagcacctagcatgggctaggtacctagaccaacacacagtttcaccaacatccctggctaaggtcacgtgatccacagagatgcttgtttgctgagcatgagtcagatctggagaaagtcctgagaaagtcccaaggcttctatgtctgaagttccaagccaggatggaagcagccaattcacctgctatagactaagtgtttgtgtcttcctcccctcaatttatatgctgaaaccctaaccctcatggtacttggaggtaggggctgggttagattaagtcatgagg

SEQ ID NO: 52896 - DNA, 1485 bp, Homo sapiens
cccttgaggcaggtactgtcacactgtccatttcccgggggaagaagcggatccagaaaagttaaactctcccagggccgaggatggaatcagagctggagctgtgacctggaaacccataaccacaatacagatgagccctgctgaggtgggggaagccttggattcctgaatcccaggctacagaaatcgggaagggtgtgtggacgtgaaatagctccgactgggaagaatccaggtaggagtggggtgcggggaggtactttgagcaggcaaaacagaacaaaagggcacactgcacgcgggtctgacaccagaagaccccggtcgtcctatcattcccgaagggttaacatgctctcgaggaaaagcaagtgattcgcctaagtaagaatggggtggcgcctctcctatttttttaaaatagagatagagtagcgctatcttgcccgggctggcctcaagcaatcctttcccacctctgcctcctaaaatgctggcattacagccctgagccaccgcgcccggcccagcgccccgtctcaaaacaagatattacttccgctccaaacaaagatgggccagctaacgagcgcgggggaaacatccgcccggaaggccacttgaaggcacttccgccctctcttaacatggagccggcggaaggggtggtgtagggccgggcgataatggcggcgtcgaggctggagctaaacctggtgcggctgctatcccgctgcgaggcgatggcagcggagaaacgggacccggacgagtggcgcctggagaagtacgtgggagccctagaggacatgttgcaggccctgaaggtccacgcgagcaaaccggcctctgaggtgatcaatgaatattcctggaaggtggattttctgaaggggatgctgcaagccgagaagctgacctcctcctcagagaaagcactggccaaccagttcctggcccctggccgtgtgccaaccacagccagagagcgagtgcccgccacaaagacggtgcatctgcagtcacgggcgcggtacaccagcgagatgcggagtgagctactaggcacggactctgcagagcctgagatggacgtaaggaagagaactggagtggcagggtcccagccagtgagtgagaagcagtcggcagctgagctagacctcgtcctgcagcgacatcagaacctccaggaaaagctggcggaagagatgctaggactggcccggagcctcaagaccaataccctggccgcccagagtgtcatcaagaaggacaaccagaccctgtcacactcactgaaaatggcggaccagaacctggagaaactgaagacggagtcagagcgtctggagcagcacacgcagaagtcagtcaactggctgctctgggccatgctcattatcgtctgcttcatcttcattagcatgatcctcttcattcgaatcatgcctaaactcaaataaagacccccgcccacct

SEQ ID NO: 52897 - DNA, 1379 bp, Homo sapiens
cccttgaggcaggtactgtcacactgtccatttcccgggggaagaagcggatccagaaaagttaaactctcccagggccgaggatggaatcagagctggagctgtgacctggaaacccataaccacaatacagatgagccctgctgaggtgggggaagccttggattcctgaatcccaggctacagaaatcgggaagggtgtgtggacgtgaaatagctccgactgggaagaatccaggtaggagtggggtgcggggaggtactttgagcaggcaaaacagaacaaaagggcacactgcacgcgggtctgacaccagaagaccccggtcgtcctatcattcccgaagggttaacatgctctcgaggaaaagcaagtgattcgcctaagtaagaatggggtggcgcctctcctatttttttaaaatagagatagagtagcgctatcttgcccgggctggcctcaagcaatcctttcccacctctgcctcctaaaatgctggcattacagccctgagccaccgcgcccggcccagcgccccgtctcaaaacaagatattacttccgctccaaacaaagatgggccagctaacgagcgcgggggaaacatccgcccggaaggccacttgaaggcacttccgccctctcttaacatggagccggcggaaggggtggtgtagggccgggcgataatggcggcgtcgaggctggagctaaacctggtgcggctgctatcccgctgcgaggcgatggcagcggagaaacgggacccggacgagtggcgcctggagaagtacgtgggagccctagaggacatgttgcaggccctgaaggtccacgcgagaaccagttcctggcccctggccgtgtgccaaccacagccagagagcgagtgcccgccacaaagacggtgcatctgcagtcacgggcgcggtacaccagcgagatgcggagtgagctactaggcacggactctgcagagcctgagatggacgtaaggaagagaactggagtggcagggtcccagccagtgagtgagaagcagtcggcagctgagctagacctcgtcctgcagcgacatcagaacctccaggaaaagctggcggaagagatgctaggactggcccggagcctcaagaccaataccctggccgcccagagtgtcatcaagaaggacaaccagaccctgtcacactcactgaaaatggcggaccagaacctggagaaactgaagacggagtcagagcgtctggagcagcacacgcagaagtcagtcaactggctgctctgggccatgctcattatcgtctgcttcatcttcattagcatgatcctcttcattcgaatcatgcctaaactcaaataaagacccccgcccacct

SEQ ID NO: 52898 - DNA, 1435 bp, Homo sapiens
cccttgaggcaggtactgtcacactgtccatttcccgggggaagaagcggatccagaaaagttaaactctcccagggccgaggatggaatcagagctggagctgtgacctggaaacccataaccacaatacagatgagccctgctgaggtgggggaagccttggattcctgaatcccaggctacagaaatcgggaagggtgtgtggacgtgaaatagctccgactgggaagaatccaggtaggagtggggtgcggggaggtactttgagcaggcaaaacagaacaaaagggcacactgcacgcgggtctgacaccagaagaccccggtcgtcctatcattcccgaagggttaacatgctctcgaggaaaagcaagtgattcgcctaagtaagaatggggtggcgcctctcctatttttttaaaatagagatagagtagcgctatcttgcccgggctggcctcaagcaatcctttcccacctctgcctcctaaaatgctggcattacagccctgagccaccgcgcccggcccagcgccccgtctcaaaacaagatattacttccgctccaaacaaagatgggccagctaacgagcgcgggggaaacatccgcccggaaggccacttgaaggcacttccgccctctcttaacatggagccggcggaaggggtggtgtagggccgggcgataatggcggcgtcgaggctggagctaaacctggtgcggctgctatcccgctgcgaggcgatggcagcggagaaacgggacccggacgagtggcgcctggagaagcaaaccggcctctgaggtgatcaatgaatattcctggaaggtggattttctgaaggggatgctgcaagccgagaagctgacctcctcctcagagaaagcactggccaaccagttcctggcccctggccgtgtgccaaccacagccagagagcgagtgcccgccacaaagacggtgcatctgcagtcacgggcgcggtacaccagcgagatgcggagtgagctactaggcacggactctgcagagcctgagatggacgtaaggaagagaactggagtggcagggtcccagccagtgagtgagaagcagtcggcagctgagctagacctcgtcctgcagcgacatcagaacctccaggaaaagctggcggaagagatgctaggactggcccggagcctcaagaccaataccctggccgcccagagtgtcatcaagaaggacaaccagaccctgtcacactcactgaaaatggcggaccagaacctggagaaactgaagacggagtcagagcgtctggagcagcacacgcagaagtcagtcaactggctgctctgggccatgctcattatcgtctgcttcatcttcattagcatgatcctcttcattcgaatcatgcctaaactcaaataaagacccccgcccacct

SEQ ID NO: 52899 - DNA, 1534 bp, Homo sapiens
cccttgaggcaggtactgtcacactgtccatttcccgggggaagaagcggatccagaaaagttaaactctcccagggccgaggatggaatcagagctggagctgtgacctggaaacccataaccacaatacagatgagccctgctgaggtgggggaagccttggattcctgaatcccaggctacagaaatcgggaagggtgtgtggacgtgaaatagctccgactgggaagaatccaggtaggagtggggtgcggggaggtactttgagcaggcaaaacagaacaaaagggcacactgcacgcgggtctgacaccagaagaccccggtcgtcctatcattcccgaagggttaacatgctctcgaggaaaagcaagtgattcgcctaagtaagaatggggtggcgcctctcctatttttttaaaatagagatagagtagcgctatcttgcccgggctggcctcaagcaatcctttcccacctctgcctcctaaaatgctggcattacagccctgagccaccgcgcccggcccagcgccccgtctcaaaacaagatattacttccgctccaaacaaagatgggccagctaacgagcgcgggggaaacatccgcccggaaggccacttgaaggcacttccgccctctcttaacatggagccggcggaaggggtggtgtagggccgggcgataatggcggcgtcgaggctggagctaaacctggtgcggctgctatcccgctgcgaggcgatggcagcggagaaacgggacccggacgagtggcgcctggagaagtacgtgggagccctagaggacatgttgcaggccctgaaggtccacgcgagcaaaccggcctctgaggtgatcaatgaatattcctggaaggtggattttctgaaggggatgctgcaagccgagaagctgacctcctcctcagagaaagcactggccaaccagttcctggcccctggccgtgtgccaaccacagccagagagcgagtgcccgccacaaagacggtgcatctgcagtcacgggcgcggtacaccagcgagatgcggagtgagctactaggcacggactctgcaggtgagtcaccatgaacacaacaggacttgagggccagctgactaggacaagacatgtatccttgctgccccggggcctccatgccgagactccatgccctgactccaacaggagcatcaccaaactacacctggaggaagagccaggacagaggaaatggccccgagaggaaacaaagctaggcacagtggctcacacctgtaatttcggaggctgaggcaggtggatcacctgaggtcaggagtttgagaccaacctggccaacatgacaaaaccatgtctctactaaaaatacaaaacttagccggatgcagtgccacgtgtctgtagtcccagctactcgggaggctgaggcaggagaattgcttgaacccaggaggtggaggttgcaatgagctgagatcacaccactgcactccagccggggcgacagagcaagactccgtctcaa

SEQ ID NO: 52900 - DNA, 624 bp, Homo sapiens
gcggacggcgtggagtgactatcccaccgccgcgggattgacttctaaagactcttggtatgtgaggaagaaacctggaagaggaagaggaaagcaaaggagtcagggatggctcttcctcagggtctattgacattcagggatgtggccatagaattctctcaggaggagtggaaatgcctggaccctgctcagaggactctatacagggacgtgatgctggagaattataggaacctggtctccctggtggagtggcagggtcccagccagtgagtgagaagcagtcggcagctgagctagacctcgtcctgcagcgacatcagaacctccaggaaaagctggcggaagagatgctaggactggcccggagcctcaagaccaataccctggccgcccagagtgtcatcaagaaggacaaccagaccctgtcacactcactgaaaatggcggaccagaacctggagaaactgaagacggagtcagagcgtctggagcagcacacgcagaagtcagtcaactggctgctctgggccatgctcattatcgtctgcttcatcttcattagcatgatcctcttcattcgaatcatgcctaaactcaaataaagacccccgcccacct

SEQ ID NO: 52901 - DNA, 309 bp, Homo sapiens
aggaacacgagatgtgagtaaggatacccccttaaaagaggtgttatactccggtgctggaagctaaagttcggaccacaaactagtaaaagcattctacgagtacaacccgatagctagccaggattcggagtctgaaacaacactcgccttttttgcttggcctgttttgactctgcagagcctgagatggacgtaaggaagagaacgtgagtgtctgcggccctggggcagtagtggcaattgggcggtgcggcagggacggggtagcagtggccaaaccctggaccaccgaggcactaccacaag

SEQ ID NO: 52902 - DNA, 749 bp, Homo sapiens
ccatgatcaggacatgggaaagacccccgggtgacaatccacttttcctccccagtacgtgggagccctagaggacatgttgcaggccctgaaggtccacgcgagcaaaccggcctctgaggtgatcaatgaatattcctggaaggtggattttctgaaggggatgctgcaagccgagaagctgacctcctcctcagagaaagcactggccaaccagttcctggcccctggccgtgtgccaaccacagccagagagcgagtgcccgccacaaagacggtgcatctgcagtcacgggcgcggtacaccagcgagatgcggagtgagctactaggcacggactctgcagagcctgagatggacgtaaggaagagaactggagtggcagggtcccagccagtgagtgagaagcagtcggcagctgagctagacctcgtcctgcagcgacatcagaacctccaggaaaagctggcggaagagatgctaggactggcccggagcctcaagaccaataccctggccgcccagagtgtcatcaagaaggacaaccagaccctgtcacactcactgaaaatggcggaccagaacctggagaaactgaagacggagtcagagcgtctggagcagcacacgcagaagtcagtcaactggctgctctgggccatgctcattatcgtctgcttcatcttcattagcatgatcctcttcattcgaatcatgcctaaactcaaataaagacccccgcccacct

SEQ ID NO: 52903 - DNA, 1687 bp, Homo sapiens
cccttgaggcaggtactgtcacactgtccatttcccgggggaagaagcggatccagaaaagttaaactctcccagggccgaggatggaatcagagctggagctgtgacctggaaacccataaccacaatacagatgagccctgctgaggtgggggaagccttggattcctgaatcccaggctacagaaatcgggaagggtgtgtggacgtgaaatagctccgactgggaagaatccaggtaggagtggggtgcggggaggtactttgagcaggcaaaacagaacaaaagggcacactgcacgcgggtctgacaccagaagaccccggtcgtcctatcattcccgaagggttaacatgctctcgaggaaaagcaagtgattcgcctaagtaagaatggggtggcgcctctcctatttttttaaaatagagatagagtagcgctatcttgcccgggctggcctcaagcaatcctttcccacctctgcctcctaaaatgctggcattacagccctgagccaccgcgcccggcccagcgccccgtctcaaaacaagatattacttccgctccaaacaaagatgggccagctaacgagcgcgggggaaacatccgcccggaaggccacttgaaggcacttccgccctctcttaacatggagccggcggaaggggtggtgtagggccgggcgataatggcggcgtcgaggctggagctaaacctggtgcggctgctatcccgctgcgaggcgatggcagcggagaaacgggacccggacgagtggcgcctggagaagtacgtgggagccctagaggacatgttgcaggccctgaaggtccacgcgagcaaaccggcctctgaggtgatcaatgaatattcctggaaggtggattttctgaaggggatgctgcaagccgagaagctgacctcctcctcagagaaagcactggccaaccagttcctggcccctggccgtgtgccaaccacagccagagagcgagtgcccgccacaaagacggtgcatctgcagtcacgggcgcggtacaccagcgagatgcggagtgagctactaggcacggactctgcagagcctgagatggacgtaaggaagagaactggagtggcagggtcccagccagtgagtgagaagcagtcggcagctgagctagacctcgtcctgcagcgacatcagaacctccaggaaaagctggcggaagagatgctaggactggcccggagcctcaagaccaataccctggccgcccagagtgtcatcaagaaggacaaccagaccctgtcacactcactgaaaatggcggaccagaacctggagaaactgaagacggagtcagagcgtctggagcagcacacgcagaagtcagtcaactggctgctctgggccatgctcattatcgtctgcttcatcttcattagcatgatcctcttcattcgaatcatgcctaaactcaaataaagacccccgcccacctaaaaaaaaaaaaaaaaaaaaaaaacctcgagagggcacctatggcaggggggcgggaaacaggaggggactggaaagtgggcacaggggacaaagcgtgttccctggagcccaggtttctgggcacacacgggggaacgattgcgcgggcctccctaatagggagccgaataactcgcaaaaacgcccggaacccgggtagg

SEQ ID NO: 52904 - DNA, 1414 bp, Homo sapiens
cccttgaggcaggtactgtcacactgtccatttcccgggggaagaagcggatccagaaaagttaaactctcccagggccgaggatggaatcagagctggagctgtgacctggaaacccataaccacaatacagatgagccctgctgaggtgggggaagccttggattcctgaatcccaggctacagaaatcgggaagggtgtgtggacgtgaaatagctccgactgggaagaatccaggtaggagtggggtgcggggaggtactttgagcaggcaaaacagaacaaaagggcacactgcacgcgggtctgacaccagaagaccccggtcgtcctatcattcccgaagggttaacatgctctcgaggaaaagcaagtgattcgcctaagtaagaatggggtggcgcctctcctatttttttaaaatagagatagagtagcgctatcttgcccgggctggcctcaagcaatcctttcccacctctgcctcctaaaatgctggcattacagccctgagccaccgcgcccggcccagcgccccgtctcaaaacaagatattacttccgctccaaacaaagatgggccagctaacgagcgcgggggaaacatccgcccggaaggccacttgaaggcacttccgccctctcttaacatggagccggcggaaggggtggtgtagggccgggcgataatggcggcgtcgaggctggagctaaacctggtgcggctgctatcccgctgcgaggcgatggcagcggagaaacgggacccggacgagtggcgcctggagaagcaaaccggcctctgaggtgatcaatgaatattcctggaaggtggattttctgaaggggatgctgcaagccgagaagctgacctcctcctcagagaaagcactggccaaccagttcctggcccctggccgtgtgccaaccacagccagagagcgatggagtggcagggtcccagccagtgagtgagaagcagtcggcagctgagctagacctcgtcctgcagcgacatcagaacctccaggaaaagctggcggaagagatgctaggactggcccggagcctcaagaccaataccctggccgcccagagtgtcatcaagaaggacaaccagaccctgtcacactcactgaaaatggcggaccagaacctggagaaactgaagacggagtcagagcgtctggagcagcacacgcagaagtcagtcaactggctgctctgggccatgctcattatcgtctgcttcatcttcattagcatgatcctcttcattcgaatcatgcctaaactcaaataaagacccccgcccacctaaaaaaaaatagaaaaaaaatcggggttatggggggggaaaagggtaagactgggcgggaaaggtttgaacagtcttggaaaggaaattggggcc

SEQ ID NO: 52905 - DNA, 402 bp, Homo sapiens
gcatcagagaaggcttcccagcacaggagcattgtggctggggctttgcgggatgaataggagtttcgtagaaggcaaaaatggcattcccagcagagggcacagcaccagcaagcgacaagaggtgcaggccagtcccagggaagtagagagaggccattcttggccccagtcctgttgacaccttttccacctcccccacagaccctgtcacactcactgaaaatggcggaccagaacctggagaaactgaagacggagtcagagcgtctggagcagcacacgcagaagtcagtcaactggctgctctgggccatgctcattatcgtctgcttcatcttcattagcatgatcctcttcattcgaatcatgcctaaactcaaataaagacccccgcccacc

SEQ ID NO: 52906 - DNA, 1580 bp, Homo sapiens
cccttgaggcaggtactgtcacactgtccatttcccgggggaagaagcggatccagaaaagttaaactctcccagggccgaggatggaatcagagctggagctgtgacctggaaacccataaccacaatacagatgagccctgctgaggtgggggaagccttggattcctgaatcccaggctacagaaatcgggaagggtgtgtggacgtgaaatagctccgactgggaagaatccaggtaggagtggggtgcggggaggtactttgagcaggcaaaacagaacaaaagggcacactgcacgcgggtctgacaccagaagaccccggtcgtcctatcattcccgaagggttaacatgctctcgaggaaaagcaagtgattcgcctaagtaagaatggggtggcgcctctcctatttttttaaaatagagatagagtagcgctatcttgcccgggctggcctcaagcaatcctttcccacctctgcctcctaaaatgctggcattacagccctgagccaccgcgcccggcccagcgccccgtctcaaaacaagatattacttccgctccaaacaaagatgggccagctaacgagcgcgggggaaacatccgcccggaaggccacttgaaggcacttccgccctctcttaacatggagccggcggaaggggtggtgtagggccgggcgataatggcggcgtcgaggctggagctaaacctggtgcggctgctatcccgctgcgaggcgatggcagcggagaaacgggacccggacgagtggcgcctggagaagtacgtgggagccctagaggacatgttgcaggccctgaaggtccacgcgagcaaaccggcctctgaggtgatcaatgaatattcctggaaggtggattttctgaaggggatgctgcaagccgagaagctgacctcctcctcagagaaagcactggccaaccagttcctggcccctggccgtgtgccaaccacagccagagagcgagtgcccgccacaaagacggtgcatctgcagtcacgggcgcggtacaccagcgagatgcggagtgagctactaggcacggactctgcagagcctgagatggacgtaaggaagagaactggagtggcagggtcccagccagtgagtgagaagcagtcggcagctgagctagacctcgtcctgcagcgacatcagaacctccaggaaaagctggcggaagagatgctaggactggcccggagcctcaagaccaataccctggccgcccagagtgtcatcaagaaggacaaccagaccctgtcacactcactgaaaatggcggaccagaacctggagaaactgaagacggagtcagagcgtctggagcagcacacgcagaagtcagtcaactggctgctctgggccatgctcattatcgtctgcttcatcttcattagcatgatcctcttcattcgaatcatgcctaaactcaaataaagacccccgcccacctaaaaaaaaatagaaaaaaaatcggggttatggggggggaaaagggtaagactgggcgggaaaggtttgaacagtcttggaaaggaaattggggcc

SEQ ID NO: 52907 - DNA, 1310 bp, Homo sapiens
cccttgaggcaggtactgtcacactgtccatttcccgggggaagaagcggatccagaaaagttaaactctcccagggccgaggatggaatcagagctggagctgtgacctggaaacccataaccacaatacagatgagccctgctgaggtgggggaagccttggattcctgaatcccaggctacagaaatcgggaagggtgtgtggacgtgaaatagctccgactgggaagaatccaggtaggagtggggtgcggggaggtactttgagcaggcaaaacagaacaaaagggcacactgcacgcgggtctgacaccagaagaccccggtcgtcctatcattcccgaagggttaacatgctctcgaggaaaagcaagtgattcgcctaagtaagaatggggtggcgcctctcctatttttttaaaatagagatagagtagcgctatcttgcccgggctggcctcaagcaatcctttcccacctctgcctcctaaaatgctggcattacagccctgagccaccgcgcccggcccagcgccccgtctcaaaacaagatattacttccgctccaaacaaagatgggccagctaacgagcgcgggggaaacatccgcccggaaggccacttgaaggcacttccgccctctcttaacatggagccggcggaaggggtggtgtagggccgggcgataatggcggcgtcgaggctggagctaaacctggtgcggctgctatcccgctgcgaggcgatggcagcggagaaacgggacccggacgagtggcgcctggagaagtacgtgggagccctagaggacatgttgcaggccctgaaggtccacgcgagcaaaccggcctctgaggtgatcaatgaatattcctggaaggtggattttctgaaggggatgctgcaagccgagaagctgacctcctcctcagagaaagcactggccaaccagttcctggcccctggccgtgtgccaaccacagccagagagcgagtgcccgccacaaagacggtgcatctgcagtcacgggcgcggtacaccagcgagatgcggagtgagctactaggcacggactctgcagagcctgagatggacgtaaggaagagaacaccctgtcacactcactgaaaatggcggaccagaacctggagaaactgaagacggagtcagagcgtctggagcagcacacgcagaagtcagtcaactggctgctctgggccatgctcattatcgtctgcttcatcttcattagcatgatcctcttcattcgaatcatgcctaaactcaaataaagacccccgcccacct

SEQ ID NO: 52908 - DNA, 1468 bp, Homo sapiens
cccttgaggcaggtactgtcacactgtccatttcccgggggaagaagcggatccagaaaagttaaactctcccagggccgaggatggaatcagagctggagctgtgacctggaaacccataaccacaatacagatgagccctgctgaggtgggggaagccttggattcctgaatcccaggctacagaaatcgggaagggtgtgtggacgtgaaatagctccgactgggaagaatccaggtaggagtggggtgcggggaggtactttgagcaggcaaaacagaacaaaagggcacactgcacgcgggtctgacaccagaagaccccggtcgtcctatcattcccgaagggttaacatgctctcgaggaaaagcaagtgattcgcctaagtaagaatggggtggcgcctctcctatttttttaaaatagagatagagtagcgctatcttgcccgggctggcctcaagcaatcctttcccacctctgcctcctaaaatgctggcattacagccctgagccaccgcgcccggcccagcgccccgtctcaaaacaagatattacttccgctccaaacaaagatgggccagctaacgagcgcgggggaaacatccgcccggaaggccacttgaaggcacttccgccctctcttaacatggagccggcggaaggggtggtgtagggccgggcgataatggcggcgtcgaggctggagctaaacctggtgcggctgctatcccgctgcgaggcgatggcagcggagaaacgggacccggacgagtggcgcctggagaagtacgtgggagccctagaggacatgttgcaggccctgaaggtccacgcgagcaaaccggcctctgaggtgatcaatgaatattcctggaaggtggattttctgaaggggatgctgcaagccgagaagctgacctcctcctcagagaaagcactggccaaccagttcctggcccctggccgtgtgccaaccacagccagagagcgagtgcccgccacaaagacggtgcatctgcagtcacgggcgcggtacaccagcgagatgcggagtgagctactaggcacggactctgcagagcctgagatggacgtaaggaagagaacaccctgtcacactcactgaaaatggcggaccagaacctggagaaactgaagacggagtcagagcgtctggagcagcacacgcagaagtcagtcaactggctgctctgggccatgctcattatcgtctgcttcatcttcattagcatgatcctcttcattcgaatcatgcctaaactcaaataaagacccccgcccacctacttaaaaaaaaaaagaaaaaaaattgtggggggccggccgaaaagttttaaaccctcggtggggggggcccaggttggaacggcaggtccgaaaaaccggcgaggggggttccccaaaagcccgggccggtggaaacgggtggcccggtcaaggcgc

SEQ ID NO: 52909 - DNA, 368 bp, Homo sapiens
ggttgaggctgcagtgagctgagatcgtgccactacactccagcctggatgacggtgacactctgtctcagaaaaaaagggaaagaaataattctcatttatacaggagagaaatcctatgaatgtaaggaatatgggaatacattcagtttccaaagatatgaaaagactaactggaaaaaaatccaaagacctcagatattccagttctattcagagccataaaaggactcatactggagaaaaattgtagaaatgtacagaatatggggaaactctcattgctctcatctccattcaaagacacgtgtcagtgcacactggagatggatggtatgaatcgaagaatacacactggatggaaacgt

SEQ ID NO: 52910 - DNA, 644 bp, Homo sapiens
cctggaggtgcctgatgtgttccaacagatgcgggagctgggcctggctcggcgggtgcccgacagcctcttccgttcgctgctggagcgctatctcacagcggccactgctagcgtgggctccggggtcccggttctctcgcgagtcccgctcaagcaaaagcagcctggtctggattacttctatccccagctgcagctgggcgtgacggaggccgtggtcataacccaagtgtgccatccccaccgcattcactgccagctccgcagcgtctcgcaggagatccaccgcctctccgagagcatggcccaggtataccggggttccacggggacaggggatgagaactctaccagtgccacctgggaggagagggaggagagcccagataagccgggctctccgtgtgcatcctgtggcctggatggacattggtacagagcactgttgcttgagacttttcggccccagcgctgtgcccaggtgcttcatgtggactatggaaggaaggagttagtgagttgcagcagccttcggtacttgctgcctgaatattttcgaatgccggtggtgacctacccttgtgctttgtatggactctgggacggtgggagaggctggtctcggtcacaggtcggtgacc

SEQ ID NO: 52911 - DNA, 237 bp, Homo sapiens
gtggtgcacagtattggatttgggaagagtgtggtctgaatattctctgaaagtaaaattttgccttgtcactctgctaccatatttcaaagcttaaagataaatatcctcataatgttaatttaatcaactaacattaattatctattattctccatatatcagggagaatgaaaaatacataagacatgaaacctattcagggaaaacttaaaatgtgaattgactctaaagtgt

SEQ ID NO: 52912 - DNA, 434 bp, Homo sapiens
gttttagattttctgcagatggcatagattcattgctgaatctctcaattcttgtgtttccaggtatgaaaacagagctgtatccagcaaggctggcacacagtggtctagcagtatcactggtgtgctctctccaaatgtgtttataggtgtttactttcaatcattataatcattataatttgttctctcagcccccataccaactagggttatcaggtgacataacagtgaaatctttgtgtcgttcatttgctaaggtctccatcaactcagcttggctatattgtaaacaggagcagacctctaaacccagtccctgtgagtgacccgactcaggagacgtggagtagccaagcatgatgaagtgcagcttccagagctggcggttgttgaagtcaggaacattcacccaaagatgtaacgtgatctga

SEQ ID NO: 52913 - DNA, 565 bp, Homo sapiens
ctattcctcagagaggaccccagagaataattgattttgcaggaaaatgggtttgattttggttatctctctgagtggggaaaacaatctgatatttgtaatagctgcaaaaggagagtttttcttagggctacatctccaagattatctcaactcccagtagaaccggtaacatggcaaaaagcatcggcttagaattttgactggaaacagttgtgcgtgtgttggaggacctagttcttgattcaggggaaagctggttctttacaaagttgaaaatcacagtggctcacacctgtaatccccaaactttgggaggccaaggcatgcagattgcttcaggtcaggagtttgagaccagcccaggcaacatggggaatccccatctttacaagaaatacaaaacttagctgagtgtgatggtgcgtgcctgtaatcctagctatgtggggtgggggctgtgatgggacgatgtctgagatgggagcctgggaggttgagtgagctgagattgcgccactgcgctccagcttgggtgacagaggaagaccctgtctcaaaaaaa

SEQ ID NO: 52914 - DNA, 758 bp, Homo sapiens
  misc_feature (617)..(617): n is a, c, g, or t
ctattcctcagagaggaccccagagaataattgattttgcaggaaaatgggtttgattttggttatctctctgagtggggaaaacaatctgatatttgtaatagctgcaaaaggagagtttttcttagggctacatctccaagattatctcaactcccagtagaaccggtaacatggcaaaaagcatcggcttagaattttgactggaaacagttgtgcgtgtgttggaggacctagttcttgattcaggggaaagctggttctttacaaagttgaaaatcacagtggctcacacctgtaatccccaaagtgctgggattacaggcttgagccactccgccctgcctgttaattacaattaatgccatgttctttcattcattaaaagatttttttttttttttgagacggagtcttgctctgtcgcccaggctggagcagtggtgcacagtcttggctcaccgcaagctccgcctcctgggttcacgccattctcctgcctcagcctcccgagtagctgggactgcaggcgcccgccacacacgcccggctaattcttttttggattttttagtagagacagagtttaccatgttagccagggtggtcttgatctnctgaccctgtgatcccgccttcttggcctcccaaatgctgggattgcaagcctgaagcactgtgccaggccgattaataagatttctttgtattaagttacttgacagttatataaaagtaatgttgaggttaggtgagct

SEQ ID NO: 52915 - DNA, 704 bp, Homo sapiens
  misc_feature (563)..(563): n is a, c, g, or t
ctattcctcagagaggaccccagagaataattgattttgcaggaaaatgggtttgattttggttatctctctgagtggggaaaacaatctgatatttgtaatagctgcaaaaggagagtttttcttagggctacatctccaagattatctcaactcccagtagaaccggtaacatggcaaaaagcatcggcttagaattttgactggaaacagttgtgcgtgtgttggaggacctagttcttgattcaggggaaagctggttctttacaaagttgaaaatcacagtggctcacacctgtaatccccaaagtgctgggattacaggcttgagccactccgccctgcctgttaattacaattaatgccatgttctttcattcattgcagtggtgcacagtcttggctcaccgcaagctccgcctcctgggttcacgccattctcctgcctcagcctcccgagtagctgggactgcaggcgcccgccacacacgcccggctaattcttttttggattttttagtagagacagagtttaccatgttagccagggtggtcttgatctnctgaccctgtgatcccgccttcttggcctcccaaatgctgggattgcaagcctgaagcactgtgccaggccgattaataagatttctttgtattaagttacttgacagttatataaaagtaatgttgaggttaggtgagct

SEQ ID NO: 52916 - DNA, 640 bp, Homo sapiens
gacaggagttccgggattgtccacagcacggactctgatacaactatccagtccgctgcagggaccggtcactgtgtcacaggttctccagagggccagaactaacaggatatatgtatatattgaaagggagtatattagggagaactggctgacaggatcatcaggcaaagtcccactatagtccatctgcaagctgaggaaggaagaagccagtcacgcctgtaatcccagcactttgggaggccaaggtgggtggatcacctgaggtcaagagttcgagaccagcccaaccaatatagtcaaaccccatctctactgaaattattaaaattagctgggcgtggtggtgggcacctgtaatgccagctactcgggaggctgaggcaggagaatcgctggaacccaggaggcagaggttacagtgatccgggatcgcgccactgcactccagcagcctgggcgacagagggagactccatctcaagaaaaaaaaaaaaaaaaaaaaaaaaaaaaaaaaaaaccgcgggggccacctatatgccggggggcggaaaagggggtacgagaaggggccaggggcaaaagtgtgttcccgggcaccggttttctggcccagggggaaaccgcgggccccttg

SEQ ID NO: 52917 - DNA, 679 bp, Homo sapiens
ggactacaggcgtgcgccaccacgcccagctaatttttgtatttttagtagaaacggggtttcaccatgttggccaggatgatctcgatctcttgacctcgtgatccacctgccttggccttccaaagtgctgggattacaggtgtgagcccccgcgcccggccagtggtgtcttgttttaacggacggttccctaatgacatacggtgaacatcttttcctgtgtttatttgccatctgtattagggttctccagagggccagaactaacaggatatatgtatatattgaaagggagtatattagggagaactggctgacaggatcatcaggcaaagtcccactatagtccatctgcaagctgaggaaggaagaagccagtcacgtctcaaagtccaaaagcctcaaaagtagggaagccaacggcgcagccttcagtctgtggcggaaggcctaagagtccccgacaaaccactggtggaagttcaagagtccaaaggccaaagaacctggagtctaatctccaaagacaggaagtatccagcacaggagaaagatgaaagccagaagactcagcaagccagcccctcccaccttctgcgctgactggatggtgcccacccacactgagagtgggtctccctctccccgtccactcactcaagtgtcagcctccctg

SEQ ID NO: 52918 - DNA, 302 bp, Homo sapiens
aaatgccaaatacattttaaaactcattcaggattagcgttcaccttaaacttgacagactctgagaacgggctggccacaggttgtgctgtgcacaacccttagtgctcatccgcgactaatatttggataattgattgttggaagctcaggaagcctctctctctctctccgagggattgaagttaacttccttatttctgaggtagggaagaaaatgaggatgccctgccttttgctagactgaatactgtcctccaaaaattcacattcaccagaaatcccagaatgtgaccttatta

SEQ ID NO: 52919 - DNA, 198 bp, Homo sapiens
tggatagcatgaggcaaattgccagaagagaatttctttcgcatcctagtagaataaatccaaattatctttgtggtactgaggatgtctggtttagcacagtgtaaagttgtaacactttaacaggctattaattcacagtcactaattcaatgcttgcccggagttttgctagaaaaggatgagaaggattaaggt

SEQ ID NO: 52920 - DNA, 640 bp, Homo sapiens
tcaggtgatccaccagcctcaggctcccaaagtgctgggattacaggtgtgagccatcgcatctggctataagcactttattataagagcattttataaaagaacaaagatacctgacattaattcttcccttagggaattattgagataatatgtaaaaatcatagcccataagtagtcatcaacttcttagccttttctatgtacttgataaactcactcagccattaaaaataattcctttggtggtggaggtggtactaagtaaggcggaagtgtgtaattctgaattagtcatgttagttaccgcccgataaatattagcggatgatttacacagtgaagacagtttaaatacagcaagttcagcatcactacgttgtttcaacatacatcatttacattataatcctgcagtgtgttttagtaattttcacttttcaatggtttctgctaattatactacaagagaaaaaaatttaaacccttgacaaacaggaaataatatttgtgaatatatttgtgttcccatctcagtatttttaatactgagataaatatactgagatttttaatatttttaatttttaatactgagataaaatatactagtattttctcgtttgaggtaataatttaa

SEQ ID NO: 52921 - DNA, 3468 bp, Homo sapiens
tcgtgcaggaggagggctgctaccatcagggacgtgcacgatttcccccaccccgccccctccccaaactccaaaaaaaaatccaaaacacactgccacccaccgtgcccccgcgccccgagcccctccggtcccggcctgcgtttgctagcgagcgcggggaacccacggcagtgtctgtgcctgtgccaggctgcaggtctggcgtgctcctgatcagagttactctgatctgaagattttggcgttcaaggcattaagataatagcctgagttgttcatggagtttttcatcagtatgtctgaaaccattaaatataatgacgatgatcataaaactctgtttctgaaaacactaaatgaacaacgcctggaaggagaattttgtgatattgctattgtggttgaggatgtgaaattcagagcacacagatgtgttcttgctgcctgcagcacctactttaaaaagcttttcaagaagcttgaggttgatagttcttcggtcatagaaatagattttcttcgttctgatatatttgaagaggtcctgaactacatgtacacagcaaagatttccgtgaaaaaagaagatgttaacttaatgatgtcatcgggtcagattcttggtatccgatttttggataaactgtgttctcagaagcgtgatgtgtccagtcccgatgaaaacaatggtcagtccaaaagtaagtattgccttaaaataaatcgccccattggagatgctgctgacacccaggatgatgatgtagaggaaatcggggatcaggatgacagtccttctgatgacacagtagaaggcacacccccgagtcaggaggacggcaagtcgcccaccacaacgctcagggttcaggaagcgatcctgaaagagctggggagtgaggaagttcggaaggtcaattgctacggccaggaagtagaatccatggagaccccagaatcaaaagacttggggtcccagacccctcaagccttaacatttaatgatgggatgagtgaagtgaaagatgaacagacaccaggctggacaacagccgccagtgacatgaagtttgagtatttgctttatggtcaccatcgggagcagattgcctgccaggcgtgtgggaagacgttttctgatgaaggcagattgaggaagcatgagaaactccacacggcggacaggccatttgtttgtgaaatgtgcacaaaaggtttcaccacacaggcccacctgaaagaacacctaaaaatccacacaggatataagccctatagctgtgaggtgtgtggaaaatcatttatccgtgccccagacttaaagaagcatgagagagttcacagtaatgaaagaccgtttgcgtgccacatgtgtgacaaagccttcaaacacaagtctcacctcaaggatcatgaaagaagacacagaggggaaaagccttttgtgtgtggctcctgcaccaaggcatttgccaaggcatctgatctgaaaaggcacgagaacaatatgcacagtgaaaggaagcaggttacccccagtgccatccagagcgagacagaacagttgcaggcggcagcgatggctgcggaagcagaacagcagctggagacgatagcctgtagctagaggcggtgggacagggacactttgcctggaaagtggagactgagatgacgtggatcataatgagtgaatgccagttacaatatttttgtggaaacgtatggaacattgtactcactggacttaaggcagtgcttggttagctatttttaagacttttcaaggaaatggtgttcctcagttctgaccaaaccgtttcactgtcttgtctggtgtctagtattaatgttgccagtaagcacctctctcccttttttttttttattattttaatttgagaactcctgtgtccagtttagaagtgagagacttccatttttagttcctttacactcaccaccctagcaagtgccctgcacagagtaataagtaaattgatttcctaatcacaattctatgtgacttatggtcaaaagagcagttttaataactttaaaagtacttcagatagacgcagaaaattggtgagtggttgaccaagaacactgcacaaatataaaaaaagttctggaaatgcagaatggcgttagatttatatttggtttgttaattttatatcactgtttttcactgtttttgtggacaaataatggttgctttgctgaagtgttcttcctcaatcttgattgccctgtacctacccaaaagctgtagtcacacgtcctaaaggccaagcaaacccaccgggatggtggggggtcttggagccaagctcttaggttcctcttatttggggcagtaccagtccataccagctgcgatttgtgagtggacctgtggtaagaagaatagaaaaggctctcagagataaggttttttacatgtgtaacaatcccaagatttcctagattaaaatcttaattgattttgaaattggatttttatttagaatcaaaattaggacaagaacagataacttcttcagatacatttgtgtaactttacagaatgtcatcaagctttggggctctgtggggcacatgatttatccataaaggagatgcagtatgcttacttaaattaataaatttaaaatcttttaagtgtgtaaatagtagtgttggtcttacgtatttcaagtaaaaagtagacagctgcactttttttgcacattggattaaaataacttccatcagcaacaaacatcagactgtttttaacaaatattaaagattgtcagaccaaatgtttatgttttcgaaatatatttcatcactggttacagttttaaatagaagttgattgccttttcatagccgtaaatgagaattataaactctattccagttttggtatactaaatgttcttttaaccatctttaggaatatattgaaatgccaacaatagtttgaattgtgttctgtaaaaaagtattagtcaattatttttcaaaatgtagaattgtagaaaatgtcaatttttcaaactcatttttcattgctaggatttcttttaaaaaaattaaagtaatttcacttcatagcttgttgcattaacacctgtaattctattgtgaaagaaatttgattttttaattggtgtgtgttatgcccaagatgttaggatgaagatgctacctttttaaaaattttagttattggtaaaatgtttaattttacttaaaattaatttcttttcttgaaagttgtttattctgttctaaaagtagtcctgtcactgtgtttttatgctacttatagaaggggaactgattgccgttcctaggctgttttaaccaaagcaaaggaaaaataattttaacatcttgtcaatagctacttcaacaaaccatattttgggacttcattttttgtatataaaagaaaatatacttctatca

SEQ ID NO: 52922 - DNA, 3355 bp, Homo sapiens
agcggggggcaccagccagctccaggatgtgcggcggccgccagcggcgcggcgcggatatgggtctgcaggatggagttcttccggtctggcgtgctcctgatcagagttactctgatctgaagattttggcgttcaaggcattaagataatagcctgagttgttcatggagtttttcatcagtatgtctgaaaccattaaatataatgacgatgatcataaaactctgtttctgaaaacactaaatgaacaacgcctggaaggagaattttgtgatattgctattgtggttgaggatgtgaaattcagagcacacagatgtgttcttgctgcctgcagcacctactttaaaaagcttttcaagaagcttgaggttgatagttcttcggtcatagaaatagattttcttcgttctgatatatttgaagaggtcctgaactacatgtacacagcaaagatttccgtgaaaaaagaagatgttaacttaatgatgtcatcgggtcagattcttggtatccgatttttggataaactgtgttctcagaagcgtgatgtgtccagtcccgatgaaaacaatggtcagtccaaaagtaagtattgccttaaaataaatcgccccattggagatgctgctgacacccaggatgatgatgtagaggaaatcggggatcaggatgacagtccttctgatgacacagtagaaggcacacccccgagtcaggaggacggcaagtcgcccaccacaacgctcagggttcaggaagcgatcctgaaagagctggggagtgaggaagttcggaaggtcaattgctacggccaggaagtagaatccatggagaccccagaatcaaaagacttggggtcccagacccctcaagccttaacatttaatgatgggatgagtgaagtgaaagatgaacagacaccaggctggacaacagccgccagtgacatgaagtttgagtatttgctttatggtcaccatcgggagcagattgcctgccaggcgtgtgggaagacgttttctgatgaaggcagattgaggaagcatgagaaactccacacggcggacaggccatttgtttgtgaaatgtgcacaaaaggtttcaccacacaggcccacctgaaagaacacctaaaaatccacacaggatataagccctatagctgtgaggtgtgtggaaaatcatttatccgtgccccagacttaaagaagcatgagagagttcacagtaatgaaagaccgtttgcgtgccacatgtgtgacaaagccttcaaacacaagtctcacctcaaggatcatgaaagaagacacagaggggaaaagccttttgtgtgtggctcctgcaccaaggcatttgccaaggcatctgatctgaaaaggcacgagaacaatatgcacagtgaaaggaagcaggttacccccagtgccatccagagcgagacagaacagttgcaggcggcagcgatggctgcggaagcagaacagcagctggagacgatagcctgtagctagaggcggtgggacagggacactttgcctggaaagtggagactgagatgacgtggatcataatgagtgaatgccagttacaatatttttgtggaaacgtatggaacattgtactcactggacttaaggcagtgcttggttagctatttttaagacttttcaaggaaatggtgttcctcagttctgaccaaaccgtttcactgtcttgtctggtgtctagtattaatgttgccagtaagcacctctctcccttttttttttttattattttaatttgagaactcctgtgtccagtttagaagtgagagacttccatttttagttcctttacactcaccaccctagcaagtgccctgcacagagtaataagtaaattgatttcctaatcacaattctatgtgacttatggtcaaaagagcagttttaataactttaaaagtacttcagatagacgcagaaaattggtgagtggttgaccaagaacactgcacaaatataaaaaaagttctggaaatgcagaatggcgttagatttatatttggtttgttaattttatatcactgtttttcactgtttttgtggacaaataatggttgctttgctgaagtgttcttcctcaatcttgattgccctgtacctacccaaaagctgtagtcacacgtcctaaaggccaagcaaacccaccgggatggtggggggtcttggagccaagctcttaggttcctcttatttggggcagtaccagtccataccagctgcgatttgtgagtggacctgtggtaagaagaatagaaaaggctctcagagataaggttttttacatgtgtaacaatcccaagatttcctagattaaaatcttaattgattttgaaattggatttttatttagaatcaaaattaggacaagaacagataacttcttcagatacatttgtgtaactttacagaatgtcatcaagctttggggctctgtggggcacatgatttatccataaaggagatgcagtatgcttacttaaattaataaatttaaaatcttttaagtgtgtaaatagtagtgttggtcttacgtatttcaagtaaaaagtagacagctgcactttttttgcacattggattaaaataacttccatcagcaacaaacatcagactgtttttaacaaatattaaagattgtcagaccaaatgtttatgttttcgaaatatatttcatcactggttacagttttaaatagaagttgattgccttttcatagccgtaaatgagaattataaactctattccagttttggtatactaaatgttcttttaaccatctttaggaatatattgaaatgccaacaatagtttgaattgtgttctgtaaaaaagtattagtcaattatttttcaaaatgtagaattgtagaaaatgtcaatttttcaaactcatttttcattgctaggatttcttttaaaaaaattaaagtaatttcacttcatagcttgttgcattaacacctgtaattctattgtgaaagaaatttgattttttaattggtgtgtgttatgcccaagatgttaggatgaagatgctacctttttaaaaattttagttattggtaaaatgtttaattttacttaaaattaatttcttttcttgaaagttgtttattctgttctaaaagtagtcctgtcactgtgtttttatgctacttatagaaggggaactgattgccgttcctaggctgttttaaccaaagcaaaggaaaaataattttaacatcttgtcaatagctacttcaacaaaccatattttgggacttcattttttgtatataaaagaaaatatacttctatca

SEQ ID NO: 52923 - DNA, 3253 bp, Homo sapiens
agcggggggcaccagccagctccaggatgtgcggcggccgccagcggcgcggcgcggatatgggtctgcaggatggagttcttccggtctggcgtgctcctgatcagagttactctgatctgaagattttggcgttcaaggcattaagataatagcctgagttgttcatggagtttttcatcagtatgtctgaaaccattaaatataatgacgatgatcataaaactctgtttctgaaaacactaaatgaacaacgcctggaaggagaattttgtgatattgctattgtggttgaggatgtgaaattcagagcacacagatgtgttcttgctgcctgcagcacctactttaaaaagcttttcaagaagcttgaggttgatagttcttcggtcatagaaatagattttcttcgttctgatatatttgaagaggtcctgaactacatgtacacagcaaagatttccgatgaaaacaatggtcagtccaaaagtaagtattgccttaaaataaatcgccccattggagatgctgctgacacccaggatgatgatgtagaggaaatcggggatcaggatgacagtccttctgatgacacagtagaaggcacacccccgagtcaggaggacggcaagtcgcccaccacaacgctcagggttcaggaagcgatcctgaaagagctggggagtgaggaagttcggaaggtcaattgctacggccaggaagtagaatccatggagaccccagaatcaaaagacttggggtcccagacccctcaagccttaacatttaatgatgggatgagtgaagtgaaagatgaacagacaccaggctggacaacagccgccagtgacatgaagtttgagtatttgctttatggtcaccatcgggagcagattgcctgccaggcgtgtgggaagacgttttctgatgaaggcagattgaggaagcatgagaaactccacacggcggacaggccatttgtttgtgaaatgtgcacaaaaggtttcaccacacaggcccacctgaaagaacacctaaaaatccacacaggatataagccctatagctgtgaggtgtgtggaaaatcatttatccgtgccccagacttaaagaagcatgagagagttcacagtaatgaaagaccgtttgcgtgccacatgtgtgacaaagccttcaaacacaagtctcacctcaaggatcatgaaagaagacacagaggggaaaagccttttgtgtgtggctcctgcaccaaggcatttgccaaggcatctgatctgaaaaggcacgagaacaatatgcacagtgaaaggaagcaggttacccccagtgccatccagagcgagacagaacagttgcaggcggcagcgatggctgcggaagcagaacagcagctggagacgatagcctgtagctagaggcggtgggacagggacactttgcctggaaagtggagactgagatgacgtggatcataatgagtgaatgccagttacaatatttttgtggaaacgtatggaacattgtactcactggacttaaggcagtgcttggttagctatttttaagacttttcaaggaaatggtgttcctcagttctgaccaaaccgtttcactgtcttgtctggtgtctagtattaatgttgccagtaagcacctctctcccttttttttttttattattttaatttgagaactcctgtgtccagtttagaagtgagagacttccatttttagttcctttacactcaccaccctagcaagtgccctgcacagagtaataagtaaattgatttcctaatcacaattctatgtgacttatggtcaaaagagcagttttaataactttaaaagtacttcagatagacgcagaaaattggtgagtggttgaccaagaacactgcacaaatataaaaaaagttctggaaatgcagaatggcgttagatttatatttggtttgttaattttatatcactgtttttcactgtttttgtggacaaataatggttgctttgctgaagtgttcttcctcaatcttgattgccctgtacctacccaaaagctgtagtcacacgtcctaaaggccaagcaaacccaccgggatggtggggggtcttggagccaagctcttaggttcctcttatttggggcagtaccagtccataccagctgcgatttgtgagtggacctgtggtaagaagaatagaaaaggctctcagagataaggttttttacatgtgtaacaatcccaagatttcctagattaaaatcttaattgattttgaaattggatttttatttagaatcaaaattaggacaagaacagataacttcttcagatacatttgtgtaactttacagaatgtcatcaagctttggggctctgtggggcacatgatttatccataaaggagatgcagtatgcttacttaaattaataaatttaaaatcttttaagtgtgtaaatagtagtgttggtcttacgtatttcaagtaaaaagtagacagctgcactttttttgcacattggattaaaataacttccatcagcaacaaacatcagactgtttttaacaaatattaaagattgtcagaccaaatgtttatgttttcgaaatatatttcatcactggttacagttttaaatagaagttgattgccttttcatagccgtaaatgagaattataaactctattccagttttggtatactaaatgttcttttaaccatctttaggaatatattgaaatgccaacaatagtttgaattgtgttctgtaaaaaagtattagtcaattatttttcaaaatgtagaattgtagaaaatgtcaatttttcaaactcatttttcattgctaggatttcttttaaaaaaattaaagtaatttcacttcatagcttgttgcattaacacctgtaattctattgtgaaagaaatttgattttttaattggtgtgtgttatgcccaagatgttaggatgaagatgctacctttttaaaaattttagttattggtaaaatgtttaattttacttaaaattaatttcttttcttgaaagttgtttattctgttctaaaagtagtcctgtcactgtgtttttatgctacttatagaaggggaactgattgccgttcctaggctgttttaaccaaagcaaaggaaaaataattttaacatcttgtcaatagctacttcaacaaaccatattttgggacttcattttttgtatataaaagaaaatatacttctatca

SEQ ID NO: 52924 - DNA, 2104 bp, Homo sapiens
tcgtgcaggaggagggctgctaccatcagggacgtgcacgatttcccccaccccgccccctccccaaactccaaaaaaaaatccaaaacacactgccacccaccgtgcccccgcgccccgagcccctccggtcccggcctgcgtttgctagcgagcgcggggaacccacggcagtgtctgtgcctgtgccaggctgcaggtctggcgtgctcctgatcagagttactctgatctgaagattttggcgttcaaggcattaagataatagcctgagttgttcatggagtttttcatcagtatgtctgaaaccattaaatataatgacgatgatcataaaactctgtttctgaaaacactaaatgaacaacgcctggaaggagaattttgtgatattgctattgtggttgaggatgtgaaattcagagcacacagatgtgttcttgctgcctgcagcacctactttaaaaagcttttcaagaagcttgaggttgatagttcttcggtcatagaaatagattttcttcgttctgatatatttgaagaggtcctgaactacatgtacacagcaaagatttccgtgaaaaaagaagatgttaacttaatgatgtcatcgggtcagattcttggtatccgatttttggataaactgtgttctcagaagcgtgatgtgtccagtcccgatgaaaacaatggtcagtccaaaagtaagtattgccttaaaataaatcgccccattggagatgctgctgacacccaggatgatgatgtagaggaaatcggggatcaggatgacagtccttctgatgacacagtagaaggcacacccccgagtcaggaggacggcaagtcgcccaccacaacgctcagggttcaggaagcgatcctgaaagagctggggagtgaggaagttcggaaggtcaattgctacggccaggaagtagaatccatggagaccccagaatcaaaagacttggggtcccagacccctcaagccttaacatttaatgatgggatgagtgaagtgaaagatgaacagacaccaggctggacaacagccgccagtgacatgaagtttgagtatttgctttatggtcaccatcgggagcagattgcctgccaggcgtgtgggaagacgttttctgatgaaggcagattgaggaagcatgagaaactccacacggcggacaggccatttgtttgtgaaatgtgcacaaaaggtttcaccacacaggcccacctgaaagaacacctaaaaatccacacaggatataagccctatagctgtgaggtgtgtggaaaatcatttatccgtgccccagacttaaagaagcatgagagagttcacagtaatgaaagaccgtttgcgtgccacatgtgtgacaaagccttcaaacacaagtctcacctcaaggatcatgaaagaagacacagaggggaaaagccttttgtgtgtggctcctgcaccaaggcatttgccaaggcatctgatctgaaaaggcacgagaacaatatgcacagtgaaaggaagcaggttacccccagtgccatccagagcgagacagaacagttgcaggcggcagcgatggctgcggaagcagaacagcagctggagacgatagcctgtagctagaggcggtgggacagggacactttgcctggaaagtggagactgagatgacgtggatcataatgagtgaatgccagttacaatatttttgtggaaacgtatggaacattgtactcactggacttaaggcagtgcttggttagctatttttaagacttttcaaggaaatggtgttcctcagttctgaccaaaccgtttcactgtcttgtctggtgtctagtattaatgttgccagtaagcacctctctcccttttttttttttattattttaatttgagaactcctgtgtccagtttagaagtgagagacttccatttttagttcctttacactcaccaccctagcaagtgccctgcacagagtaataagtaaattgatttcctaatcacaattctatgtgacttatggtcaaaagagcagtcgagaaaaatcactttttctttcatcatacacacctctaaaaagaactggaattc

SEQ ID NO: 52925 - DNA, 2811 bp, Homo sapiens
tcgtgcaggaggagggctgctaccatcagggacgtgcacgatttcccccaccccgccccctccccaaactccaaaaaaaaatccaaaacacactgccacccaccgtgcccccgcgccccgagcccctccggtcccggcctgcgtttgctagcgagcgcggggaacccacggcagtgtctgtgcctgtgccaggctgcaggtctggcgtgctcctgatcagagttactctgatctgaagattttggcgttcaaggcattaagataatagcctgagttgttcatggagtttttcatcagtatgtctgaaaccattaaatataatgacgatgatcataaaactctgtttctgaaaacactaaatgaacaacgcctggaaggagaattttgtgatattgctattgtggttgaggatgtgaaattcagagcacacagatgtgttcttgctgcctgcagcacctactttaaaaagcttttcaagaagcttgaggttgatagttcttcggtcatagaaatagattttcttcgttctgatatatttgaagaggtcctgaactacatgtacacagcaaagatttccgtgaaaaaagaagatgttaacttaatgatgtcatcgggtcagattcttggtatccgatttttggataaactgtgttctcagaagcgtgatgtgtccagtcccgatgaaaacaatggtcagtccaaaagtaagtattgccttaaaataaatcgccccattggagatgctgctgacacccaggatgatgatgtagaggaaatcggggatcaggatgacagtccttctgatgacacagtagaaggcacacccccgagtcaggaggacggcaagtcgcccaccacaacgctcagggttcaggaagcgatcctgaaagagctggggagtgaggaagttcggaaggtcaattgctacggccaggaagtagaatccatggagaccccagaatcaaaagacttggggtcccagacccctcaagccttaacatttaatgatgggatgagtgaagtgaaagatgaacagacaccaggctggacaacagccgccagtgacatgaagtttgagtatttgctttatggtcaccatcgggagcagattgcctgccaggcgtgtgggaagacgttttctgatgaaggcagattgaggaagcatgagaaactccacacggcggacaggccatttgtttgtgaaatgtgcacaaaaggtttcaccacacaggcccacctgaaagaacacctaaaaatccacacaggatataagccctatagctgtgaggtgtgtggaaaatcatttatccgtgccccagacttaaagaagcatgagagagttcacagtaatgaaagaccgtttgcgtgccacatgtgtgacaaagccttcaaacacaagtctcacctcaaggatcatgaaagaagacacagaggggaaaagccttttgtgtgtggctcctgcaccaaggcatttgccaaggcatctgatctgaaaaggcacgagaacaatatgcacagtgaaaggaagcaggttacccccagtgccatccagagcgagacagaacagttgcaggcggcagcgatggctgcggaagcagaacagcagctggagacgatagcctgtagctagaggcggtgggacagggacactttgcctggaaagtggagactgagatgacgtggatcataatgagtgaatgccagttacaatatttttgtggaaacgtatggaacattgtactcactggacttaaggcagtgcttggttagctatttttaagacttttcaaggaaatggtgttcctcagttctgaccaaaccgtttcactgtcttgtctggtgtctagtattaatgttgccagtaagcacctctctcccttttttttttttattattttaatttgagaactcctgtgtccagtttagaagtgagagacttccatttttagttcctttacactcaccaccctagcaagtgccctgcacagagtaataagtaaattgatttcctaatcacaattctatgtgacttatggtcaaaagagcagttttaataactttaaaagtacttcagatagacgcagaaaattggtgagtggttgaccaagaacactgcacaaatataaaaaaagttctggaaatgcagaatggcgttagatttatatttggtttgttaattttatatcactgtttttcactgtttttgtggacaaataatggttgctttgctgaagtgttcttcctcaatcttgattgccctgtacctacccaaaagctgtagtcacacgtcctaaaggccaagcaaacccaccgggatggtggggggtcttggagccaagctcttaggttcctcttatttggggcagtaccagtccataccagctgcgatttgtgagtggacctgtggtaagaagaatagaaaaggctctcagagataaggttttttacatgtgtaacaatcccaagatttcctagattaaaatcttaattgattttgaaattggatttttatttagaatcaaaattaggacaagaacagataacttcttcagatacatttgtgtaactttacagaatgtcatcaagctttggggctctgtggggcacatgatttatccataaaggagatgcagtatgcttacttaaattaataaatttaaaatcttttaagtgtgtaaatagtagtgttggtcttacgtatttcaagtaaaaagtagacagctgcactttttttgcacattggattaaaataacttccatcagcaacaaacatcagactgtttttaacaaatattaaagattgtcagacca

SEQ ID NO: 52926 - DNA, 2111 bp, Homo sapiens
  misc_feature (2087)..(2087): n is a, c, g, or t
tcgtgcaggaggagggctgctaccatcagggacgtgcacgatttcccccaccccgccccctccccaaactccaaaaaaaaatccaaaacacactgccacccaccgtgcccccgcgccccgagcccctccggtcccggcctgcgtttgctagcgagcgcggggaacccacggcagtgtctgtgcctgtgccaggctgcaggtctggcgtgctcctgatcagagttactctgatctgaagattttggcgttcaaggcattaagataatagcctgagttgttcatggagtttttcatcagtatgtctgaaaccattaaatataatgacgatgatcataaaactctgtttctgaaaacactaaatgaacaacgcctggaaggagaattttgtgatattgctattgtggttgaggatgtgaaattcagagcacacagatgtgttcttgctgcctgcagcacctactttaaaaagcttttcaagaagcttgaggttgatagttcttcggtcatagaaatagattttcttcgttctgatatatttgaagaggtcctgaactacatgtacacagcaaagatttccgtgaaaaaagaagatgttaacttaatgatgtcatcgggtcagattcttggtatccgatttttggataaactgtgttctcagaagcgtgatgtgtccagtcccgatgaaaacaatggtcagtccaaaagtaagtattgccttaaaataaatcgccccattggagatgctgctgacacccaggatgatgatgtagaggaaatcggggatcaggatgacagtccttctgatgacacagtagaaggcacacccccgagtcaggaggacggcaagtcgcccaccacaacgctcagggttcaggaagcgatcctgaaagagctggggagtgaggaagttcggaaggtcaattgctacggccaggaagtagaatccatggagaccccagaatcaaaagacttggggtcccagacccctcaagccttaacatttaatgatgggatgagtgaagtgaaagatgaacagacaccaggctggacaacagccgccagtgacatgaagtttgagtatttgctttatggtcaccatcgggagcagattgcctgccaggcgtgtgggaagacgttttctgatgaaggcagattgaggaagcatgagaaactccacacggcggacaggccatttgtttgtgaaatgtgcacaaaaggtttcaccacacaggcccacctgaaagaacacctaaaaatccacacaggatataagccctatagctgtgaggtgtgtggaaaatcatttatccgtgccccagacttaaagaagcatgagagagttcacagtaatgaaagaccgtttgcgtgccacatgtgtgacaaagccttcaaacacaagtctcacctcaaggatcatgaaagaagacacagaggggaaaagccttttgtgtgtggctcctgcaccaaggcatttgccaaggcatctgatctgaaaaggcacgagaacaatatgcacagtgaaaggaagcaggttacccccagtgccatccagagcgagacagaacagttgcaggcggcagcgatggctgcggaagcagaacagcagctggagacgatagcctgtagctagaggcggtgggacagggacactttgcctggaaagtggagactgagatgacgtggatcataatgagtgaatgccagttacaatatttttgtggaaacgtatggaacattgtactcactggacttaaggcagtgcttggttagctatttttaagacttttcaaggaaatggtgttcctcagttctgaccaaaccgtttcactgtcttgtctggtgtctagtattaatgttgccagtaagcacctctctcccttttttttttttattattttaatttgagaactcctgtgtccagtttagaagtgagagacttccatttttagttcctttacactcaccaccctagcaagtgccctgcacagagtaataagtaaattgatttcctaatcacaattctatgtgacttatggtcaaaagagcagttttaataactttaaaagtacttcagatagacgcagacncgcctaataaccgatatccagcgg

SEQ ID NO: 52927 - DNA, 1773 bp, Homo sapiens
agcggggggcaccagccagctccaggatgtgcggcggccgccagcggcgcggcgcggatatgggtctgcaggatggagttcttccggtctggcgtgctcctgatcagagttactctgatctgaagattttggcgttcaaggcattaagataatagcctgagttgttcatggagtttttcatcagtatgtctgaaaccattaaatataatgacgatgatcataaaactctgtttctgaaaacactaaatgaacaacgcctggaaggagaattttgtgatattgctattgtggttgaggatgtgaaattcagagcacacagatgtgttcttgctgcctgcagcacctactttaaaaagcttttcaagaagcttgaggttgatagttcttcggtcatagaaatagattttcttcgttctgatatatttgaagaggtcctgaactacatgtacacagcaaagatttccgtgaaaaaagaagatgttaacttaatgatgtcatcgggtcagattcttggtatccgatttttggataaactgtgttctcagaagcgtgatgtgtccagtcccgatgaaaacaatggtcagtccaaaagtaactaaaggccaagcaaacccaccgggatggtggggggtcttggagccaagctcttaggttcctcttatttggggcagtaccagtccataccagctgcgatttgtgagtggacctgtggtaagaagaatagaaaaggctctcagagataaggttttttacatgtgtaacaatcccaagatttcctagattaaaatcttaattgattttgaaattggatttttatttagaatcaaaattaggacaagaacagataacttcttcagatacatttgtgtaactttacagaatgtcatcaagctttggggctctgtggggcacatgatttatccataaaggagatgcagtatgcttacttaaattaataaatttaaaatcttttaagtgtgtaaatagtagtgttggtcttacgtatttcaagtaaaaagtagacagctgcactttttttgcacattggattaaaataacttccatcagcaacaaacatcagactgtttttaacaaatattaaagattgtcagaccaaatgtttatgttttcgaaatatatttcatcactggttacagttttaaatagaagttgattgccttttcatagccgtaaatgagaattataaactctattccagttttggtatactaaatgttcttttaaccatctttaggaatatattgaaatgccaacaatagtttgaattgtgttctgtaaaaaagtattagtcaattatttttcaaaatgtagaattgtagaaaatgtcaatttttcaaactcatttttcattgctaggatttcttttaaaaaaattaaagtaatttcacttcatagcttgttgcattaacacctgtaattctattgtgaaagaaatttgattttttaattggtgtgtgttatgcccaagatgttaggatgaagatgctacctttttaaaaattttagttattggtaaaatgtttaattttacttaaaattaatttcttttcttgaaagttgtttattctgttctaaaagtagtcctgtcactgtgtttttatgctacttatagaaggggaactgattgccgttcctaggctgttttaaccaaagcaaaggaaaaataattttaacatcttgtcaatagctacttcaacaaaccatattttgggacttcattttttgtatataaaagaaaatatacttctatca

SEQ ID NO: 52928 - DNA, 445 bp, Homo sapiens
aatcattgatttagggaaaattgttaagaggctctttctgggcagcaaaacttatgacgcatttcataactgccttcctgagacgttccttctcctctctcaccgcagatctcatggcttctaatttcttggcctgttttctacttttctccaatgaagtatagtctccattaacttcctgagaatgagtagttaggagatctttgtcttcttcctttaaaatttttttttgaaatattcaactttgaattcattgccgcattgtttttcggtgtcagaaatgctctgaaaagtcaaatgccctactgatctctaggcctttgaaaggctttcttgatctggttttctttcttggaggctttaagatttgttctttatccttgatgttcaaaatttcacaattatgattttttatgtagctctgtttttgtttacttttcaatct

SEQ ID NO: 52929 - DNA, 514 bp, Homo sapiens
gggtaaagaaattaccaggaaagaaaaaatggaaatagtaatttgggaagatgggccaagactgggcatgaggtttctgggtacccagcatggctccagcaagagagggagcggggggtgctggagactgtggacagagcaatccggcctttgagtcagcaaagtcctgggtggggagggctagagagcctgatgtggctaaaaacaagcttctgccaacaggtgaaatgggcactaaaggagaaataaatttcagttattgaatatcaaaagggttccagttattgtccacacagatttgaggtccgaaatacaaaactcctacgtgatggtaacagttctttttagaacctccttctctccattactgccccagataaaactccccctagacatgagcttccagggccatggagagaaggcagtagggttgggaaggacgcaggttgtggaacattccatgaggatgttctttccatatttatttttactgcttggccttctagacccaaat

SEQ ID NO: 52930 - DNA, 448 bp, Homo sapiens
cttgctgctgactggttggggcagagacgaaatcatagggggttgatgctctcctcatgccagctgaatggcttcagggtggagccacaggagcggggttgtctctgcaggtggagtcatcggttccaggtggagccatgggtgtcagacatgcagaaaacctggaaaggtatctccaaagtccgatctacagcagtggtggtatttgcaggagtaactgggggaagttgcatatcttataacctccggaatacttgtctgcaccttagcaggacgcaggctcctctcctcccctcagcctgatggcctcctattagctttacaaaagcgattgagttttgggcaaggcctatcattgatacggctctgatgggtggagaacactaggttcttcgtcgcctccctgggcgtcgtttccaagactacctatagcgacgctttttcccac

SEQ ID NO: 52931 - DNA, 523 bp, Homo sapiens
gtggtctgcatcctcattcaggtaacacccccagcctttcatgctgagattggccattttatttgtaactcactgtacaatccatttgctcttccagtgtcccttagaaggatgcagagtgtactgtagaatgccatagagacctgggtttagggaaaatatttgacccaaagtccgccaactcacatgagtatctccccacaacttgtaccgtgctagtctctgggtatatagcaaatgaaaccgtgcctgaacagatgttacaaacaccctcccctgagagactccagggctgctttattcatgcaaaacggtgggctctaataagctcagagctgagaggaacaagttttcattccagcgttctcaaaaactccctttgtgactttaggcctaataataataacactacctaggtagtgaacacctctgtgccaagaaatatcatgatcattgcctgagttgtaattctcacagtagtcctgcaggacagctgctattactgcttattatgcagatgggc

SEQ ID NO: 52932 - DNA, 268 bp, Homo sapiens
gtgattaatattaactaagcacaacgattataatttgctaagttaaactgaattaaattgctttatatatctagaaccagaccggaaatatctgggtggttattatagctaaattccatactatagcaataagataaaatatgagttatttactgtctaatatggacatatacatggctctgtatatctatttttcttcatcaaatatcaaatgcaatattacacattagacacaacaattaacttgtgttcatgtttctgaaattga

SEQ ID NO: 52933 - DNA, 445 bp, Homo sapiens
taacagtttttataatgctgtggctctttaggtctcaaaaaacagaaactctctctctgaccttctcctattctcctgtcagcagcccgagacaggactctaatcttctttcaccattctgattgtgggttataagatcctcatttcagaaggggtcctggcccttagcctggaaaaaggaatacagcacagagaagccaaaaagaatctggacaagccttgctgggtttctgttcagcctattagtgttagagaataccctttttgtccaatcatacttctccctggtggtcaattctgtctatgcagtgaagtctccattaaaggcccaagaggacagggtgcaagagaacttctggatagctgaatatgtggaagctgagaggaaggtgaacaagaattcatctatgtgctgggaagtggtgcaccccaactccaaagggac

SEQ ID NO: 52934 - DNA, 448 bp, Homo sapiens
acctgcatggctagatcttccacttctgtccaatctttgcttaaaagtcatcttttttcaaagaagcctaccctaatcatctcatttaaaatattgccccttccccagaatcctcccttccttgcttctgtttttttcatagtacttaccttctaaccttctaacatcgtcattttctatttttattttctattgccttccctccgctagaatgtaagctccacaagatcggggattttttttttttcattttgttcaatgtttccttagtacctaaaatactagaatagtagatggcacagagtagatgctcaataaatatttcttaagtgaataaatgaatgggtgaatcattgcctaaaagacactaaaaggaaaagacctaattaaaactatttaaaaacaaaatccttggtgttgaaagattaaattatttaaaagttggcca

SEQ ID NO: 52935 - DNA, 1161 bp, Homo sapiens
cagtctttgcaaggcgacagctgtgccagccgggctctggcaggctcctggcagcatggcagtgaagcttgggaccctcctgctggcccttgccctgggcctggcccagccagcctctgcccgccggaagctgctggtgtttctgctggatggttttcgctcagactacatcagtgatgaggcgctggagtcattgcctggtttcaaagagattgtgagcaggggagtaaaagtggattacttgactccagacttccctagtctctcgtatcccaattattataccctaatgactggccgccattgtgaagtccatcagatgatcgggaactacatgtgggaccccaccaccaacaagtcctttgacattggcgtcaacaaagacagcctaatgcctctctggtggaatggatcagaacctctgtgggtcactctgaccaaggccaaaaggaaggtctacatgtactactggccaggctgtgaggttgagattctgggtgtcagacccacctactgcctagaatataaaaatgtcccaacggatatcaattttgccaatgcagtcagcgatgctcttgactccttcaagagtggccgggccgacctggcagccatataccatgagcgcattgacgtggaaggccaccactacgggcctgcatctccgcagaggaaagatgccctcaaggctgtagacactgtcctgaagtacatgaccaagtggatccaggagcggggcctgcaggaccgcctgaacgtcattattttctcggatcacggaatgaccgacattttctggatggacaaagtgattgagctgaataagtacatcagcctgaatgacctgcagcaagtgaaggaccgcgggcctgttgtgagcctttggccggcccctgggaaacactctgagatatataacaaactgagcacagtggaacacatgactgtctacgagaaagaagccatcccaagcaggttctattacaagaaaggaaagtttgtctctcctttgactttagtggctgatgaaggctggttcataactgaggtaattatgaaatatgtgccaatttattctctatgcaaattctataaaacagtccaaagttaaataatagttactcaagtttttatacataaaagattttttcacttaggcat

SEQ ID NO: 52936 - DNA, 337 bp, Homo sapiens
ctgttccctaaatattattaaaattttaaaaattagacatttggtctaaattagacaggtaagatactactgtccttactagatgctttaaagtcataaactgcttctatggcttttgataattgttcaacttgcttgctttagagccattggattctaggtaaggcctagagacatttggagttagccatatcccctagctatgctagaaagagtccgacattatctgtggttctgccctgtatcctacactctacacctgatacataattaaaattacttacactaaaaataaaaatcatgcatttttagtagaaaggtatggaaattatagttt

SEQ ID NO: 52937 - DNA, 322 bp, Homo sapiens
tgggattacaggtgtgagccactacacccagccatttttgcttgtttatacgtggctgctagaaattttaaaattacacatgtggcttgcctctgtggctctcattatatgcctgtgggacaatgaagctctagaatctacatgatatctctgtagacaggatgactggtagatcgtgggtgctggagggtggtagctcaaagatttatccaaaaagtcaatcgagaactgcaatgaaagcatgttacagagaacttggcccatagcagaggctcaggaaatacttggggatgaagccacacacagcaaatatttctacatg

SEQ ID NO: 52938 - DNA, 192 bp, Homo sapiens
ccaagtcctctcgctccacacttgctctctgagtcatctcatctacaatcacatcttctatcagtgcaccgaggagtcagtatttctgacatgaatctgtccctcgagccccagacccatagatacaaactcctaatggacgtgtccgtgtggatgcaccacaaacacccaaacatgccccaaatggccttt

SEQ ID NO: 52939 - DNA, 319 bp, Homo sapiens
  misc_feature (206)..(206): n is a, c, g, or t
  misc_feature (237)..(237): n is a, c, g, or t
  misc_feature (271)..(271): n is a, c, g, or t
ctgctagcacgttttcacctctcaatacaagaagctacttcatagaagaagcaaacttagaatacatttaagtttgcgttcaaactcttcacttcccaataccagtgggaaaatgaccacaaaaacacctttgaagactatatttattattggtgaagattggaggaaataaacttttcatatatcgactactgtaggaaggcctnagacaaaacaatgttgaaattaggccaactnagagccctataatggcatctaagtgtttcagtgnaaggtaggaatcacatctctcactttaaatcaaaagctaggtatcatt

SEQ ID NO: 52940 - DNA, 2224 bp, Homo sapiens
ctgcccctcgcctcccgcacggagctcgctcggggaacgcccccatccactgccctccacagcctcagggacaagggtgaggccaggggagcagagggagcagtcatggcggagctggaggctgtggccgacgatctagacgccctcatcgacgacctggactacctcccgggccactttcacctggagatgcagttgaacttcgagccgcgctcgccggccccacagcgcgcccgggacctgaagctgcagcgggagggtctgcggcaggagctccagctggcggccgccccgcagcgccccgctgtgcgtcacctcctgggcgctttcgcattctacctggaggagctggacgaggcccgcgagtgcttcctcgaggtggcccacgagcacccgggcaacctcaatgcctgggccaatctggcacacgtgtacgggcggctgggccaggaagaagaggaggaggcgtgcgccgcacggctggccgacctcatgggcctggcagaggagcccgaggccgccggggacccccagctccgcgccgctcgctgcctggccgagcagggctacgcgcatggcttcgacgtcggctgcgccagcccagaggagcgtgcgcgggggctggcggcaggcatcgcgctctacgacaaggcgctaggctacgggcagcagatcccgatggaggagaaaaggggctggtatttcaccatggcaacactctacatcaggctagatggcatcttcctggagctgggcagtgaggagcagaagagactgcctgccttcaaccgcacgctggccctactccggcaagtgctgaagtccgaggacccccgccaccgagccctggcctggtgctacctcgggatgctgctggagcggaaggacaccttctccaccacccccatgggcgtccatgactgcgggtactcagggaccgaccctctagactgcttcggcaaggccattgagattgccaagaaccaacctcccatcctgaatcgcctggcaaaaatcttctacttcctgggaaagcaggatatggccattggaacctgcaacatggccctggatgtcctacgagatccagagctcaactggcaggcgtactgcacaagggccaagagacgaggtctcactatgttgcccagactcgtctcaaactcctgggctcaagcagtcctcccacctcgacctcccaaagtgctggaattccaggtgtgagccactacacccagccctgtaaggtttttgagtgaaagaatgcaggagcctccactcactgcaggaatcccttctacaattcctgctcagtgagcccccagcctcttctggattggcacgggtggaatcagactgaccagagttgaaatctggcttctccgccttgtggaacttgcagcaagccacttacccccacaaacttcagttcccaaatctgtaagatataaataacaacactttccttaaaatgttgtcaacagacacagtgaggtagcatctaaagcacagtgccttggacatagggggtgcttttctgaaagccagtagagggtcatttaatatagtggatcagagctctggctctgaacacagacagccttggttcaaatcccacaacaccacgtgctacgggacctttggcaaaatactcttgcccagattctgagcctcaatttctttatctgtagactggagttgttatgagaattacattagattttgtacgtaaaactcagcatcaagcacacagtaagatttcataagagactgactgctactaatttaatattaggcatatttttgaattatctcactgtctcttgatgcagtccactgcatagtcattcagctctgcaagttacacacttaggtgagttctgcctcctgctagcttcccgcactggtcccagacctgcctcctagagcccacacagagcccatgtgcttgaggaagccgactcggagctcccagtttacttcactgcaagccgaagagtcctcccatcccctcatcttctccactactatccacatgacctagtggcaaatctactcccagtcttggtctcagtggcttaattactttgccagcaggtacgaggcaggagtgaaattccttcactgtcgtggatgtggttattattctagataataatgacattaaccataatagtaaataataaaatatctctataaaattctgcatttcatcagcactttc

SEQ ID NO: 52941 - DNA, 2352 bp, Homo sapiens
ggtggcctggcacccagccagcagggtaagggcagaggtggctgggcccttcctactggaaagggctccccaaaccgccaccccccaccaccacgggcctgggcagggctggcagcacacaggacagccgggaggggtgccacccaaccacatctccttctcggccacaggctagatggcatcttcctggagctgggcagtgaggagcagaagagactgcctgccttcaaccgcacgctggccctactccggcaagtgctgaagtccgaggacccccgccaccgaggtggggacccgggggatgggtgggacagcagcctctgccccctgccaacagcccgctggcattgcatccacctctggcattacctccccttcttggctcctgtttcttcctccttcgctctgtcccctacactcatctgtgcacctcaaggagcccacataccttgcccaagtgaacatgccaactacaagtcactgtgactgcaggcttgcccgtctgcagctcatgacctggagggtgagaggtagtttcccctatttccacctatttatggtcagaagattgaagcctctgttggagaggagtcgagtcatttttttgcagggccagacagcaagagcagggactagaaccaccagagctggtgagagctgaagtcagaagagacctacgtacctgaaatgaggtcccccgatgacacattgagcacagaataagcactaaaatgggttcactaacccctcacatggcccctctctccacctttgcttctctctgtccctgtgttgccctcagtgatcccactctactatcccttgctttgtcttcatgggtgacacctaggatggggatggccccttccctctctccaccctgctgcttcctagagaccctctcccacccttcacccccagccctggcctggtgctacctcgggatgctgctggagcggaaggacaccttctccaccacccccatgggcgtccatgactgcgggtactcagggaccgaccctctagactgcttcggcaaggtacttgcccccagccacacccaccctctaaactgagaaggagcctggcaccccagcctctccacctagaacccaggcttctctgggtatcaacccccaccgcgtggcccacccaggaagtacacttactccagaccttgctctccatcctctcttcattcaaaacaaaagagaccctccccatacccagtctggccccagcccatttctccagccttgaaatagacccttagactttttcccttgagaccttcattcacagtattccctctgccaggagttccctacctctccacccccagtggcatagtagaaagatgggtttagctggtgtctccttgccagccctgcccataggctgtgtgaccctaaggcaagtcacttacaacaggaagcagtcaatgacaatagtgggggtaagtgttattacccaggtagaaaccctgtactttgtaaggttgggggatgggggttgcctctggcccttcctctcacctgccctaggaagatgggagagcatacactgggaaggaggggtctgactgggctctggaaggctttactggatgtgaccggtgatgtggtcgtgggccaggctctcaggagttgagtgccaataggttgtgccccaaggtgttggggcttcgtgatgtgacaacttactggcaggtggataagggtggatatgggtaaagggcaccatgttgatacggctgtatccaaagatggggttcctgtggttcagcactgtttagccagctctggctaatgaccaagcaagtggtttgtttttgcactcctcccttacctaggccattgagattgccaagaaccaacctcccatcctgaatcgcctggcaaaaatcttctacttcctgggaaagcaggatatggccattggaacctgcaacatggccctggatgtcctacgagatccagagctcaactggcaggcgtactgcacaagggccaagatccacatcagagcctacctgcatgacctcaagcgggccaagatgggtctcgggggcatgcctgacaggaaccacctggcctgtgccaaggctgaccttgaggaagtggtcagggtgtgcccaggcttcaaggcgtacctggacatcggccaggtctactactatatgggcgtggacgcggtgcaggagctgctggcggtggacgaggcggcgctgaaccaggcgctggtgttcctggccaaggcgggcgagtcggagctgggtgccacgctgcccgagctgcagctgctgcgcggcaagtgcctgcgcatcaagggcgaggacgccaacgcggccgc

SEQ ID NO: 52942 - DNA, 1463 bp, Homo sapiens
ctgcccctcgcctcccgcacggagctcgctcggggaacgcccccatccactgccctccacagcctcagggacaagggtgaggccaggggagcagagggagcagtcatggcggagctggaggctgtggccgacgatctagacgccctcatcgacgacctggactacctcccgggccactttcacctggagatgcagttgaacttcgagccgcgctcgccggccccacagcgcgcccgggacctgaagctgcagcgggagggtctgcggcaggagctccagctggcggccgccccgcagcgccccgctgtgcgtcacctcctgggcgctttcgcattctacctggaggagctggacgaggcccgcgagtgcttcctcgaggtggcccacgagcacccgggcaacctcaatgcctgggccaatctggcacacgtgtacgggcggctgggccaggaagaagaggaggaggcgtgcgccgcacggctggccgacctcatgggcctggcagaggagcccgaggccgccggggacccccagctccgcgccgctcgctgcctggccgagcagggctacgcgcatggcttcgacgtcggctgcgccagcccagaggagcgtgcgcgggggctggcggcaggcatcgcgctctacgacaaggcgctaggctacgggcagcagatcccgatggaggagaaaaggggctggtatttcaccatggcaacactctacatcaggctagatggcatcttcctggagctgggcagtgaggagcagaagagactgcctgccttcaaccgcacgctggccctactccggcaagtgctgaagtccgaggacccccgccaccgagccctggcctggtgctacctcgggatgctgctggagcggaaggacaccttctccaccacccccatgggcgtccatgactgcgggtactcagggaccgaccctctagactgcttcggcaaggccattgagattgccaagaaccaacctcccatcctgaatcgcctggcaaaaatcttctacttcctgggaaagcaggatatggccattggaacctgcaacatggccctggatgtcctacgagatccagagctcaactggcaggcgtactgcacaagggccaagatccacatcagagcctacctgcatgacctcaagcgggccaagatgggtctcgggggcatgcctgacaggaaccacctggcctgtgccaaggctgaccttgaggaagtggtcagggtgtgcccaggcttcaaggcgtacctggacatcggccaggtctactactatatgggcgtggacgcggtgcaggagctgctggcggtggacgaggcggcgctgaaccaggcgctggtgttcctggccaaggcgggcgagtcggagctgggtgccacgctgcccgagctgcagctgctgcgcggcaagtgcctgcgcatcaagggcgaggacgccaacgcggccgc

SEQ ID NO: 52943 - DNA, 1455 bp, Homo sapiens
ctgcccctcgcctcccgcacggagctcgctcggggaacgcccccatccactgccctccacagcctcagggacaagggtgaggccaggggagcagagggagcagtcatggcggagctggaggctgtggccgacgatctagacgccctcatcgacgacctggactacctcccgggccactttcacctggagatgcagttgaacttcgagccgcgctcgccggccccacagcgcgcccgggacctgaagctgcagcgggagggtctgcggcaggagctccagctggcggccgccccgcagcgccccgctgtgcgtcacctcctgggcgctttcgcattctacctggaggagctggacgaggcccgcgagtgcttcctcgaggtggcccacgagcacccgggcaacctcaatgcctgggccaatctggcacacgtgtacgggcggctgggccaggaagaagaggaggaggcgtgcgccgcacggctggccgacctcatgggcctggcagaggagcccgaggccgccggggacccccagctccgcgccgctcgctgcctggccgagcagggctacgcgcatggcttcgacgtcggctgcgccagcccagaggagcgtgcgcgggggctggcggcaggcatcgcgctctacgacaaggcgctaggctacgggcagcagatcccgatggaggagaaaaggggctggtatttcaccatggcaacactctacatcaggctagatggcatcttcctggagctgggcagtgaggagcagaagagactgcctgccttcaaccgcacgctggccctactccggcaagtgctgaagtccgaggacccccgccaccgagccctggcctggtgctacctcgggatgctgctggagcggaaggacaccttctccaccacccccatgggcgtccatgactgcgggtactcagggaccgaccctctagactgcttcggcaaggccattgagattgccaagaaccaacctcccatcctgaatcgcctggcaaaaatcttctacttcctgggaaagcaggatatggccattggaacctgcaacatggccctggatgtcctacgagatccagagctcaactggcaggcgtactgcacaagggccaagcttcccgcactggtcccagacctgcctcctagagcccacacagagcccatgtgcttgaggaagccgactcggagctcccagtttacttcactgcaagccgaagagtcctcccatcccctcatcttctccactactatccacatgacctagtggcaaatctactcccagtcttggtctcagtggcttaattactttgccagcaggtacgaggcaggagtgaaattccttcactgtcgtggatgtggttattattctagataataatgacattaaccataatagtaaataataaaatatctctataaaattctgcatttcatcagcactttc

SEQ ID NO: 52944 - DNA, 330 bp, Homo sapiens
cgcatcaggaagaataaagagaaagagacagagaatgcaggcggtagagccaaatgacctctcaaatgtcttctggctctgtcacctccccaaagttggagtccatgatttcataaatggaaaaacacaaacactttcttcagtaaaaatttagctgacggccaggcgcagtggctcacgcctgtaatcctagcactttgggaggctaaggcaggtgggtcacctgaggtcgggagttcgagaccagcctgaccaacatggtaaaacctcatctttactaaaagtacaaaattagccaggcgtggtggcgcatgcctgtaatcccagcta

SEQ ID NO: 52945 - DNA, 970 bp, Homo sapiens
ttcctcgtggtcgcgcacccgtttcacctcaacaacaaagcgcggtttcctccctcgccatccttcctcatggtcgcgcacccggcttacctcaccaacaaagcgcggtttcctccctcgccatccttcctcatggtcgtgcacccggttggatttcacagtcatggaagttctgctttaaaatccgtttctgaagaagtgttaatgatcttgacactgctgaccagggacaaaatgtcccattgacagtcatgctctggagcaggatgggcagtgagagaccagagaccacaggatgggtaagaaatagcccagctcaggctactgggttgaagaactgccagagcgtgatcgccaacgtgcagatttctgatctacgtgtaatgtagaagctgactgttctgtatctgacgtttcatttagagtctatgaagtagcttaggccaattactcatagccgcctgcccctcctcagttacctggacatatgtcttgtgttctggaatcaaaactaattctgaatgcatatcctgaaaacatgggacacttactcagatttcactcttgggtgtcattggccttttaattattttctatcaatagaccgaccttagatttacttgtcaaaaaaagtaaggtcattttatgagcactttcattccaatttcctagatgtcttttctgattagaaaaacctataaactatgtagctttgaatttatagaatcattattcctgaaggttttgctgtcctttgcgctcagagatggtcccactgactcagagatggtcccactgacccagcatggcagagcctgtgattgcagctccaggggccctcaattcatttgtttccctgcctctccatctccccatgttatcctgtcaccccaaaaagcacctgcctgcaacacggtcaacagagtccatccatagagtcccgctggttcagctggttgtttccagcttt

SEQ ID NO: 52946 - DNA, 340 bp, Homo sapiens
ttcctcgtggtcgcgcacccgtttcacctcaacaacaaagcgcggtttcctccctcgccatccttcctcatggtcgcgcacccggcttacctcaccaacaaagcgcggtttcctccctcgccatccttcctcatggtcgtgcacccggttggatttcacagtcatggaagttctgctttaaaatccgtttctgaagaagtgttaatggcagcagtgagcccccctgcctctgattgtcatctttgggggccagagaagtgagcagctatccttcccagtccctggtccctccaagcagtgacaacaaagaatggaccaggcgaggcattgtgtgtagaca

SEQ ID NO: 52947 - DNA, 914 bp, Homo sapiens
gtttcaagaaacattgctgagggtagcagtgaagttggatgtttgctaggaaattatgaaaacaaatgtgactcagagaggtcatttcacattttatctttatatcctctctttactaaacctgtgtttggataagttggtcaatcatccaaggatcctctatgttttctttacagttgacactgggtcaattttctaaggaaaacaccttgacaaataaagcatcttcattagaggtcaggaggaaaaataactattctctttcaaaagaaaatctgaacaatttttttagcatggcccaatgttctatttcctatatttagaaactttgaataagggtctagtaatcttgtctcagaggcatagaaacaaaagtacagttattaggtttaactatactcaaactatttgctatttttaaacatttttgctgtaagtttatatatatatacatatataatacatatatacatatatataatatatatatacatatatatataattttctttgttaaaaataacaattgaaaaagactggcatgagacatgaatggctgagtcatttaattgccatacaaataaaatgctgacaggtttcaagcaaaaaatacagtatgcaccttaaataatgcctcagaattgtataatttaagctcactaaaaaccttacttagtcttaaaattctccttaggggagccttttcagcagttatggacatcaaagaaaaaagtatcttgtaaaagcacaatgaaatttagaaaatacacattttagtggcaatcacaaatgtcaatataaaagatacataaaatatgttaatgcaagaactttttcatattcattgaaaactataactttgtgctatttataaagtagatattttccaggtatgaaaatataatttggaaacc

SEQ ID NO: 52948 - DNA, 563 bp, Homo sapiens
gctgggtgacagagcaagactctgtctcaaaaaaaaaaggaaaaaaaaaagttttatgaataagtaatttaagtagacctatattcaataaagaaatagaatcaataattattagtaaccttccaaaacagaaagccccaggcccagatgggttggcgagtgaattccaacaaatatttaaggaagaaatgataaaaattctcaacaatctttcagagaatagaagcagagggactacttgctaactagctctatgagaccaacattacactaataccaaagcaagacaaattataagagaaaactacagaccaatatcttttatgaacacagatgcaaaaatcctcaacaaaatattagcaaatcaaatccaacaatgttcaaaaagaattacacatcgtgaccaagtaggatttctcccaggtatgcaaggtcaattctacatttgaaaatcaattaaatccattaatgcaattcaccacatcagtaggctaaagaagagaaatcacatgatcccttcaatagaggccaaaaaagcatttaatacccattcatgatttaaa

SEQ ID NO: 52949 - DNA, 859 bp, Homo sapiens
agtccccgtcctcactctcctctctgccactctccacagcttctgcagatggcctcccctctctgcgactggttccttatcgaggcaatggagatgtggactgcggtgactgatcaagcctcacatatctactgaatcaggaagcccgaagcctgaggctcccgagtggccccatgggagcgtcgtgcatttttctggtcagtcagtcattaggggaaacgatgaatgagccaggccagcatgagaaggcctgcatgctatcggatctttttcctgaaaacatcgacatgggacatgttcaaaccaaattttctttataagttataagaaaatcaggcggaggctaaactttttttttttttttggcaatgctgttgagaatattacattatgttcccacaatagcataaatgtatgtcttatcacttgaatggagcccagacaataaaagggcgcctgagagtggaaatacgcctatgagaaaggccaagccagcctttcgtgataacagcagcagggagggaagagtgcacagagctgaccacagcacaaatgtcgcagacccttgaggaccgcgccagggctcagagctccacccaagggcttgtgatcctcaccccagccaagttccttcagaccccagggtcttcgtttcgtgacttataaaatgggaattatatgtcatgggagtgttggggggaaaatgcaaccattagcaaatgctttcaaatataatatgtattatcaatatcaggtaaaggtaacattttatttcctagggccgggaatttgatttttgttttcccgtttatttttatccatgttcaaccacccacaagtgtgctctctcaaaacgcaa

SEQ ID NO: 52950 - DNA, 303 bp, Homo sapiens
caacatgtcagctttatagttgccgattagtgatatgggtctgatttcgatctcttcctgatgtaaaccatgctcacccatatcccactatacaaatgcaaatggttgcctggttccatttatgcaagggagccagtactgaattatgccttggcagaggggagactccaaaagagtcatcgcaggaagaagttaagaacactgaacatcagaacagtctgccaagaaggacattggcatcctgggaaagtccgccttttcccttgaccactatagggtgtataaatcgtgtttgcaaaatgt

SEQ ID NO: 52951 - DNA, 751 bp, Homo sapiens
attgacaaggaaaggccatgttatgttcaccctgggttaagttttaagtgtatcttatttaatttttttcaatatgagtcatctccagatactgtgatgatttccaaataaccagaatctagatgactagaaatttactctagctggctttagacaggaagcgtgaggacagaatccagctgcttccactccagggtaggtctgaagccaaccgtcctcggtttcctggcctgtggcatcagtctggttggattacacacaaagccctgcagatctgctgcttttcctgattctcctgtcctgagtgagtgcaaggggctcccctgtcgtcgatgtgttctttgaagcagatgctgtgcctgatacctgctggagagtcccaccgccttgagcttctgggtcgagaaaggccaagttgcacactactgagagactgccatgcaccccctggaggcctcagaacattcgacatgcttcagtcatggccacggcagtgactgctgattgcctaaccccacatgtgttctcccccttccctgataatcaagcccctgattttcagctgggcacaaaataattcttcctagaacaactccatgtgtgttatcgcccttgcagctgggggtggccaccactggggagaggcagggtgaagaggtggaaggagcctgagttagcagggatgagcagtggccaggtaaccccagacccactatcctctggatttcttttatgtgaaacaataaaatgt

SEQ ID NO: 52952 - DNA, 829 bp, Homo sapiens
agatattatagagaaatcttaaatgtatgagtaaccttttctgaaaaacaaaagtgggatgaaatatattggtaaaagtatccacttatcttgattattttcattttacaacatacctctgtgtacctttgtgttttattttgcaatctataaagaacttgtccataatcacacagttatcttttcaatattgagatactgtgttttttaaaaatcagtagaggtattttacttaagcattggccaagaagaatgtttaccacatatacagtttatattctttcatgctacaatatttataatcggccgagcacagtggctcacaccaggaatcccagcattttgggagaccgaggcccaggagttcaagtgtatacatatatgtatgcaggtgtggtggcacacaagcgtgtagtcccaagtagctggaactataggcgtgcgccaccacgcccagctaattttgtatttaaccctttcttaaactgtgaatacatgtgcactcaccatcctattttgtatacatagaaagcatggtaaaaatattgaatatttcttttacacaagtgatttgctgtatgttgagcagctctctgggaggtcagattatttacccacaggaagtggattgagtaggaataagtttacttcacagatatactaactactctttttcaccctataacatgttttgttttcttctcaacctatcaagcagatcttttcatgcttttccatggaagagccagtaatggtagtgaagaatcacaaatttccctggatctcttgcctgaagcagttcttcataaagactcttgtttcgtaccga

SEQ ID NO: 52953 - DNA, 335 bp, Homo sapiens
caaatgcatatatgtacacatgcatatgtctaatttttcattttgtaattaatttttagaccacactaaagttgctcttagtgatgatagggcttgtttctttgtttcattgtggctacttcttagcaccttctttagaaagcagttaggagaagatcatttgaaggccaacgagtgttgtgggttattgttaagctgatttaacattatctccccccacaaccacgcttgactagcttcacatttggccaggtgcagtggctcacgtctgtaatccagcactttgggaggctgaggtggaagatcacaaggtcaagagattgagaccatcctgg

SEQ ID NO: 52954 - DNA, 351 bp, Homo sapiens
agaagaataagtgaaggtacatgccccttgcacctgagcacgtggacttagatttccactgccctcattactcttccatgtttatgagttttagggccacataacttgtctttagaatgccctctcccaccctttcaggcaaagccccccatgttttctccctgataccctctctgactttccttggaaaaactcattatccctcctccacatgccccttagagaactgccctagtcctccagacagctataaatgaagcttacataaatggctaggaagaggagcatgagtgtataaatgcctacatatacataagtttgcatgtatggccgctgtattagtccattttc

SEQ ID NO: 52955 - DNA, 747 bp, Homo sapiens
cttcgacgccaccattttaaagggatttactgcacggacttctcccaagttcctaggcattatcttctggaccctatcctgcagaggaggcggcgacggcggcggcggggggagaggaagagaaagaagcgtctccagctgaagccaatgcagccctccggctctccgcgaagaagttccctgccccgatgagcccccgccgtgcgtccccgactatccccaggcgggcgtggggcaccgggcccagcgccgacgatcgctgccgttttgcccttgggagtaggatgtggtgaaaggatggggcttctcccttacggggctcacaatggccagagaagattccgtgaagtgtctgcgctgcctgctctacgccctcaatctgctcttttggaatcatcacattccacttctaaaaggagctttaaagatggcctggttgaacgtccttcctttgtgagtgaggaaattaagtgcagattaagtgacttgccaaagatcagatagtccaatggtggcagtgccaggaacagaattcagctttcttgcccctagacagtgtctttcacttgacccttactgagttttgaaccttagaattactaagattgttgttgttgttgtttaataaagaataaagctttgaaaaatttgttaatactttacattgtgtgggaaaaaagaaccaaatcattcaacaaaaatatcactcctcttggaaatgaaatttgcataaaagcacctattcct

SEQ ID NO: 52956 - DNA, 694 bp, Homo sapiens
ttatctgaagccggtttggaacttttgggagtttagttaccattatgattttaacaaatgatttttgatgaggcgatgtctcgaatgcactgggcctcgggaccctctggaccctgctgagggcgggtggaggagggacgggcaggctgtgggaagcgtgatggtgagatgtcccgtgttctctctcccccgccccctgcagatcgctgccgttttgcccttgggagtaggatgtggtgaaaggatggggcttctcccttacggggctcacaatggccagagaagattccgtgaagtgtctgcgctgcctgctctacgccctcaatctgctcttttggaatcatcacattccacttctaaaaggagctttaaagatggcctggttgaacgtccttcctttgtgagtgaggaaattaagtgcagattaagtgacttgccaaagatcagatagtccaatggtggcagtgccaggaacagaattcagctttcttgcccctagacagtgtctttcacttgacccttactgagttttgaaccttagaattactaagattgttgttgttgttgtttaataaagaataaagctttgaaaaatttgttaatactttacattgtgtgggaaaaaagaaccaaatcattcaacaaaaatatcactcctcttggaaatgaaatttgcataaaagcacctattcct

SEQ ID NO: 52957 - DNA, 2568 bp, Homo sapiens
agctggccctggctgccgccgctgcctcgtccggactcggagaggacttgggagggacagcggcgctgggaggtggcttagcagagactttccagcaactgctgcccaggacttttttttttttttttctttttcccaggaggcggcgacggcggcggcggggggagaggaagagaaagaagcgtctccagctgaagccaatgcagccctccggctctccgcgaagaagttccctgccccgatgagcccccgccgtgcgtccccgactatccccaggcgggcgtggggcaccgggcccagcgccgacgatcgctgccgttttgcccttgggagtaggatgtggtgaaaggatggggcttctcccttacggggctcacaatggccagagaagattccgtgaagtgtctgcgctgcctgctctacgccctcaatctgctcttttggttaatgtccatcagtgtgttggcagtttctgcttggatgagggactacctaaataatgttctcactttaactgcagaaacgagggtagaggaagcagtcattttgacttactttcctgtggttcatccggtcatgattgctgtttgctgtttccttatcattgtggggatgttaggatattgtggaacggtgaaaagaaatctgttgcttcttgcatggtactttggaagtttgcttgtcattttctgtgtagaactggcttgtggcgtttggacatatgaacaggaacttatggttccagtacaatggtcagatatggtcactttgaaagccaggatgacaaattatggattacctagatatcggtggcttactcatgcttggaatttttttcagagagagtttaagtgctgtggagtagtatatttcactgactggttggaaatgacagagatggactggcccccagattcctgctgtgttagagaattcccaggatgttccaaacaggcccaccaggaagatctcagtgacctttatcaagagggttgtgggaagaaaatgtattcctttttgagaggaaccaaacaactgcaggtgctgaggtttctgggaatctccattggggtgacacaaatcctggccatgattctcaccattactctgctctgggctctgtattatgatagaagggagcctgggacagaccaaatgatgtccttgaagaatgacaactctcagcacctgtcatgtccctcagtagaactgttgaaaccaagcctgtcaagaatctttgaacacacatccatggcaaacagctttaatacacactttgagatggaggagttataaaaagaaatgtcacagaagaaaaccacaaacttgttttattggacttgtgaatttttgagtacatactatgtgtttcagaaatatgtagaaataaaaatgttgccataaaataacacctaagcatatactattctatgctttaaaatgaggatggaaaagtttcatgtcataagtcaccacctggacaataattgatgcccttaaaatgctgaagacagatgtcatacccactgtgtagcctgtgtatgacttttactgaacacagttatgttttgaggcagcatggtttgattagcatttccgcatccatgcaaacgagtcacatatggtgggactggagccatagtaaaggttgatttacttctaccaactagtatataaagtactaattaaatgctaacataggaagttagaaaatactaataacttttattactcagcgatctattcttctgatgctaaataaattatatatcagaaaactttcaatattggtgactacctaaatgtgatttttgctggttactaaaatattcttaccacttaaaagagcaagctaacacattgtcttaagctgatcagggattttttgtatataagtctgtgttaaatctgtataattcagtcgatttcagttctgataatgttaagaataaccattatgaaaaggaaaatttgtcctgtatagcatcattatttttagcctttcctgttaataaagctttactattctgtcctgggcttatattacacatataactgttatttaaatacttaaccactaattttgaaaattaccagtgtgatacataggaatcattattcagaatgtagtctggtctttaggaagtattaataagaaaatttgcacataacttagttgattcagaaaggacttgtatgctgtttttctcccaaatgaagactctttttgacactaaacactttttaaaaagcttatctttgccttctccaaacaagaagcaatagtctccaagtcaatataaattctacagaaaatagtgttctttttctccagaaaaatgcttgtgagaatcattaaaacatgtgacaatttagagattctttgttttatttcactgattaatatactgtggcaaattacacagattattaaatttttttacaagagtatagtatatttatttgaaatgggaaaagtgcattttactgtattttgtgtattttgtttatttctcagaatatggaaagaaaattaaaatgtgtcaataaatattttctagagagtaa

SEQ ID NO: 52958 - DNA, 2515 bp, Homo sapiens
cttcgacgccaccattttaaagggatttactgcacggacttctcccaagttcctaggcattatcttctggaccctatcctgcagaggaggcggcgacggcggcggcggggggagaggaagagaaagaagcgtctccagctgaagccaatgcagccctccggctctccgcgaagaagttccctgccccgatgagcccccgccgtgcgtccccgactatccccaggcgggcgtggggcaccgggcccagcgccgacgatcgctgccgttttgcccttgggagtaggatgtggtgaaaggatggggcttctcccttacggggctcacaatggccagagaagattccgtgaagtgtctgcgctgcctgctctacgccctcaatctgctcttttggttaatgtccatcagtgtgttggcagtttctgcttggatgagggactacctaaataatgttctcactttaactgcagaaacgagggtagaggaagcagtcattttgacttactttcctgtggttcatccggtcatgattgctgtttgctgtttccttatcattgtggggatgttaggatattgtggaacggtgaaaagaaatctgttgcttcttgcatggtactttggaagtttgcttgtcattttctgtgtagaactggcttgtggcgtttggacatatgaacaggaacttatggttccagtacaatggtcagatatggtcactttgaaagccaggatgacaaattatggattacctagatatcggtggcttactcatgcttggaatttttttcagagagagtttaagtgctgtggagtagtatatttcactgactggttggaaatgacagagatggactggcccccagattcctgctgtgttagagaattcccaggatgttccaaacaggcccaccaggaagatctcagtgacctttatcaagagggttgtgggaagaaaatgtattcctttttgagaggaaccaaacaactgcaggtgctgaggtttctgggaatctccattggggtgacacaaatcctggccatgattctcaccattactctgctctgggctctgtattatgatagaagggagcctgggacagaccaaatgatgtccttgaagaatgacaactctcagcacctgtcatgtccctcagtagaactgttgaaaccaagcctgtcaagaatctttgaacacacatccatggcaaacagctttaatacacactttgagatggaggagttataaaaagaaatgtcacagaagaaaaccacaaacttgttttattggacttgtgaatttttgagtacatactatgtgtttcagaaatatgtagaaataaaaatgttgccataaaataacacctaagcatatactattctatgctttaaaatgaggatggaaaagtttcatgtcataagtcaccacctggacaataattgatgcccttaaaatgctgaagacagatgtcatacccactgtgtagcctgtgtatgacttttactgaacacagttatgttttgaggcagcatggtttgattagcatttccgcatccatgcaaacgagtcacatatggtgggactggagccatagtaaaggttgatttacttctaccaactagtatataaagtactaattaaatgctaacataggaagttagaaaatactaataacttttattactcagcgatctattcttctgatgctaaataaattatatatcagaaaactttcaatattggtgactacctaaatgtgatttttgctggttactaaaatattcttaccacttaaaagagcaagctaacacattgtcttaagctgatcagggattttttgtatataagtctgtgttaaatctgtataattcagtcgatttcagttctgataatgttaagaataaccattatgaaaaggaaaatttgtcctgtatagcatcattatttttagcctttcctgttaataaagctttactattctgtcctgggcttatattacacatataactgttatttaaatacttaaccactaattttgaaaattaccagtgtgatacataggaatcattattcagaatgtagtctggtctttaggaagtattaataagaaaatttgcacataacttagttgattcagaaaggacttgtatgctgtttttctcccaaatgaagactctttttgacactaaacactttttaaaaagcttatctttgccttctccaaacaagaagcaatagtctccaagtcaatataaattctacagaaaatagtgttctttttctccagaaaaatgcttgtgagaatcattaaaacatgtgacaatttagagattctttgttttatttcactgattaatatactgtggcaaattacacagattattaaatttttttacaagagtatagtatatttatttgaaatgggaaaagtgcattttactgtattttgtgtattttgtttatttctcagaatatggaaagaaaattaaaatgtgtcaataaatattttctagagagtaa

SEQ ID NO: 52959 - DNA, 1657 bp, Homo sapiens
  misc_feature (67)..(68): n is a, c, g, or t
ttccttcgcacgtaacagttttactttataaagaggagagaagctatctgcagagactctcttaatnntccccgctcagggttgtgggaagaaaatgtattcctttttgagaggaaccaaacaactgcaggtgctgaggtttctgggaatctccattggggtgacacaaatcctggccatgattctcaccattactctgctctgggctctgtattatgatagaagggagcctgggacagaccaaatgatgtccttgaagaatgacaactctcagcacctgtcatgtccctcagtagaactgttgaaaccaagcctgtcaagaatctttgaacacacatccatggcaaacagctttaatacacactttgagatggaggagttataaaaagaaatgtcacagaagaaaaccacaaacttgttttattggacttgtgaatttttgagtacatactatgtgtttcagaaatatgtagaaataaaaatgttgccataaaataacacctaagcatatactattctatgctttaaaatgaggatggaaaagtttcatgtcataagtcaccacctggacaataattgatgcccttaaaatgctgaagacagatgtcatacccactgtgtagcctgtgtatgacttttactgaacacagttatgttttgaggcagcatggtttgattagcatttccgcatccatgcaaacgagtcacatatggtgggactggagccatagtaaaggttgatttacttctaccaactagtatataaagtactaattaaatgctaacataggaagttagaaaatactaataacttttattactcagcgatctattcttctgatgctaaataaattatatatcagaaaactttcaatattggtgactacctaaatgtgatttttgctggttactaaaatattcttaccacttaaaagagcaagctaacacattgtcttaagctgatcagggattttttgtatataagtctgtgttaaatctgtataattcagtcgatttcagttctgataatgttaagaataaccattatgaaaaggaaaatttgtcctgtatagcatcattatttttagcctttcctgttaataaagctttactattctgtcctgggcttatattacacatataactgttatttaaatacttaaccactaattttgaaaattaccagtgtgatacataggaatcattattcagaatgtagtctggtctttaggaagtattaataagaaaatttgcacataacttagttgattcagaaaggacttgtatgctgtttttctcccaaatgaagactctttttgacactaaacactttttaaaaagcttatctttgccttctccaaacaagaagcaatagtctccaagtcaatataaattctacagaaaatagtgttctttttctccagaaaaatgcttgtgagaatcattaaaacatgtgacaatttagagattctttgttttatttcactgattaatatactgtggcaaattacacagattattaaatttttttacaagagtatagtatatttatttgaaatgggaaaagtgcattttactgtattttgtgtattttgtttatttctcagaatatggaaagaaaattaaaatgtgtcaataaatattttctagagagtaa

SEQ ID NO: 52960 - DNA, 2621 bp, Homo sapiens
agctggccctggctgccgccgctgcctcgtccggactcggagaggacttgggagggacagcggcgctgggaggtggcttagcagagactttccagcaactgctgcccaggacttttttttttttttttctttttcccaggaggcggcgacggcggcggcggggggagaggaagagaaagaagcgtctccagctgaagccaatgcagccctccggctctccgcgaagaagttccctgccccgatgagcccccgccgtgcgtccccgactatccccaggcgggcgtggggcaccgggcccagcgccgacgatcgctgccgttttgcccttgggagtaggatgtggtgaaaggatggggcttctcccttacggggctcacaatggccagagaagattccgtgaagtgtctgcgctgcctgctctacgccctcaatctgctcttttggttaatgtccatcagtgtgttggcagtttctgcttggatgagggactacctaaataatgttctcactttaactgcagaaacgagggtagaggaagcagtcattttgacttactttcctgtggttcatccggtcatgattgctgtttgctgtttccttatcattgtggggatgttaggatattgtggaacggtgaaaagaaatctgttgcttcttgcatggtactttggaagtttgcttgtcattttctgtgtagaactggcttgtggcgtttggacatatgaacaggaacttatggttccagtacaatggtcagatatggtcactttgaaagccaggatgacaaattatggattacctagatatcggtggcttactcatgcttggaatttttttcagagagagtttaagtgctgtggagtagtatatttcactgactggttggaaatgacagagatggactggcccccagattcctgctgtgttagagaattcccaggatgttccaaacaggcccaccaggaagatctcagtgacctttatcaagagggttgtgggaagaaaatgtattcctttttgagaggaaccaaacaactgcaggtgctgaggtttctgggaatctccattggggtgacacaaatcctggccatgattctcaccattactctgctctgggctctgtattatgatagaagggagcctgggacagaccaaatgatgtccttgaagaatgacaactctcagcacctgtcatgtccctcagtagaactgttgaaaccaagcctgtcaagaatctttgaacacacatccatggcaaacagctttaatacacactttgagatggaggagttataaaaagaaatgtcacagaagaaaaccacaaacttgttttattggacttgtgaatttttgagtacatactatgtgtttcagaaatatgtagaaataaaaatgttgccataaaataacacctaagcatatactattctatgctttaaaatgaggatggaaaagtttcatgtcataagtcaccacctggacaataattgatgcccttaaaatgctgaagacagatgtcatacccactgtgtagcctgtgtatgacttttactgaacacagttatgttttgaggcagcatggtttgattagcatttccgcatccatgcaaacgagtcacatatggtgggactggagccatagtaaaggttgatttacttctaccaactagtatataaagtactaattaaatgctaacataggaagttagaaaatactaataacttttattactcagcgatctattcttctgatgctaaataaattatatatcagaaaactttcaatattggtgactacctaaatgtgatttttgctggttactaaaatattcttaccacttaaaagagcaagctaacacattgtcttaagctgatcagggattttttgtatataagtctgtgttaaatctgtataattcagtcgatttcagttctgataatgttaagaataaccattatgaaaaggaaaatttgtcctgtatagcatcattatttttagcctttcctgttaataaagctttactattctgtcctgggcttatattacacatataactgttatttaaatacttaaccactaattttgaaaattaccagtgtgatacataggaatcattattcagaatgtagtctggtctttaggaagtattaataagaaaatttgcacataacttagttgattcagaaaggacttgtatgctgtttttctcccaaatgaagactctttttgacactaaacactttttaaaaagcttatctttgccttctccaaacaagaagcaatagtctccaagtcaatataaattctacagaaaatagtgttctttttctccagaaaaatgcttgtgagaatcattaaaacatgtgacaatttagagattctttgttttatttcactgattaatatactgtggcaaattacacagattattaaatttttttacaagagtatagtatatttatttgaaatgggaaaagtgcattttactgtattttgtgtattttgtttatttctcagaatatggaaagaaaattaaaatgtgtcaataaatattttctagagagtaaaaaaaaagagagaaaagaaaaattttgagagacggcccagcaattttgaaagg

SEQ ID NO: 52961 - DNA, 429 bp, Homo sapiens
tgtgaggtaataaaaagcaagttgcagaaatacatatattacatgctctcttttgtgtagaaaagcagggaagataagccaaaaactaacgacaatgaatgtggttaccaagaaggggatgaagtaaatgaggcagatgagacaggaatggaagtgctctcaacagatcttgttattgagttttatgtaaatattctgtatattccaaaggataaacatttttttaaagtagagcaatcccaaaaacttgaagtagaatataacaaataaacctggctgggtcaaattagtaacataatgttagtaacataacattgagaaaagaattatatcaagtgattttacccagcattttgactatacattcttagtgaaatacattccaagggcaatagaatatattccaagggcaaaaaaatactttaagga

SEQ ID NO: 52962 - DNA, 279 bp, Homo sapiens
ggattgtcccattttacagatgggaaactatgggttgtctgtttgtctccaggtctactttgcctactaatgacataagtcacttgttctgttgccctgtccttgatctctcattcattcattcattcattcattctgtgctagattctccccctagagaagaagcgacagtttcataaatgcagatagacccaactagagaggtgactatacaacagtagccatatagatttaatttcattttcaaagcagaagtgattgtgtagagatcttgtttgt

SEQ ID NO: 52963 - DNA, 334 bp, Homo sapiens
cagaagttagccaccaggaagacaatgaacagaaacacagagggaaatagaaactgacccatgaaagagagagatagagctgtagttccagttcgcagtccataagtttctttaccccccattattttagactgagtttttgttttttggaacttatactatattaatagcatatgaattaaacatcttgatcaatcagagcaaacaatccaaaaacttctgtaaaataaatatcaatagtttctaaattttaggaaagtgatattgggtaaatggaaggattaattttgtagtctggagatggggaaggcagaaaaccatgtttgcttctgta

SEQ ID NO: 52964 - DNA, 233 bp, Homo sapiens
actgttacctgagggctgttcctagcttctagaggctacccaccttccttggcttgtggccccctgcctccatcttcagtgccgtcaacagctggttaagtccctttcttgcttcagatatctcctgccacttcttccttcatggaatccctctgacccccccttctagcttcctcctccatgtttgaaaggcacacatgattatgttgtatccacctagataattgataaca

SEQ ID NO: 52965 - DNA, 2754 bp, Homo sapiens
cctgccgcctccgcggcccagtcggcaccggcgaggccgtgctggaacccgggcctcagccgcagccgcagcggggccgacatgacgacagctccccaggagccccccgcccggcccctccaggcgggcagtggagctggcccggcgcctgggcgcgccatgcgcagcaccacgctcctggccctgctggcgctggtcttgctttacttggtgtctggtgccctggtgttccgggccctggagcagccccacgagcagcaggcccagagggagctgggggaggtccgagagaagttcctgagggcccatccgtgtgtgagcgaccaggagctgggcctcctcatcaaggaggtggctgatgccctgggagggggtgcggacccagaaaccaactcgaccagcaacagcagccactcagcctgggacctgggcagcgccttctttttctcagggaccatcatcaccaccatcggctatggcaatgtggccctgcgcacagatgccgggcgcctcttctgcatcttttatgcgctggtggggattccgctgtttgggatcctactggcaggggtcggggaccggctgggctcctccctgcgccatggcatcggtcacattgaagccatcttcttgaagtggcacgtgccaccggagctagtaagagtgctgtcggcgatgcttttcctgctgatcggctgcctgctctttgtcctcacgcccacgttcgtgttctgctatatggaggactggagcaagctggaggccatctactttgtcatagtgacgcttaccaccgtgggctttggcgactatgtggccggcgcggaccccaggcaggactccccggcctatcagccgctggtgtggttctggatcctgctcggcctggcttacttcgcctcagtgctcaccaccatcgggaactggctgcgagtagtgtcccgccgcactcgggcagagatgggcggcctcacggctcaggctgccagctggactggcacagtgacagcgcgcgtgacccagcgagccgggcccgccgccccgccgccggagaaggagcagccactgctgcctccaccgccctgtccagcgcagccgctgggcaggccccgatccccttcgccccccgagaaggctcagccgccttccccgcccacggcctcggccctggattatcccagcgagaacctggccttcatcgacgagtcctcggatacgcagagcgagcgcggctgcccgctgccccgcgcgccgagaggtcgccgccgcccaaatccccccaggaagcccgtgcggccccgcggccccgggcgtccccgagacaaaggcgtgccggtgtaggggcaggatccctggccgggcctctcaagggcttcgtttctgctctccccggcatgcctggcttgtttgaccaaagagccctctttccacgagactgaagtctggggaggaggctacagttgcctctccgcctcctccctggccccggcccttccctcacttccatccatctctagacccccccaaggctttctgtgtcgctgccccgggcgggtgtatccctcacagcacctcacgactgtgcctcaaagcctgcatcaataaatgaaaacggtctgcaccgctgcgggcgtgacgctcccggacgcgagtgggtgtggaattgctttcctcgggccaccgtgggggcacctctggcctcccgtgacccccaggccgagggtccccgggcacccaggtcggtcaagtctcggccctctcaggcccgcgtctctgcctggaggagactgtgtagggtccggcgtggggatcagccgggatgggctgcgcgtctccagcctctgcacacacattggcgggtggggtgcagggagggagaggcaggggagagagaatggcatctcgcgtggagggctgtcgtttgaactctcccagcgcgagagaccctgccccgcccccttcctggagcgttgactcccttctcgtctcgaggcctgtggcgtctgggtccgttggggcagaaccatggaggaaaagccttcgaaagtgtcgctcaagtcttccgaccgccaaggctcggacgaggagagcgtgcatagcgacactcgggacctgtggaccacgaccacgctgtcccaggcacagctgaacatgccgctgtccgaggtctgcgagggcttcgacgaggagggccgcaacattagcaagacccgcgggtggcacagcccggggcggggctcgttggacgaggggtacaaggccagccacaagccggaggaactggacgagcacgcgctggtggagctggagttgcaccgcggcagctccatggaaatcaatctgggggagaaggacactgcatcccagatcgaggccgaaaagtcttcctcaatgtcatcactcaatattgcgaagcacatgccccatcgagcctactgggcagagcagcagagcaggctgccactgcccctgatggaactcatggagaatgaagctctggaaatcctcaccaaagccctccggagctaccagttagggatcggcagggaccacttcctgactaaggagctgcagcgatacatcgaagggctcaagaagcgccggagcaagaggctgtacgtgaattaaaaacgccaccttgggctcgagcagcgacccgaaccagccccgtgccagcccggtccccagacccaagcctgaccccatccgagtggaatttgagtcctaaagaaataaaagagtcgatgcatggtc

SEQ ID NO: 52966 - DNA, 2011 bp, Homo sapiens
catggaagtgagaaccaaaagctggggcagggagcaccctggagggatagccggggagcaggtagagggccaaaacctggagtgggggcaggaggtgctccagcagcaactcccccagaggtgggtcccaacctccacgtcggccaattccaggtggccccaccgggtttcccccacccctttgtcccgcggagcccctcccttcatgagtgctgagcccaagggccaggctgtccccaggggcggagagttgcgggcccttcccgatccggtaatgggcctgggagatgccagattagcgtggtgcctgtccggagagacgggccagctgatgcccaggtcggggccctgccgctggccacactgggctccggtccaaggctagaaggctggcccctgctgcaacccctctccggctcctctgccacccacctcccggggctggccggctgtggggagccaggcggccgcagtgacgacagctccccaggagccccccgcccggcccctccaggcgggcagtggagctggcccggcgcctgggcgcgccatgcgcagcaccacgctcctggccctgctggcgctggtcttgctttacttggtgtctggtgccctggtgttccgggccctggagcagccccacgagcagcaggcccagagggagctgggggaggtccgagagaagttcctgagggcccatccgtgtgtgagcgaccaggagctgggcctcctcatcaaggaggtggctgatgccctgggagggggtgcggacccagaaaccaactcgaccagcaacagcagccactcagcctgggacctgggcagcgccttctttttctcagggaccatcatcaccaccatcggctatggcaatgtggccctgcgcacagatgccgggcgcctcttctgcatcttttatgcgctggtggggattccgctgtttgggatcctactggcaggggtcggggaccggctgggctcctccctgcgccatggcatcggtcacattgaagccatcttcttgaagtggcacgtgccaccggagctagtaagagtgctgtcggcgatgcttttcctgctgatcggctgcctgctctttgtcctcacgcccacgttcgtgttctgctatatggaggactggagcaagctggaggccatctactttgtcatagtgacgcttaccaccgtgggctttggcgactatgtggccggcgcggaccccaggcaggactccccggcctatcagccgctggtgtggttctggatcctgctcggcctggcttacttcgcctcagtgctcaccaccatcgggaactggctgcgagtagtgtcccgccgcactcgggcagagatgggcggcctcacggctcaggctgccagctggactggcacagtgacagcgcgcgtgacccagcgagccgggcccgccgccccgccgccggagaaggagcagccactgctgcctccaccgccctgtccagcgcagccgctgggcaggccccgatccccttcgccccccgagaaggctcagccgccttccccgcccacggcctcggccctggattatcccagcgagaacctggccttcatcgacgagtcctcggatacgcagagcgagcgcggctgcccgctgccccgcgcgccgagaggtcgccgccgcccaaatccccccaggaagcccgtgcggccccgcggccccgggcgtccccgagacaaaggcgtgccggtgtaggggcaggatccctggccgggcctctcaagggcttcgtttctgctctccccggcatgcctggcttgtttgaccaaagagccctctttccacgagactgaagtctggggaggaggctacagttgcctctccgcctcctccctggccccggcccttccctcacttccatccatctctagacccccccaaggctttctgtgtcgctgccccgggcgggtgtatccctcacagcacctcacgactgtgcctcaaagcctgcatcaataaatgaaaacggtctgc

SEQ ID NO: 52967 - DNA, 2955 bp, Homo sapiens
caggcttaggctctctttcggcctcccactcgccttcctttcccttctcggtgccctcctctctttcctcacccggtagtcccagacaggggctgagggccgggcagcggaggtaaggggaaggctggagataggagggggactgggtgtgtccagccagagggatgtctgtggacagtgcagctgggggctttatggatctttgggtgtgtaggggatagaggaggagggtgtgggtgtcaggccagctcagtgaccccagcatccctggttttgcccgcagtgacgacagctccccaggagccccccgcccggcccctccaggcgggcagtggagctggcccggcgcctgggcgcgccatgcgcagcaccacgctcctggccctgctggcgctggtcttgctttacttggtgtctggtgccctggtgttccgggccctggagcagccccacgagcagcaggcccagagggagctgggggaggtccgagagaagttcctgagggcccatccgtgtgtgagcgaccaggagctgggcctcctcatcaaggaggtggctgatgccctgggagggggtgcggacccagaaaccaactcgaccagcaacagcagccactcagcctgggacctgggcagcgccttctttttctcagggaccatcatcaccaccatcggctatggcaatgtggccctgcgcacagatgccgggcgcctcttctgcatcttttatgcgctggtggggattccgctgtttgggatcctactggcaggggtcggggaccggctgggctcctccctgcgccatggcatcggtcacattgaagccatcttcttgaagtggcacgtgccaccggagctagtaagagtgctgtcggcgatgcttttcctgctgatcggctgcctgctctttgtcctcacgcccacgttcgtgttctgctatatggaggactggagcaagctggaggccatctactttgtcatagtgacgcttaccaccgtgggctttggcgactatgtggccggcgcggaccccaggcaggactccccggcctatcagccgctggtgtggttctggatcctgctcggcctggcttacttcgcctcagtgctcaccaccatcgggaactggctgcgagtagtgtcccgccgcactcgggcagagatgggcggcctcacggctcaggctgccagctggactggcacagtgacagcgcgcgtgacccagcgagccgggcccgccgccccgccgccggagaaggagcagccactgctgcctccaccgccctgtccagcgcagccgctgggcaggccccgatccccttcgccccccgagaaggctcagccgccttccccgcccacggcctcggccctggattatcccagcgagaacctggccttcatcgacgagtcctcggatacgcagagcgagcgcggctgcccgctgccccgcgcgccgagaggtcgccgccgcccaaatccccccaggaagcccgtgcggccccgcggccccgggcgtccccgagacaaaggcgtgccggtgtaggggcaggatccctggccgggcctctcaagggcttcgtttctgctctccccggcatgcctggcttgtttgaccaaagagccctctttccacgagactgaagtctggggaggaggctacagttgcctctccgcctcctccctggccccggcccttccctcacttccatccatctctagacccccccaaggctttctgtgtcgctgccccgggcgggtgtatccctcacagcacctcacgactgtgcctcaaagcctgcatcaataaatgaaaacggtctgcaccgctgcgggcgtgacgctcccggacgcgagtgggtgtggaattgctttcctcgggccaccgtgggggcacctctggcctcccgtgacccccaggccgagggtccccgggcacccaggtcggtcaagtctcggccctctcaggcccgcgtctctgcctggaggagactgtgtagggtccggcgtggggatcagccgggatgggctgcgcgtctccagcctctgcacacacattggcgggtggggtgcagggagggagaggcaggggagagagaatggcatctcgcgtggagggctgtcgtttgaactctcccagcgcgagagaccctgccccgcccccttcctggagcgttgactcccttctcgtctcgaggcctgtggcgtctgggtccgttggggcagaaccatggaggaaaagccttcgaaagtgtcgctcaagtcttccgaccgccaaggctcggacgaggagagcgtgcatagcgacactcgggacctgtggaccacgaccacgctgtcccaggcacagctgaacatgccgctgtccgaggtctgcgagggcttcgacgaggagggccgcaacattagcaagacccgcgggtggcacagcccggggcggggctcgttggacgaggggtacaaggccagccacaagccggaggaactggacgagcacgcgctggtggagctggagttgcaccgcggcagctccatggaaatcaatctgggggagaaggacactgcatcccagatcgaggccgaaaagtcttcctcaatgtcatcactcaatattgcgaagcacatgccccatcgagcctactgggcagagcagcagagcaggctgccactgcccctgatggaactcatggagaatgaagctctggaaatcctcaccaaagccctccggagctaccagttagggatcggcagggaccacttcctgactaaggagctgcagcgatacatcgaagggctcaagaagcgccggagcaagaggctgtacgtgaattaaaaacgccaccttgggctcgagcagcgacccgaaccagccccgtgccagcccggtccccagacccaagcctgaccccatccgagtggaatttgagtcctaaagaaataaaagagtcgatgcatggtc

SEQ ID NO: 52968 - DNA, 3392 bp, Homo sapiens
cctgccgcctccgcggcccagtcggcaccggcgaggccgtgctggaacccgggcctcagccgcagccgcagcggggccgacagtaagtgcggtgcgggctccggtgcgcgggcaggactcaggggcagggacgccccaggggcgactggccgggcggggtgcccacctctcgcgcgtgggcgcctccgggagtggtgtggccgccggtcccgccgcccgccacgctccgaggcgtcgctgtgcggacgcgggggaggcggtgggagcgagctgcgggcgctgcgcggtggccctgctgtctggcgtgtgcacgctagtgtccacacacgtgtgcgtgggctctgggtgccctggcgcggccggcacgcccatgggggccggggatgccggggcgtctgcggagagtgcaggtgggtgacgacagctccccaggagccccccgcccggcccctccaggcgggcagtggagctggcccggcgcctgggcgcgccatgcgcagcaccacgctcctggccctgctggcgctggtcttgctttacttggtgtctggtgccctggtgttccgggccctggagcagccccacgagcagcaggcccagagggagctgggggaggtccgagagaagttcctgagggcccatccgtgtgtgagcgaccaggagctgggcctcctcatcaaggaggtggctgatgccctgggagggggtgcggacccagaaaccaactcgaccagcaacagcagccactcagcctgggacctgggcagcgccttctttttctcagggaccatcatcaccaccatcggtgggggaggggattggcatgtggggggcggcaaggagcttcctcatgggggaaggtgcagggagacggaggggtcccaggtggcccctagacttcctgcatcgcccctctgcccaggctatggcaatgtggccctgcgcacagatgccgggcgcctcttctgcatcttttatgcgctggtggggattccgctgtttgggatcctactggcaggggtcggggaccggctgggctcctccctgcgccatggcatcggtcacattgaagccatcttcttggtgagctgctccatgccctgcctgcccttgtgctgggctccggctacccttccccatgtccctggcacatgagcgcgcccccaaagaccataagcctctcccacaggctccctgggggcgggagtggggagtatgggagtggggattgttggtgtctcctgggtcgtgcctactgccccatcccgcagaagtggcacgtgccaccggagctagtaagagtgctgtcggcgatgcttttcctgctgatcggctgcctgctctttgtcctcacgcccacgttcgtgttctgctatatggaggactggagcaagctggaggccatctactttgtcatagtgacgcttaccaccgtgggctttggcgactatgtggccggcgcggaccccaggcaggactccccggcctatcagccgctggtgtggttctggatcctgctcggcctggcttacttcgcctcagtgctcaccaccatcgggaactggctgcgagtagtgtcccgccgcactcgggcagagatgggcggcctcacggctcaggctgccagctggactggcacagtgacagcgcgcgtgacccagcgagccgggcccgccgccccgccgccggagaaggagcagccactgctgcctccaccgccctgtccagcgcagccgctgggcaggccccgatccccttcgccccccgagaaggctcagccgccttccccgcccacggcctcggccctggattatcccagcgagaacctggccttcatcgacgagtcctcggatacgcagagcgagcgcggctgcccgctgccccgcgcgccgagaggtcgccgccgcccaaatccccccaggaagcccgtgcggccccgcggccccgggcgtccccgagacaaaggcgtgccggtgtaggggcaggatccctggccgggcctctcaagggcttcgtttctgctctccccggcatgcctggcttgtttgaccaaagagccctctttccacgagactgaagtctggggaggaggctacagttgcctctccgcctcctccctggccccggcccttccctcacttccatccatctctagacccccccaaggctttctgtgtcgctgccccgggcgggtgtatccctcacagcacctcacgactgtgcctcaaagcctgcatcaataaatgaaaacggtctgcaccgctgcgggcgtgacgctcccggacgcgagtgggtgtggaattgctttcctcgggccaccgtgggggcacctctggcctcccgtgacccccaggccgagggtccccgggcacccaggtcggtcaagtctcggccctctcaggcccgcgtctctgcctggaggagactgtgtagggtccggcgtggggatcagccgggatgggctgcgcgtctccagcctctgcacacacattggcgggtggggtgcagggagggagaggcaggggagagagaatggcatctcgcgtggagggctgtcgtttgaactctcccagcgcgagagaccctgccccgcccccttcctggagcgttgactcccttctcgtctcgaggcctgtggcgtctgggtccgttggggcagaaccatggaggaaaagccttcgaaagtgtcgctcaagtcttccgaccgccaaggctcggacgaggagagcgtgcatagcgacactcgggacctgtggaccacgaccacgctgtcccaggcacagctgaacatgccgctgtccgaggtctgcgagggcttcgacgaggagggccgcaacattagcaagacccgcgggtggcacagcccggggcggggctcgttggacgaggggtacaaggccagccacaagccggaggaactggacgagcacgcgctggtggagctggagttgcaccgcggcagctccatggaaatcaatctgggggagaaggacactgcatcccagatcgaggccgaaaagtcttcctcaatgtcatcactcaatattgcgaagcacatgccccatcgagcctactgggcagagcagcagagcaggctgccactgcccctgatggaactcatggagaatgaagctctggaaatcctcaccaaagccctccggagctaccagttagggatcggcagggaccacttcctgactaaggagctgcagcgatacatcgaagggctcaagaagcgccggagcaagaggctgtacgtgaattaaaaacgccaccttgggctcgagcagcgacccgaaccagccccgtgccagcccggtccccagacccaagcctgaccccatccgagtggaatttgagtcctaaagaaataaaagagtcgatgcatggtc

SEQ ID NO: 52969 - DNA, 2793 bp, Homo sapiens
cctgccgcctccgcggcccagtcggcaccggcgaggccgtgctggaacccgggcctcagccgcagccgcagcggggccgacagaggtggctgatgccctgggagggggtgcggacccagaaaccaactcgaccagcaacagcagccactcagcctgggacctgggcagcgccttctttttctcagggaccatcatcaccaccatcggtgggggaggggattggcatgtggggggcggcaaggagcttcctcatgggggaaggtgcagggagacggaggggtcccaggtggcccctagacttcctgcatcgcccctctgcccaggctatggcaatgtggccctgcgcacagatgccgggcgcctcttctgcatcttttatgcgctggtggggattccgctgtttgggatcctactggcaggggtcggggaccggctgggctcctccctgcgccatggcatcggtcacattgaagccatcttcttggtgagctgctccatgccctgcctgcccttgtgctgggctccggctacccttccccatgtccctggcacatgagcgcgcccccaaagaccataagcctctcccacaggctccctgggggcgggagtggggagtatgggagtggggattgttggtgtctcctgggtcgtgcctactgccccatcccgcagaagtggcacgtgccaccggagctagtaagagtgctgtcggcgatgcttttcctgctgatcggctgcctgctctttgtcctcacgcccacgttcgtgttctgctatatggaggactggagcaagctggaggccatctactttgtcatagtgacgcttaccaccgtgggctttggcgactatgtggccggcgcggaccccaggcaggactccccggcctatcagccgctggtgtggttctggatcctgctcggcctggcttacttcgcctcagtgctcaccaccatcgggaactggctgcgagtagtgtcccgccgcactcgggcagagatgggcggcctcacggctcaggctgccagctggactggcacagtgacagcgcgcgtgacccagcgagccgggcccgccgccccgccgccggagaaggagcagccactgctgcctccaccgccctgtccagcgcagccgctgggcaggccccgatccccttcgccccccgagaaggctcagccgccttccccgcccacggcctcggccctggattatcccagcgagaacctggccttcatcgacgagtcctcggatacgcagagcgagcgcggctgcccgctgccccgcgcgccgagaggtcgccgccgcccaaatccccccaggaagcccgtgcggccccgcggccccgggcgtccccgagacaaaggcgtgccggtgtaggggcaggatccctggccgggcctctcaagggcttcgtttctgctctccccggcatgcctggcttgtttgaccaaagagccctctttccacgagactgaagtctggggaggaggctacagttgcctctccgcctcctccctggccccggcccttccctcacttccatccatctctagacccccccaaggctttctgtgtcgctgccccgggcgggtgtatccctcacagcacctcacgactgtgcctcaaagcctgcatcaataaatgaaaacggtctgcaccgctgcgggcgtgacgctcccggacgcgagtgggtgtggaattgctttcctcgggccaccgtgggggcacctctggcctcccgtgacccccaggccgagggtccccgggcacccaggtcggtcaagtctcggccctctcaggcccgcgtctctgcctggaggagactgtgtagggtccggcgtggggatcagccgggatgggctgcgcgtctccagcctctgcacacacattggcgggtggggtgcagggagggagaggcaggggagagagaatggcatctcgcgtggagggctgtcgtttgaactctcccagcgcgagagaccctgccccgcccccttcctggagcgttgactcccttctcgtctcgaggcctgtggcgtctgggtccgttggggcagaaccatggaggaaaagccttcgaaagtgtcgctcaagtcttccgaccgccaaggctcggacgaggagagcgtgcatagcgacactcgggacctgtggaccacgaccacgctgtcccaggcacagctgaacatgccgctgtccgaggtctgcgagggcttcgacgaggagggccgcaacattagcaagacccgcgggtggcacagcccggggcggggctcgttggacgaggggtacaaggccagccacaagccggaggaactggacgagcacgcgctggtggagctggagttgcaccgcggcagctccatggaaatcaatctgggggagaaggacactgcatcccagatcgaggccgaaaagtcttcctcaatgtcatcactcaatattgcgaagcacatgccccatcgagcctactgggcagagcagcagagcaggctgccactgcccctgatggaactcatggagaatgaagctctggaaatcctcaccaaagccctccggagctaccagttagggatcggcagggaccacttcctgactaaggagctgcagcgatacatcgaagggctcaagaagcgccggagcaagaggctgtacgtgaattaaaaacgccaccttgggctcgagcagcgacccgaaccagccccgtgccagcccggtccccagacccaagcctgaccccatccgagtggaatttgagtcctaaagaaataaaagagtcgatgcatggtc

SEQ ID NO: 52970 - DNA, 3450 bp, Homo sapiens
catggaagtgagaaccaaaagctggggcagggagcaccctggagggatagccggggagcaggtagagggccaaaacctggagtgggggcaggaggtgctccagcagcaactcccccagaggtgggtcccaacctccacgtcggccaattccaggtggccccaccgggtttcccccacccctttgtcccgcggagcccctcccttcatgagtgctgagcccaagggccaggctgtccccaggggcggagagttgcgggcccttcccgatccggtaatgggcctgggagatgccagattagcgtggtgcctgtccggagagacgggccagctgatgcccaggtcggggccctgccgctggccacactgggctccggtccaaggctagaaggctggcccctgctgcaacccctctccggctcctctgccacccacctcccggggctggccggctgtggggagccaggcggccgcagtgacgacagctccccaggagccccccgcccggcccctccaggcgggcagtggagctggcccggcgcctgggcgcgccatgcgcagcaccacgctcctggccctgctggcgctggtcttgctttacttggtgtctggtgccctggtgttccgggccctggagcagccccacgagcagcaggcccagagggagctgggggaggtccgagagaagttcctgagggcccatccgtgtgtgagcgaccaggagctgggcctcctcatcaaggaggtggctgatgccctgggagggggtgcggacccagaaaccaactcgaccagcaacagcagccactcagcctgggacctgggcagcgccttctttttctcagggaccatcatcaccaccatcggtgggggaggggattggcatgtggggggcggcaaggagcttcctcatgggggaaggtgcagggagacggaggggtcccaggtggcccctagacttcctgcatcgcccctctgcccaggctatggcaatgtggccctgcgcacagatgccgggcgcctcttctgcatcttttatgcgctggtggggattccgctgtttgggatcctactggcaggggtcggggaccggctgggctcctccctgcgccatggcatcggtcacattgaagccatcttcttggtgagctgctccatgccctgcctgcccttgtgctgggctccggctacccttccccatgtccctggcacatgagcgcgcccccaaagaccataagcctctcccacaggctccctgggggcgggagtggggagtatgggagtggggattgttggtgtctcctgggtcgtgcctactgccccatcccgcagaagtggcacgtgccaccggagctagtaagagtgctgtcggcgatgcttttcctgctgatcggctgcctgctctttgtcctcacgcccacgttcgtgttctgctatatggaggactggagcaagctggaggccatctactttgtcatagtgacgcttaccaccgtgggctttggcgactatgtggccggcgcggaccccaggcaggactccccggcctatcagccgctggtgtggttctggatcctgctcggcctggcttacttcgcctcagtgctcaccaccatcgggaactggctgcgagtagtgtcccgccgcactcgggcagagatgggcggcctcacggctcaggctgccagctggactggcacagtgacagcgcgcgtgacccagcgagccgggcccgccgccccgccgccggagaaggagcagccactgctgcctccaccgccctgtccagcgcagccgctgggcaggccccgatccccttcgccccccgagaaggctcagccgccttccccgcccacggcctcggccctggattatcccagcgagaacctggccttcatcgacgagtcctcggatacgcagagcgagcgcggctgcccgctgccccgcgcgccgagaggtcgccgccgcccaaatccccccaggaagcccgtgcggccccgcggccccgggcgtccccgagacaaaggcgtgccggtgtaggggcaggatccctggccgggcctctcaagggcttcgtttctgctctccccggcatgcctggcttgtttgaccaaagagccctctttccacgagactgaagtctggggaggaggctacagttgcctctccgcctcctccctggccccggcccttccctcacttccatccatctctagacccccccaaggctttctgtgtcgctgccccgggcgggtgtatccctcacagcacctcacgactgtgcctcaaagcctgcatcaataaatgaaaacggtctgcaccgctgcgggcgtgacgctcccggacgcgagtgggtgtggaattgctttcctcgggccaccgtgggggcacctctggcctcccgtgacccccaggccgagggtccccgggcacccaggtcggtcaagtctcggccctctcaggcccgcgtctctgcctggaggagactgtgtagggtccggcgtggggatcagccgggatgggctgcgcgtctccagcctctgcacacacattggcgggtggggtgcagggagggagaggcaggggagagagaatggcatctcgcgtggagggctgtcgtttgaactctcccagcgcgagagaccctgccccgcccccttcctggagcgttgactcccttctcgtctcgaggcctgtggcgtctgggtccgttggggcagaaccatggaggaaaagccttcgaaagtgtcgctcaagtcttccgaccgccaaggctcggacgaggagagcgtgcatagcgacactcgggacctgtggaccacgaccacgctgtcccaggcacagctgaacatgccgctgtccgaggtctgcgagggcttcgacgaggagggccgcaacattagcaagacccgcgggtggcacagcccggggcggggctcgttggacgaggggtacaaggccagccacaagccggaggaactggacgagcacgcgctggtggagctggagttgcaccgcggcagctccatggaaatcaatctgggggagaaggacactgcatcccagatcgaggccgaaaagtcttcctcaatgtcatcactcaatattgcgaagcacatgccccatcgagcctactgggcagagcagcagagcaggctgccactgcccctgatggaactcatggagaatgaagctctggaaatcctcaccaaagccctccggagctaccagttagggatcggcagggaccacttcctgactaaggagctgcagcgatacatcgaagggctcaagaagcgccggagcaagaggctgtacgtgaattaaaaacgccaccttgggctcgagcagcgacccgaaccagccccgtgccagcccggtccccagacccaagcctgaccccatccgagtggaatttgagtcctaaagaaataaaagagtcgatgcatggtc

SEQ ID NO: 52971 - DNA, 919 bp, Homo sapiens
taggccccttaccctgtccgctccaacccacccttggtccgactcgggcccctggcgctatttcttactcagccttggctgcccgcagcccccacccaaccccacgttctacgggatccccaacccggcccggctcagttccccagcccgctcttccttcccgctccagccatccgcgacccttggctccctccttgtatgtggcccacaggtgtcgctcaagtcttccgaccgccaaggctcggacgaggagagcgtgcatagcgacactcgggacctgtggaccacgaccacgctgtcccaggcacagctgaacatgccgctgtccgaggtctgcgagggcttcgacgaggagggccgcaacattagcaagacccgcgggtggcacagcccggggcggggctcgttggacgaggggtacaaggccagccacaagccggaggaactggacgagcacgcgctggtggagctggagttgcaccgcggcagctccatggaaatcaatctgggggagaaggacactgcatcccagatcgaggccgaaaagtcttcctcaatgtcatcactcaatattgcgaagcacatgccccatcgagcctactgggcagagcagcagagcaggctgccactgcccctgatggaactcatggagaatgaagctctggaaatcctcaccaaagccctccggagctaccagttagggatcggcagggaccacttcctgactaaggagctgcagcgatacatcgaagggctcaagaagcgccggagcaagaggctgtacgtgaattaaaaacgccaccttgggctcgagcagcgacccgaaccagccccgtgccagcccggtccccagacccaagcctgaccccatccgagtggaatttgagtcctaaagaaataaaagagtcgatgcatggtc

SEQ ID NO: 52972 - DNA, 2875 bp, Homo sapiens
caggcttaggctctctttcggcctcccactcgccttcctttcccttctcggtgccctcctctctttcctcacccggtagtcccagacaggggctgagggccgggcagcggaggtaaggggaaggctggagataggagggggactgggtgtgtccagccagagggatgtctgtggacagtgcagctgggggctttatggatctttgggtgtgtaggggatagaggaggagggtgtgggtgtcaggccagctcagtgaccccagcatccctggttttgcccgcagtgacgacagctccccaggagccccccgcccggcccctccaggcgggcagtggagctggcccggcgcctgggcgcgccatgcgcagcaccacgctcctggccctgctggcgctggtcttgctttacttggtgtctggtgccctggtgttccgggccctggagcagccccacgagcagcaggcccagagggagctgggggaggtccgagagaagttcctgagggcccatccgtgtgtgagcgaccaggagctgggcctcctcatcaaggaggtggctgatgccctgggagggggtgcggacccagaaaccaactcgaccagcaacagcagccactcagcctgggacctgggcagcgccttctttttctcagggaccatcatcaccaccatcggctatggcaatgtggccctgcgcacagatgccgggcgcctcttctgcatcttttatgcgctggtggggattccgctgtttgggatcctactggcaggggtcggggaccggctgggctcctccctgcgccatggcatcggtcacattgaagccatcttcttgaagtggcacgtgccaccggagctagtaagagtgctgtcggcgatgcttttcctgctgatcggctgcctgctctttgtcctcacgcccacgttcgtgttctgctatatggaggactggagcaagctggaggccatctactttgtcatagtgacgcttaccaccgtgggctttggcgactatgtggccggcgcggaccccaggcaggactccccggcctatcagccgctggtgtggttctggatcctgctcggcctggcttacttcgcctcagtgctcaccaccatcgggaactggctgcgagtagtgtcccgccgcactcgggcagagatgggcggcctcacggctcaggctgccagctggactggcacagtgacagcgcgcgtgacccagcgagccgggcccgccgccccgccgccggagaaggagcagccactgctgcctccaccgccctgtccagcgcagccgctgggcaggccccgatccccttcgccccccgagaaggctcagccgccttccccgcccacggcctcggccctggattatcccagcgagaacctggccttcatcgacgagtcctcggatacgcagagcgagcgcggctgcccgctgccccgcgcgccgagaggtcgccgccgcccaaatccccccaggaagcccgtgcggccccgcggccccgggcgtccccgagacaaaggcgtgccggtgtaggggcaggatccctggccgggcctctcaagggcttcgtttctgctctccccggcatgcctggcttgtttgaccaaagagccctctttccacgagactgaagtctggggaggaggctacagttgcctctccgcctcctccctggccccggcccttccctcacttccatccatctctagacccccccaaggctttctgtgtcgctgccccgggcgggtgtatccctcacagcacctcacgactgtgcctcaaagcctgcatcaataaatgaaaacggtctgcaccgctgcgggcgtgacgctcccggacgcgagtgggtgtggaattgctttcctcgggccaccgtgggggcacctctggcctcccgtgacccccaggccgagggtccccgggcacccaggtcggtcaagtctcggccctctcaggcccgcgtctctgcctggaggagactgtgtagggtccggcgtggggatcagccgggatgggctgcgcgtctccagcctctgcacacacattggcgggtggggtgcagggagggagaggcaggggagagagaatggcatctcgcgtggagggctgtcgtttgaactctcccagcgcgagagaccctgccccgcccccttcctggagcgttgactcccttctcgtctcgaggcctgtggcgtctgggtccgttggggcagaaccatggaggaaaagccttcgaaagtgtcgctcaagtcttccgaccgccaaggctcggacgaggagagcgtgcatagcgacactcgggacctgtggaccacgaccacgctgtcccaggcacagctgaacatgccgctgtccgaggtctgcgagggcttcgacgaggagggccgcaacattagcaagacccgcgggtggcacagcccggggcggggctcgttggacgaggggtacaaggccagccacaagccggaggaactggacgagcacgcgctggtggagctggagttgcaccgcggcagctccatggaaatcaatctgggggagaaggacactgcatcccagatcgaggccgctgccactgcccctgatggaactcatggagaatgaagctctggaaatcctcaccaaagccctccggagctaccagttagggatcggcagggaccacttcctgactaaggagctgcagcgatacatcgaagggctcaagaagcgccggagcaagaggctgtacgtgaattaaaaacgccaccttgggctcgagcagcgacccgaaccagccccgtgccagcccggtccccagacccaagcctgaccccatccgagtggaatttgagtcctaaagaaataaaagagtcgatgcatggtc

SEQ ID NO: 52973 - DNA, 566 bp, Homo sapiens
cacagggaggaggtgggggcatttcagctgtgggcagagatgaagtacctggacgcctaagcctcttgctgcttctccagctgccactgcccctgatggaactcatggagaatgaagctctggaaatcctcaccaaagccctccggagtaagctccccgccaacccccaagaactcccacgacagattctggtggattttgcagggctggggcccaggggggtggggtttcagggtgccttatgtcttgtcagatgcccttggcactcacaagtattccaagggccccataaaagttaaaagctgagggactgggcacaggaagacccagtgggggacatgtggtgatgggcagaggcctgggctccaggctgagtgcagcccctctccagctgagggaggcttttctgtggctgtttctccacctgcacagtgggatgaccgccttggtgtggcctcgactgcctctggttggggagttgtgaggagcctttggacagtggattatgtgggtgaacttttgctgctggggtaggaaagcccagcggtgataaagggccagctgat

SEQ ID NO: 52974 - DNA, 426 bp, Homo sapiens
catctctaatacttcatatttctcaaacagtagttctcaaacattgtatatcttggttcctgttatactgtgtctttacttctgattcttgtgcttggcacacagcactcagtacatgctgccgaatatttaaatgaatagaaagtgctttccaaaaacatgatggaaatgttcaaatttggcaagaagtggcagaggagttcaagcagcagatggaggttggtccggacgactggagagcccttctggcattcacaataaaaggagtctctggctcttgcaataagcagtgaagagttttttaaagaaagtaaagaccagacagaattgaaggaggatattgggagacccagcttttactcccagttttgtgacttattcgtaacttggaataagttacttccctctcctggtctcaacttcctt

SEQ ID NO: 52975 - DNA, 872 bp, Homo sapiens
ttcaagcaattctcctgcctcagcctcctgagtagctgggattgcaggcacacaccaccatgcccagctaattttttgtaattttagtagaagcagggtttcaccatgttggtcaggctggtctcgaactgctgacctcgtgatctgcccgcctcggcctcccaaagtgctgggattgcaggtgtaagccactgtgcctggcccagtaggcactctttaagagcaggtgtcacacagtagaaactctatgtagaccatatgtagaccatgagtcacagagtgggcacactatgaagagcaggtggcagcagtaggcactctttatgtagagcaggcagcagtgagtaggcactctttatcaggagcagatgatactcagtaaacactctttatatagagcaggtggcatctgtaggcactctttatctagagcaagtggcattcaatgggctctctctcttttttatttttttgtgagacagagtctcactctgttgcccaggctggagtgcagtggtatgaactcagctcactgcaaactctgcctcccgggttcatgagattctcctgcctcagcctcccgagtagctgggatcataggtgcccgccaccacgcccggctaatttttgtatttttagtagagatggggtttcaccatgttggccaggctggtcttgaactcccgacctcagatgatctgcctgccttggcctcccaaagtgcttggattacaggcatgagctactgtgcctggccagtaggcactctttatgtattgcaggtggtactgagtaggcactttttatgtagcgcaggcaagagtaggaactcttcatgtagagcaagcagcactcagtaggcaccctttatg

SEQ ID NO: 52976 - DNA, 770 bp, Homo sapiens
ttttttttttcagctctagaaataaagaagacagggcaggaaggactggctctcactctcggcttctttgggagattctgccattgtagacagaatcagtagcagcttctgtcatgaatttaaaactcaggagagaggatttggtggtaatctgatggaagtggaaaacaatcacgactctgagggagtgtgggtgaaacaagttgctttgtttaggttgtgttggagactgtaggtagtaatagacaatgataggacatctttttgtctgatgcctgtaagtgtacctggagactttgaagccatacttgttagttcattcctgcattactataaagaaatacctgagactgagtaatttacaaagaaaagaggtttgattggctcacggtcctgcaggctgtacacaaagcatggtgttggcatctgcttagcttctggggaggcctcaggaagtttccaatcatagcggaagacagagagcaggcatcacatggtgagggaaggggtgaggtgccaggctccttaaacaaccagatctcatgggaactaccagggcaagaactgactcattaccatggggatggcaccaacccattcatgaggggtctgtgcccatgacccaatatctcccagtaagccccatctccagcactggaggtcacatttcagtatgagatttggagaggacacatatccaaaccgtatcaccatgagttaaaccaatacatcaaatttttagggacagttggaagatcttcagagtcaag

SEQ ID NO: 52977 - DNA, 104 bp, Homo sapiens
atgactatgccctcccttgaagatggtggcttgcctctctttctgtaagcacatgtcatgtcataacaatattaaacaattaaaagtaatgtccccatcttctt

SEQ ID NO: 52978 - DNA, 292 bp, Homo sapiens
caagcctcttgtcttttctacttttggctcttgctcctagtgccatgtcccagtttaaaaggccagagtcagaggaagatgcacctctttagtgagtgctgctaaatcatcccactcataccagcatgatcaagtgggagaaaatggtcttgtatttcaaaaggattggagaagctagttatttcataagaatatagaaggtgaagttggaattagaaataatcctttacaactgccaatttaaatgaaaatatttaatgcctgtgaggttaggtcagtatcccagaatacc

SEQ ID NO: 52979 - DNA, 759 bp, Homo sapiens
gggctgggtgcggtggctcacgcctgtaattccaacactttgggagtctgaggcaggcggatcacttgaggccaggagttcgagaccaggctggccaccacggtgagaccttatgtctactaaaaatacaaaaaataggccaggtgtggtgttgtaggcctgcagtcctagctactagggaggctgaggcacacccaggaggtggacgttgcagtgagctgagatcacaccactgcactccagcctgggcaaaagagtgtgacttggtctcaaagaaaaagaagtttgtggactgcttaagtttgtgattgtcatagagtagtatttattaaatcatgaagtcagaatgtgaatatatctcctgtaatttttttttctaataataggtttgcttattctagcccattggtgccatagattgttagtctagctctattattctatgagttgtttggtgaactctaaatatttgtgcccacagtatttctggctctggtttcccaacagccagattacaccaggtctggtatgtttcaagtactgatgtttatgcacatacgcaccccgctctctgccagcgcactggaaccagtcgcctcacttctgatatgctccctctgtacaggttcacagcagtcttagaaagctcgcaggcagcccatgttctagatcaactttgataattatttatgtatttaatttgtatttcagcaaatgctctgctatttttaaaagcttactgatagcaactgactttat

SEQ ID NO: 52980 - DNA, 274 bp, Homo sapiens
gcacagagaaatgaaacaacccttgtaaggtcactaagtcaataagtagtgaaactagatgtggcagaagatgctaagtaagtgtgtattactcatcaccccatctctctttcttagtaacagaaattcttaataagaattattcaggctgggcatagtggctcactcttgtaatctcagcactttgggaggccgaggcaggtggatcacctgaggttgggagttcgagaccagcctgaccaacatggagaaaccccgtttctactaaaaatac

SEQ ID NO: 52981 - DNA, 376 bp, Homo sapiens
tttttttttttttttttggtttttgaagatatagtagttggagaggctaataaggggccttctgcactaattccactttattttttaaattggggggaaaaagtattgagaaacagattatatgaacggattagattgaggaagtgacggaaaggtagagaggaagggataaatgtataacctttgtaatgtggtatggccccacgagttactaaacatgactgaattgatgaaagattcataacatatttgtaaagcgaaattctcaataataaagcctcctttccaacttgattgctcaatatagataggattttattcttaaaggaaaaatcctcattttgcaggcagaataagccgggatacctacaattag

SEQ ID NO: 52982 - DNA, 361 bp, Homo sapiens
tcttgatgctgaaatctatccaaacatcaccagtgacatttctttgaaagtagtgcttttgtctttcagacttgcactcacgagtccttgaccaaattcttgctttctggcacaatctgaagcccaaaggctctaagaatcttactgtatcccagatatggaacttgttacatctccttctagttgtcaaaggtctttggaagccaggatctgattcatagatgagcttctgttcagaaatggcatttccatttatacttttagaagatatataaaatttatttctatgaaaaaggttattacttgacaataatatcctcagctcaaatataatgctatactgattattattcagcttcct

SEQ ID NO: 52983 - DNA, 302 bp, Homo sapiens
ccaaaaaccccagagcatccaggaagtagccaacaataccaagtgctaaaatcaccagagtccccaagtatttgccaatgagtgtctccacaccaaatgcctaaaaccctggagtatccacggtccaaccaatgtcaaaaacctgaagcattcagagtcagccagtagtgaaccccaaatgcctggctggggccacggaacaacatgactggtgctgcagagtcaacatgatggggaaacacccacaaacaagtgtcctgccttaaataattgcccaaatacagttagcagggagctaaagc

SEQ ID NO: 52984 - DNA, 219 bp, Homo sapiens
ttattttaccagaaaaaaacattgtatttgtatgaatataaaaagtacaatgagaaaaacatttactattcttacaagggctgaaaatctcatgtatttctgaagcaatctcatttgtcaaaaagtgtgacaggaaatagcccttaaaaaatggaaaacatctagtcagtatcatacaattcccatttctaaaactgcagtatgacaaagcaaaaaaaa

SEQ ID NO: 52985 - DNA, 736 bp, Homo sapiens
ggctctcaccctcctctcctgcagctccagctctgtgctctgcctctgaggagaccatggcccggcctctgtgtaccctgctactcctgatggctaccctggctggggctctggcctcgagctccaaggaggagaataggataatcccgggtggcatctataacgcagacctcaatgatgagtgggtacagcgtgcccttcacttcgccatcagcgagtataacaaggccaccaaagatgactactacagacgtccgctgcgggtactaagagccaggcaacagaccgttgggggggtgaattacttcttcgacgtagaggtgggccgaaccatatgtaccaagtcccagcccaacttggacacctgtgccttccatgaacagccagaactgcagaagaaacagttgtgctctttcgagatctacgaagttccctgggagaacagaaggtccctggtgaaatccaggtgtcaagaatcctagggatctgtgccaggccattcgcaccagccaccacccactcccaccccctgtagtgctcccacccctggactggtggcccccaccctgcgggaggcctccccatgtgcctgcgccaagagacagacagagaaggctgcaggagtcctttgttgctcagcagggcgctctgccctccctccttccttcttgcttctaatagccctggtacatggtacacacacccccacctcctgcaattaaacagtagcatcgcc

SEQ ID NO: 52986 - DNA, 824 bp, Homo sapiens
ggctctcaccctcctctcctgcagctccagctctgtgctctgcctctgaggagaccatggcccggcctctgtgtaccctgctactcctgatggctaccctggctggggctctggcctcgagctccaaggaggagaataggataatcccgggtggcatctataacgcagacctcaatgatgagtgggtacagcgtgcccttcacttcgccatcagcgagtataacaaggccaccaaagatgactactacagacgtccgctgcgggtactaagagccaggcaacagaccgttgggggggtgaattacttcttcgacgtagaggtgggccgaaccatatgtaccaagtcccagcccaacttggacacctgtgccttccatgaacagccagaactgcagaagaaacagttgtgctctttcgagatctacgaagttccctgggagaacagaaggtccctggtgaaatccaggtgtcaagaatcctagggatctgtgccaggccattcgcaccagccaccacccactcccaccccctgtagtgctcccacccctggactggtggcccccaccctgcgggaggcctccccatgtgcctgcgccaagagacagacagagaaggctgcaggagtcctttgttgctcagcagggcgctctgccctccctccttccttcttgcttctaatagccctggtacatggtacacacacccccacctcctgcaattaaacagtagcatcgccggggaaaagaattaaacttaaaatataacgtcttgagagggctcactggtatatttgacacaatgcactggaaataaaaaaaaactgg

SEQ ID NO: 52987 - DNA, 555 bp, Homo sapiens
ggctctcaccctcctctcctgcagctccagctctgtgctctgcctctgaggagaccatggcccggcctctgtgtaccctgctactcctgatggctaccctggctggggctctggcctcgagctccaaggaggagaataggataatcccgggtggcatctataacgcagacctcaatgatgagtgggtacagcgtgcccttcacttcgccatcagcgagtataacaaggccaccaaagatgactactacagacgtccgctgcgggtactaagagccaggcaacagaccgttgggggggtgaattacttcttcgacgtagaggtgggccgaaccatatgtaccaagtcccagcccaacttggacacctgtgccttccatgaacagccagaactgcagaagaaacagttgtgctctttcgagatctacgaagttccctgggagaacagaaggtccctggtgaaatccaggtgtcaagaatcctagggatctgtgccaggccattcgcaccagccaccacccactcccaccccgtcggtgagcggtaccgagctgattt

SEQ ID NO: 52988 - DNA, 157 bp, Homo sapiens
tctgccgtgttacctgcagtatgactcagcgtgttgaaaattatagccagctacaagcacaccacttccatttttgatgacttctcacactatgagaaacgccaagaggaagaagaaagtgttaaaaaggtaacccacttcttcttattaagatttt

SEQ ID NO: 52989 - DNA, 3756 bp, Homo sapiens
  misc_feature (1)..(5): n is a, c, g, or t
  misc_feature (7)..(8): n is a, c, g, or t
  misc_feature (10)..(10): n is a, c, g, or t
  misc_feature (3746)..(3747): n is a, c, g, or t
nnnnntnntngcgattttgaagttgtcgaaagactttaatgtgtttgaaaatacctaacaacaaagcctggcccacagctggtatttcaataatgttaatttccttgcttccctcttgaggtccttaagattcataggttctccggactccttgaaagttttgtgtagatgcatgaggtgtatttttcttggaaataaagtccacaatttaacagattatcttggggccagcgatttccccgaaaataaattgtagattctccttccggcaatgctaaggggtgaatctcttttgcgggagactggattctttcggtgtgtgttttgctctctgggtactctttctgtagtcggctaacagaggatgaccaagcccctcgcgggggcgggggcgggtcactcccggacagggcccccatgaagtttccctggggactgtgtgactccctaggggtcgggttacctcccagatgggggtggggtatcacttgcagctggaaggcaggttcattttaaggtctcgcgggcttcggaggcccctccctcactgagaaaccggcttttgtcgttcttctgaagccagagctagtctttccaggtgttagtcgaaacctcgtggtgcgaccctggtcgtcccaaaccccctaggccttaatcctggggcggtgggggcggggaggccgtgagcacagcttccgctcctccaatccgccagagggcgcagcggccggcctctcccttcccggggttcttcgcgccgggccccttccgcgtgggtgagtgaatgtgagagtcagcgctcgcgccgcgcgcgccgcccgcctccgctgttcggcgctctgctttaggcggtggggggcgggcgcgcgcgtaaaagcatagagacgggcattgagctcttgggctagagcgtcgccgagtcggagccggagcctgagccgcgcgctgtgtctccgctgcgtccgccgaggcccccgagtgtcagggacaaaagcctccgcctgctcccgcagccggggctcatctgccgccgccgccgcgctgaggagagttcgccgccgtcgccgcccgtgaggatctgagagccatgtcggccagcagcctcttggagcagagaccaaaaggtcaaggaaacaaagtacaaaatggatctgtacatcaaaaggatggattaaacgatgatgattttgaaccttacttgagtccacaggcaaggcccaataatgcatatactgccatgtcagattcctacttacccagttactacagtccctccattggcttctcctattctttgggtgaagctgcttggtctacggggggtgacacagccatgccctacttaacttcttatggacagctgagcaacggagagccccacttcctaccagatgcaatgtttgggcaaccaggagccctaggtagcactccatttcttggtcagcatggttttaatttctttcccagtgggattgacttctcagcatggggaaataacagttctcagggacagtctactcagagctctggatatagtagcaattatgcttatgcacctagctccttaggtggagccatgattgatggacagtcagcttttgccaatgagaccctcaataaggctcctggcatgaatactatagaccaagggatggcagcactgaagttgggtagcacagaagttgcaagcaatgttccaaaagttgtaggttctgctgttggtagcgggtccattactagtaacatcgtggcttccaatagtttgcctccagccaccattgctcctccaaaaccagcatcttgggctgatattgctagcaagcctgcaaaacagcaacctaaactgaagaccaagaatggcattgcagggtcaagtcttccgccacccccgataaagcataacatggatattggaacttgggataacaagggtcccgttgcaaaagccccctcacaggctttggttcagaatataggtcagccaacccaggggtctcctcagcctgtaggtcagcaggctaacaatagcccaccagtggctcaggcatcagtagggcaacagacacagccattgcctccacctccaccacagcctgcccagctttcagtccagcaacaggcagctcagccaacccgctgggtagcacctcggaaccgtggcagtgggttcggtcataatggggtggatggtaatggagtaggacagtctcaggctggttctggatctactccttcagaaccccacccagtgttggagaagcttcggtccattaataactataaccccaaagattttgactggaatctgaaacatggccgggttttcatcattaagagctactctgaggacgatattcaccgttccattaagtataatatttggtgcagcacagagcatggtaacaagagactggatgctgcttatcgttccatgaacgggaaaggccccgtttacttacttttcagtgtcaacggcagtggacacttctgtggcgtggcagaaatgaaatctgctgtggactacaacacatgtgcaggtgtgtggtcccaggacaaatggaagggtcgttttgatgtcaggtggatttttgtgaaggacgttcccaatagccaactgcgacacattcgcctagagaacaacgagaataaaccagtgaccaactctagggacactcaggaagtgcctctggaaaaggctaagcaggtgttgaaaattatagccagctacaagcacaccacttccatttttgatgacttctcacactatgagaaacgccaagaggaagaagaaagtgttaaaaaggaacgtcaaggtcgtgggaaataaaaggcagttctacacagactgcagcaacggttgcatctgcatatcctaagaggaaaaaatgaccttcaagagaattaggacttttttcttaatttcactgacttcagagacgattgcagacttgcagtttaagtattggaatttcacaaaagacataggacttaactggaaaatgaaaaaaaaaagaaaaagaaaaaactaaacaaaaaatccctctaggtagtttaggtgaaaaatgtcccttttattttggctttggttgtgatttcagagcataatgctatgtttttttgtctttttactatgtttttcggatttttaagtccgtaagtgcatacagttttctctaatttttaaaccctttcctcctcccattttgacatttgcacttggagaacacttgagttgtgaaggttttgggcatccaccccagaaagtgggaatttgattttatccttccgaactggaagaacatttttatgaagaatttttgtctaggagaatataacagtgttacccaaggttgtgtctttaagggtggttcattttctctgaccttttgttactcaaagtaaagtactaggagtcctaagaaatgttctgttcttgtacattatactgattaagtcaggattaatttgatttcaaagctgagaacagtggtaaaaactcgtttacagaaatgcattttggaagagaaaaatactgtaaaacgtgtcgtgaatgtttcttcagtttcttgttcagccaatgaggaaagggcattgcctttctttttaccattaatcacttctcaataaacgtgagatcctgttgagcatcagtgcctcttggcctaacgtggagctctgcggccgttccttaggagggaattataacctcctattatcgcttgctggcgtcggtgggaacggtagtnntcaaggggt

SEQ ID NO: 52990 - DNA, 3689 bp, Homo sapiens
  misc_feature (1)..(5): n is a, c, g, or t
  misc_feature (7)..(8): n is a, c, g, or t
  misc_feature (10)..(10): n is a, c, g, or t
nnnnntnntngcgattttgaagttgtcgaaagactttaatgtgtttgaaaatacctaacaacaaagcctggcccacagctggtatttcaataatgttaatttccttgcttccctcttgaggtccttaagattcataggttctccggactccttgaaagttttgtgtagatgcatgaggtgtatttttcttggaaataaagtccacaatttaacagattatcttggggccagcgatttccccgaaaataaattgtagattctccttccggcaatgctaaggggtgaatctcttttgcgggagactggattctttcggtgtgtgttttgctctctgggtactctttctgtagtcggctaacagaggatgaccaagcccctcgcgggggcgggggcgggtcactcccggacagggcccccatgaagtttccctggggactgtgtgactccctaggggtcgggttacctcccagatgggggtggggtatcacttgcagctggaaggcaggttcattttaaggtctcgcgggcttcggaggcccctccctcactgagaaaccggcttttgtcgttcttctgaagccagagctagtctttccaggtgttagtcgaaacctcgtggtgcgaccctggtcgtcccaaaccccctaggccttaatcctggggcggtgggggcggggaggccgtgagcacagcttccgctcctccaatccgccagagggcgcagcggccggcctctcccttcccggggttcttcgcgccgggccccttccgcgtgggtgagtgaatgtgagagtcagcgctcgcgccgcgcgcgccgcccgcctccgctgttcggcgctctgctttaggcggtggggggcgggcgcgcgcgtaaaagcatagagacgggcattgagctcttgggctagagcgtcgccgagtcggagccggagcctgagccgcgcgctgtgtctccgctgcgtccgccgaggcccccgagtgtcagggacaaaagcctccgcctgctcccgcagccggggctcatctgccgccgccgccgcgctgaggagagttcgccgccgtcgccgcccgtgaggatctgagagccatgtcggccagcagcctcttggagcagagaccaaaaggtcaaggaaacaaagtacaaaatggatctgtacatcaaaaggatggattaaacgatgatgattttgaaccttacttgagtccacaggcaaggcccaataatgcatatactgccatgtcagattcctacttacccagttactacagtccctccattggcttctcctattctttgggtgaagctgcttggtctacggggggtgacacagccatgccctacttaacttcttatggacagctgagcaacggagagccccacttcctaccagatgcaatgtttgggcaaccaggagccctaggtagcactccatttcttggtcagcatggttttaatttctttcccagtgggattgacttctcagcatggggaaataacagttctcagggacagtctactcagagctctggatatagtagcaattatgcttatgcacctagctccttaggtggagccatgattgatggacagtcagcttttgccaatgagaccctcaataaggctcctggcatgaatactatagaccaagggatggcagcactgaagttgggtagcacagaagttgcaagcaatgttccaaaagttgtaggttctgctgttggtagcgggtccattactagtaacatcgtggcttccaatagtttgcctccagccaccattgctcctccaaaaccagcatcttgggctgatattgctagcaagcctgcaaaacagcaacctaaactgaagaccaagaatggcattgcagggtcaagtcttccgccacccccgataaagcataacatggatattggaacttgggataacaagggtcccgttgcaaaagccccctcacaggctttggttcagaatataggtcagccaacccaggggtctcctcagcctgtaggtcagcaggctaacaatagcccaccagtggctcaggcatcagtagggcaacagacacagccattgcctccacctccaccacagcctgcccagctttcagtccagcaacaggcagctcagccaacccgctgggtagcacctcggaaccgtggcagtgggttcggtcataatggggtggatggtaatggagtaggacagtctcaggctggttctggatctactccttcagaaccccacccagtgttggagaagcttcggtccattaataactataaccccaaagattttgactggaatctgaaacatggccgggttttcatcattaagagctactctgaggacgatattcaccgttccattaagtataatatttggtgcagcacagagcatggtaacaagagactggatgctgcttatcgttccatgaacgggaaaggccccgtttacttacttttcagtgtcaacggcagtggacacttctgtggcgtggcagaaatgaaatctgctgtggactacaacacatgtgcaggtgtgtggtcccaggacaaatggaagggtcgttttgatgtcaggtggatttttgtgaaggacgttcccaatagccaactgcgacacattcgcctagagaacaacgagaataaaccagtgaccaactctagggacactcaggaagtgcctctggaaaaggctaagcaggtgttgaaaattatagccagctacaagcacaccacttccatttttgatgacttctcacactatgagaaacgccaagaggaagaagaaagtgttaaaaaggaacgtcaaggtcgtgggaaataaaaggcagttctacacagactgcagcaacggttgcatctgcatatcctaagaggaaaaaatgaccttcaagagaattaggacttttttcttaatttcactgacttcagagacgattgcagacttgcagtttaagtattggaatttcacaaaagacataggacttaactggaaaatgaaaaaaaaaagaaaaagaaaaaactaaacaaaaaatccctctaggtagtttaggtgaaaaatgtcccttttattttggctttggttgtgatttcagagcataatgctatgtttttttgtctttttactatgtttttcggatttttaagtccgtaagtgcatacagttttctctaatttttaaaccctttcctcctcccattttgacatttgcacttggagaacacttgagttgtgaaggttttgggcatccaccccagaaagtgggaatttgattttatccttccgaactggaagaacatttttatgaagaatttttgtctaggagaatataacagtgttacccaaggttgtgtctttaagggtggttcattttctctgaccttttgttactcaaagtaaagtactaggagtcctaagaaatgttctgttcttgtacattatactgattaagtcaggattaatttgatttcaaagctgagaacagtggtaaaaactcgtttacagaaatgcattttggaagagaaaaatactgtaaaacgtgtcgtgaatgtttcttcagtttcttgttcagccaatgaggaaagggcattgcctttctttttaccattaatcacttctcaataaacgtgagatcctgttgagcatcacatggcctcgttggcctcagcggtggagctcgtcagccg

SEQ ID NO: 52991 - DNA, 2705 bp, Homo sapiens
gggctggtacggcccgcggagtatgggatccgagtgtcagggacaaaagcctccgcctgctcccgcagccggggctcatctgccgccgccgccgcgctgaggagagttcgccgccgtcgccgcccgtgaggatctgagagccatgtcggccagcagcctcttggagcagagaccaaaaggtcaaggaaacaaagtacaaaatggatctgtacatcaaaaggatggattaaacgatgatgattttgaaccttacttgagtccacaggcaaggcccaataatgcatatactgccatgtcagattcctacttacccagttactacagtccctccattggcttctcctattctttgggtgaagctgcttggtctacggggggtgacacagccatgccctacttaacttcttatggacagctgagcaacggagagccccacttcctaccagatgcaatgtttgggcaaccaggagccctaggtagcactccatttcttggtcagcatggttttaatttctttcccagtgggattgacttctcagcatggggaaataacagttctcagggacagtctactcagagctctggatatagtagcaattatgcttatgcacctagctccttaggtggagccatgattgatggacagtcagcttttgccaatgagaccctcaataaggctcctggcatgaatactatagaccaagggatggcagcactgaagttgggtagcacagaagttgcaagcaatgttccaaaagttgtaggttctgctgttggtagcgggtccattactagtaacatcgtggcttccaatagtttgcctccagccaccattgctcctccaaaaccagcatcttgggctgatattgctagcaagcctgcaaaacagcaacctaaactgaagaccaagaatggcattgcagggtcaagtcttccgccacccccgataaagcataacatggatattggaacttgggataacaagggtcccgttgcaaaagccccctcacaggctttggttcagaatataggtcagccaacccaggggtctcctcagcctgtaggtcagcaggctaacaatagcccaccagtggctcaggcatcagtagggcaacagacacagccattgcctccacctccaccacagcctgcccagctttcagtccagcaacaggcagctcagccaacccgctgggtagcacctcggaaccgtggcagtgggttcggtcataatggggtggatggtaatggagtaggacagtctcaggctggttctggatctactccttcagaaccccacccagtgttggagaagcttcggtccattaataactataaccccaaagattttgactggaatctgaaacatggccgggttttcatcattaagagctactctgaggacgatattcaccgttccattaagtataatatttggtgcagcacagagcatggtaacaagagactggatgctgcttatcgttccatgaacgggaaaggccccgtttacttacttttcagtgtcaacggcagtggacacttctgtggcgtggcagaaatgaaatctgctgtggactacaacacatgtgcaggtgtgtggtcccaggacaaatggaagggtcgttttgatgtcaggtggatttttgtgaaggacgttcccaatagccaactgcgacacattcgcctagagaacaacgagaataaaccagtgaccaactctagggacactcaggaagtgcctctggaaaaggctaagcaggtgttgaaaattatagccagctacaagcacaccacttccatttttgatgacttctcacactatgagaaacgccaagaggaagaagaaagtgttaaaaaggaacgtcaaggtcgtgggaaataaaaggcagttctacacagactgcagcaacggttgcatctgcatatcctaagaggaaaaaatgaccttcaagagaattaggacttttttcttaatttcactgacttcagagacgattgcagacttgcagtttaagtattggaatttcacaaaagacataggacttaactggaaaatgaaaaaaaaaagaaaaagaaaaaactaaacaaaaaatccctctaggtagtttaggtgaaaaatgtcccttttattttggctttggttgtgatttcagagcataatgctatgtttttttgtctttttactatgtttttcggatttttaagtccgtaagtgcatacagttttctctaatttttaaaccctttcctcctcccattttgacatttgcacttggagaacacttgagttgtgaaggttttgggcatccaccccagaaagtgggaatttgattttatccttccgaactggaagaacatttttatgaagaatttttgtctaggagaatataacagtgttacccaaggttgtgtctttaagggtggttcattttctctgaccttttgttactcaaagtaaagtactaggagtcctaagaaatgttctgttcttgtacattatactgattaagtcaggattaatttgatttcaaagctgagaacagtggtaaaaactcgtttacagaaatgcattttggaagagaaaaatactgtaaaacgtgtcgtgaatgtttcttcagtttcttgttcagccaatgaggaaagggcattgcctttctttttaccattaatcacttctcaataaacgtgagatcctgttgagcatca

SEQ ID NO: 52992 - DNA, 2711 bp, Homo sapiens
gggcctggcgctttcccccgcctcccattttcagcctcttcctcactaccattcctgacgcctcccctcgggcctgctcctttattctcccttcgggccctgccttaatttgttcttccttttccatttctcctttggacaacttgctgctcggcgacgtttccttcccctgcagagaccaaaaggtcaaggaaacaaagtacaaaatggatctgtacatcaaaaggatggattaaacgatgatgattttgaaccttacttgagtccacaggcaaggcccaataatgcatatactgccatgtcagattcctacttacccagttactacagtccctccattggcttctcctattctttgggtgaagctgcttggtctacggggggtgacacagccatgccctacttaacttcttatggacagctgagcaacggagagccccacttcctaccagatgcaatgtttgggcaaccaggagccctaggtagcactccatttcttggtcagcatggttttaatttctttcccagtgggattgacttctcagcatggggaaataacagttctcagggacagtctactcagagctctggatatagtagcaattatgcttatgcacctagctccttaggtggagccatgattgatggacagtcagcttttgccaatgagaccctcaataaggctcctggcatgaatactatagaccaagggatggcagcactgaagttgggtagcacagaagttgcaagcaatgttccaaaagttgtaggttctgctgttggtagcgggtccattactagtaacatcgtggcttccaatagtttgcctccagccaccattgctcctccaaaaccagcatcttgggctgatattgctagcaagcctgcaaaacagcaacctaaactgaagaccaagaatggcattgcagggtcaagtcttccgccacccccgataaagcataacatggatattggaacttgggataacaagggtcccgttgcaaaagccccctcacaggctttggttcagaatataggtcagccaacccaggggtctcctcagcctgtaggtcagcaggctaacaatagcccaccagtggctcaggcatcagtagggcaacagacacagccattgcctccacctccaccacagcctgcccagctttcagtccagcaacaggcagctcagccaacccgctgggtagcacctcggaaccgtggcagtgggttcggtcataatggggtggatggtaatggagtaggacagtctcaggctggttctggatctactccttcagaaccccacccagtgttggagaagcttcggtccattaataactataaccccaaagattttgactggaatctgaaacatggccgggttttcatcattaagagctactctgaggacgatattcaccgttccattaagtataatatttggtgcagcacagagcatggtaacaagagactggatgctgcttatcgttccatgaacgggaaaggccccgtttacttacttttcagtgtcaacggcagtggacacttctgtggcgtggcagaaatgaaatctgctgtggactacaacacatgtgcaggtgtgtggtcccaggacaaatggaagggtcgttttgatgtcaggtggatttttgtgaaggacgttcccaatagccaactgcgacacattcgcctagagaacaacgagaataaaccagtgaccaactctagggacactcaggaagtgcctctggaaaaggctaagcaggtgttgaaaattatagccagctacaagcacaccacttccatttttgatgacttctcacactatgagaaacgccaagaggaagaagaaagtgttaaaaaggaacgtcaaggtcgtgggaaataaaaggcagttctacacagactgcagcaacggttgcatctgcatatcctaagaggaaaaaatgaccttcaagagaattaggacttttttcttaatttcactgacttcagagacgattgcagacttgcagtttaagtattggaatttcacaaaagacataggacttaactggaaaatgaaaaaaaaaagaaaaagaaaaaactaaacaaaaaatccctctaggtagtttaggtgaaaaatgtcccttttattttggctttggttgtgatttcagagcataatgctatgtttttttgtctttttactatgtttttcggatttttaagtccgtaagtgcatacagttttctctaatttttaaaccctttcctcctcccattttgacatttgcacttggagaacacttgagttgtgaaggttttgggcatccaccccagaaagtgggaatttgattttatccttccgaactggaagaacatttttatgaagaatttttgtctaggagaatataacagtgttacccaaggttgtgtctttaagggtggttcattttctctgaccttttgttactcaaagtaaagtactaggagtcctaagaaatgttctgttcttgtacattatactgattaagtcaggattaatttgatttcaaagctgagaacagtggtaaaaactcgtttacagaaatgcattttggaagagaaaaatactgtaaaacgtgtcgtgaatgtttcttcagtttcttgttcagccaatgaggaaagggcattgcctttctttttaccattaatcacttctcaataaacgtgagatcctgttgagcatca

SEQ ID NO: 52993 - DNA, 2496 bp, Homo sapiens
ccaacggctaggtacaggctgggtggtaatcggccgaggcttacttgagtccacaggcaaggcccaataatgcatatactgccatgtcagattcctacttacccagttactacagtccctccattggcttctcctattctttgggtgaagctgcttggtctacggggggtgacacagccatgccctacttaacttcttatggacagctgagcaacggagagccccacttcctaccagatgcaatgtttgggcaaccaggagccctaggtagcactccatttcttggtcagcatggttttaatttctttcccagtgggattgacttctcagcatggggaaataacagttctcagggacagtctactcagagctctggatatagtagcaattatgcttatgcacctagctccttaggtggagccatgattgatggacagtcagcttttgccaatgagaccctcaataaggctcctggcatgaatactatagaccaagggatggcagcactgaagttgggtagcacagaagttgcaagcaatgttccaaaagttgtaggttctgctgttggtagcgggtccattactagtaacatcgtggcttccaatagtttgcctccagccaccattgctcctccaaaaccagcatcttgggctgatattgctagcaagcctgcaaaacagcaacctaaactgaagaccaagaatggcattgcagggtcaagtcttccgccacccccgataaagcataacatggatattggaacttgggataacaagggtcccgttgcaaaagccccctcacaggctttggttcagaatataggtcagccaacccaggggtctcctcagcctgtaggtcagcaggctaacaatagcccaccagtggctcaggcatcagtagggcaacagacacagccattgcctccacctccaccacagcctgcccagctttcagtccagcaacaggcagctcagccaacccgctgggtagcacctcggaaccgtggcagtgggttcggtcataatggggtggatggtaatggagtaggacagtctcaggctggttctggatctactccttcagaaccccacccagtgttggagaagcttcggtccattaataactataaccccaaagattttgactggaatctgaaacatggccgggttttcatcattaagagctactctgaggacgatattcaccgttccattaagtataatatttggtgcagcacagagcatggtaacaagagactggatgctgcttatcgttccatgaacgggaaaggccccgtttacttacttttcagtgtcaacggcagtggacacttctgtggcgtggcagaaatgaaatctgctgtggactacaacacatgtgcaggtgtgtggtcccaggacaaatggaagggtcgttttgatgtcaggtggatttttgtgaaggacgttcccaatagccaactgcgacacattcgcctagagaacaacgagaataaaccagtgaccaactctagggacactcaggaagtgcctctggaaaaggctaagcaggtgttgaaaattatagccagctacaagcacaccacttccatttttgatgacttctcacactatgagaaacgccaagaggaagaagaaagtgttaaaaaggaacgtcaaggtcgtgggaaataaaaggcagttctacacagactgcagcaacggttgcatctgcatatcctaagaggaaaaaatgaccttcaagagaattaggacttttttcttaatttcactgacttcagagacgattgcagacttgcagtttaagtattggaatttcacaaaagacataggacttaactggaaaatgaaaaaaaaaagaaaaagaaaaaactaaacaaaaaatccctctaggtagtttaggtgaaaaatgtcccttttattttggctttggttgtgatttcagagcataatgctatgtttttttgtctttttactatgtttttcggatttttaagtccgtaagtgcatacagttttctctaatttttaaaccctttcctcctcccattttgacatttgcacttggagaacacttgagttgtgaaggttttgggcatccaccccagaaagtgggaatttgattttatccttccgaactggaagaacatttttatgaagaatttttgtctaggagaatataacagtgttacccaaggttgtgtctttaagggtggttcattttctctgaccttttgttactcaaagtaaagtactaggagtcctaagaaatgttctgttcttgtacattatactgattaagtcaggattaatttgatttcaaagctgagaacagtggtaaaaactcgtttacagaaatgcattttggaagagaaaaatactgtaaaacgtgtcgtgaatgtttcttcagtttcttgttcagccaatgaggaaagggcattgcctttctttttaccattaatcacttctcaataaacgtgagatcctgttgagcatca

SEQ ID NO: 52994 - DNA, 2641 bp, Homo sapiens
acctgaaggcgggaagatctcttgagcccagaagtttgaagctgcagtgagctatctacgatcatacctgtgaaaagccactgcgctccagccttggtgacagaacaagatctgcttgagcatgtgggagcctgccagttcaggtacagacattcaactgtgtcttggcataacctgtgatattaagtgcatttgatttttctttctcagaataatgcatatactgccatgtcagattcctacttacccagttactacagtccctccattggcttctcctattctttgggtgaagctgcttggtctacggggggtgacacagccatgccctacttaacttcttatggacagctgagcaacggagagccccacttcctaccagatgcaatgtttgggcaaccaggagccctaggtagcactccatttcttggtcagcatggttttaatttctttcccagtgggattgacttctcagcatggggaaataacagttctcagggacagtctactcagagctctggatatagtagcaattatgcttatgcacctagctccttaggtggagccatgattgatggacagtcagcttttgccaatgagaccctcaataaggctcctggcatgaatactatagaccaagggatggcagcactgaagttgggtagcacagaagttgcaagcaatgttccaaaagttgtaggttctgctgttggtagcgggtccattactagtaacatcgtggcttccaatagtttgcctccagccaccattgctcctccaaaaccagcatcttgggctgatattgctagcaagcctgcaaaacagcaacctaaactgaagaccaagaatggcattgcagggtcaagtcttccgccacccccgataaagcataacatggatattggaacttgggataacaagggtcccgttgcaaaagccccctcacaggctttggttcagaatataggtcagccaacccaggggtctcctcagcctgtaggtcagcaggctaacaatagcccaccagtggctcaggcatcagtagggcaacagacacagccattgcctccacctccaccacagcctgcccagctttcagtccagcaacaggcagctcagccaacccgctgggtagcacctcggaaccgtggcagtgggttcggtcataatggggtggatggtaatggagtaggacagtctcaggctggttctggatctactccttcagaaccccacccagtgttggagaagcttcggtccattaataactataaccccaaagattttgactggaatctgaaacatggccgggttttcatcattaagagctactctgaggacgatattcaccgttccattaagtataatatttggtgcagcacagagcatggtaacaagagactggatgctgcttatcgttccatgaacgggaaaggccccgtttacttacttttcagtgtcaacggcagtggacacttctgtggcgtggcagaaatgaaatctgctgtggactacaacacatgtgcaggtgtgtggtcccaggacaaatggaagggtcgttttgatgtcaggtggatttttgtgaaggacgttcccaatagccaactgcgacacattcgcctagagaacaacgagaataaaccagtgaccaactctagggacactcaggaagtgcctctggaaaaggctaagcaggtgttgaaaattatagccagctacaagcacaccacttccatttttgatgacttctcacactatgagaaacgccaagaggaagaagaaagtgttaaaaaggaacgtcaaggtcgtgggaaataaaaggcagttctacacagactgcagcaacggttgcatctgcatatcctaagaggaaaaaatgaccttcaagagaattaggacttttttcttaatttcactgacttcagagacgattgcagacttgcagtttaagtattggaatttcacaaaagacataggacttaactggaaaatgaaaaaaaaaagaaaaagaaaaaactaaacaaaaaatccctctaggtagtttaggtgaaaaatgtcccttttattttggctttggttgtgatttcagagcataatgctatgtttttttgtctttttactatgtttttcggatttttaagtccgtaagtgcatacagttttctctaatttttaaaccctttcctcctcccattttgacatttgcacttggagaacacttgagttgtgaaggttttgggcatccaccccagaaagtgggaatttgattttatccttccgaactggaagaacatttttatgaagaatttttgtctaggagaatataacagtgttacccaaggttgtgtctttaagggtggttcattttctctgaccttttgttactcaaagtaaagtactaggagtcctaagaaatgttctgttcttgtacattatactgattaagtcaggattaatttgatttcaaagctgagaacagtggtaaaaactcgtttacagaaatgcattttggaagagaaaaatactgtaaaacgtgtcgtgaatgtttcttcagtttcttgttcagccaatgaggaaagggcattgcctttctttttaccattaatcacttctcaataaacgtgagatcctgttgagcatca

SEQ ID NO: 52995 - DNA, 1667 bp, Homo sapiens
cctgcctcagcctcccgagtagctgggactacaggcgcccgccaccataccagtggctcaggcatcagtagggcaacagacacagccattgcctccacctccaccacagcctgcccagctttcagtccagcaacaggcagctcagccaacccgctgggtagcacctcggaaccgtggcagtgggttcggtcataatggggtggatggtaatggagtaggacagtctcaggctggttctggatctactccttcagaaccccacccagtgttggagaagcttcggtccattaataactataaccccaaagattttgactggaatctgaaacatggccgggttttcatcattaagagctactctgaggacgatattcaccgttccattaagtataatatttggtgcagcacagagcatggtaacaagagactggatgctgcttatcgttccatgaacgggaaaggccccgtttacttacttttcagtgtcaacggcagtggacacttctgtggcgtggcagaaatgaaatctgctgtggactacaacacatgtgcaggtgtgtggtcccaggacaaatggaagggtcgttttgatgtcaggtggatttttgtgaaggacgttcccaatagccaactgcgacacattcgcctagagaacaacgagaataaaccagtgaccaactctagggacactcaggaagtgcctctggaaaaggctaagcaggtgttgaaaattatagccagctacaagcacaccacttccatttttgatgacttctcacactatgagaaacgccaagaggaagaagaaagtgttaaaaaggaacgtcaaggtcgtgggaaataaaaggcagttctacacagactgcagcaacggttgcatctgcatatcctaagaggaaaaaatgaccttcaagagaattaggacttttttcttaatttcactgacttcagagacgattgcagacttgcagtttaagtattggaatttcacaaaagacataggacttaactggaaaatgaaaaaaaaaagaaaaagaaaaaactaaacaaaaaatccctctaggtagtttaggtgaaaaatgtcccttttattttggctttggttgtgatttcagagcataatgctatgtttttttgtctttttactatgtttttcggatttttaagtccgtaagtgcatacagttttctctaatttttaaaccctttcctcctcccattttgacatttgcacttggagaacacttgagttgtgaaggttttgggcatccaccccagaaagtgggaatttgattttatccttccgaactggaagaacatttttatgaagaatttttgtctaggagaatataacagtgttacccaaggttgtgtctttaagggtggttcattttctctgaccttttgttactcaaagtaaagtactaggagtcctaagaaatgttctgttcttgtacattatactgattaagtcaggattaatttgatttcaaagctgagaacagtggtaaaaactcgtttacagaaatgcattttggaagagaaaaatactgtaaaacgtgtcgtgaatgtttcttcagtttcttgttcagccaatgaggaaagggcattgcctttctttttaccattaatcacttctcaataaacgtgagatcctgttgagcatca

SEQ ID NO: 52996 - DNA, 2253 bp, Homo sapiens
  misc_feature (1)..(5): n is a, c, g, or t
  misc_feature (7)..(8): n is a, c, g, or t
  misc_feature (10)..(10): n is a, c, g, or t
nnnnntnntngcgattttgaagttgtcgaaagactttaatgtgtttgaaaatacctaacaacaaagcctggcccacagctggtatttcaataatgttaatttccttgcttccctcttgaggtccttaagattcataggttctccggactccttgaaagttttgtgtagatgcatgaggtgtatttttcttggaaataaagtccacaatttaacagattatcttggggccagcgatttccccgaaaataaattgtagattctccttccggcaatgctaaggggtgaatctcttttgcgggagactggattctttcggtgtgtgttttgctctctgggtactctttctgtagtcggctaacagaggatgaccaagcccctcgcgggggcgggggcgggtcactcccggacagggcccccatgaagtttccctggggactgtgtgactccctaggggtcgggttacctcccagatgggggtggggtatcacttgcagctggaaggcaggttcattttaaggtctcgcgggcttcggaggcccctccctcactgagaaaccggcttttgtcgttcttctgaagccagagctagtctttccaggtgttagtcgaaacctcgtggtgcgaccctggtcgtcccaaaccccctaggccttaatcctggggcggtgggggcggggaggccgtgagcacagcttccgctcctccaatccgccagagggcgcagcggccggcctctcccttcccggggttcttcgcgccgggccccttccgcgtgggtgagtgaatgtgagagtcagcgctcgcgccgcgcgcgccgcccgcctccgctgttcggcgctctgctttaggcggtggggggcgggcgcgcgcgtaaaagcatagagacgggcattgagctcttgggctagagcgtcgccgagtcggagccggagcctgagccgcgcgctgtgtctccgctgcgtccgccgaggcccccgagtgtcagggacaaaagcctccgcctgctcccgcagccggggctcatctgccgccgccgccgcgctgaggagagttcgccgccgtcgccgcccgtgaggatctgagagccatgtcggccagcagcctcttggagcagagaccaaaaggtcaaggaaacaaagtacaaaatggatctgtacatcaaaaggatggattaaacgatgatgattttgaaccttacttgagtccacaggcaaggcccaataatgcatatactgccatgtcagattcctacttacccagttactacagtccctccattggcttctcctattctttgggtgaagctgcttggtctacggggggtgacacagccatgccctacttaacttcttatggacagctgagcaacggagagccccacttcctaccagatgcaatgtttgggcaaccaggagccctaggtagcactccatttcttggtcagcatggttttaatttctttcccagtgggattgacttctcagcatggggaaataacagttctcagggacagtctactcagagctctggatatagtagcaattatgcttatgcacctagctccttaggtggagccatgattgatggacagtcagcttttgccaatgagaccctcaataaggctcctggcatgaatactatagaccaagggatggcagcactgaagttgggtagcacagaagttgcaagcaatgttccaaaagttgtaggttctgctgttggtagcgggtccattactagtaacatcgtggcttccaatagtttgcctccagccaccattgctcctccaaaaccagcatcttgggctgatattgctagcaagcctgcaaaacagcaacctaaactgaagaccaagaatggcattgcagggtcaagtcttccgccacccccgataaagcataacatggatattggaacttgggataacaagggtcccgttgcaaaagccccctcacaggctttggttcagaatataggtcagccaacccaggggtctcctcagcctgtaggtcagcaggctaacaatagcccaccagtggctcaggcatcagtagggcaacagacacagccattgcctccacctccaccacagcctgcccagctttcagtccagcaacaggcagctcagccaacccgctgggtagcacctcggaaccgtggcagtgggttcggtcataatggggtggctgacctatattctgacaaagcctgtgaggggctttgcacgggagaacggtacgagctgattatcgg

SEQ ID NO: 52997 - DNA, 2066 bp, Homo sapiens
  misc_feature (1)..(5): n is a, c, g, or t
  misc_feature (7)..(8): n is a, c, g, or t
  misc_feature (10)..(10): n is a, c, g, or t
nnnnntnntngcgattttgaagttgtcgaaagactttaatgtgtttgaaaatacctaacaacaaagcctggcccacagctggtatttcaataatgttaatttccttgcttccctcttgaggtccttaagattcataggttctccggactccttgaaagttttgtgtagatgcatgaggtgtatttttcttggaaataaagtccacaatttaacagattatcttggggccagcgatttccccgaaaataaattgtagattctccttccggcaatgctaaggggtgaatctcttttgcgggagactggattctttcggtgtgtgttttgctctctgggtactctttctgtagtcggctaacagaggatgaccaagcccctcgcgggggcgggggcgggtcactcccggacagggcccccatgaagtttccctggggactgtgtgactccctaggggtcgggttacctcccagatgggggtggggtatcacttgcagctggaaggcaggttcattttaaggtctcgcgggcttcggaggcccctccctcactgagaaaccggcttttgtcgttcttctgaagccagagctagtctttccaggtgttagtcgaaacctcgtggtgcgaccctggtcgtcccaaaccccctaggccttaatcctggggcggtgggggcggggaggccgtgagcacagcttccgctcctccaatccgccagagggcgcagcggccggcctctcccttcccggggttcttcgcgccgggccccttccgcgtgggtgagtgaatgtgagagtcagcgctcgcgccgcgcgcgccgcccgcctccgctgttcggcgctctgctttaggcggtggggggcgggcgcgcgcgtaaaagcatagagacgggcattgagctcttgggctagagcgtcgccgagtcggagccggagcctgagccgcgcgctgtgtctccgctgcgtccgccgaggcccccgagtgtcagggacaaaagcctccgcctgctcccgcagccggggctcatctgccgccgccgccgcgctgaggagagttcgccgccgtcgccgcccgtgaggatctgagagccatgtcggccagcagcctcttggagcagagaccaaaaggtcaaggaaacaaagtacaaaatggatctgtacatcaaaaggatggattaaacgatgatgattttgaaccttacttgagtccacaggcaaggcccgaacgtcaaggtcgtgggaaataaaaggcagttctacacagactgcagcaacggttgcatctgcatatcctaagaggaaaaaatgaccttcaagagaattaggacttttttcttaatttcactgacttcagagacgattgcagacttgcagtttaagtattggaatttcacaaaagacataggacttaactggaaaatgaaaaaaaaaagaaaaagaaaaaactaaacaaaaaatccctctaggtagtttaggtgaaaaatgtcccttttattttggctttggttgtgatttcagagcataatgctatgtttttttgtctttttactatgtttttcggatttttaagtccgtaagtgcatacagttttctctaatttttaaaccctttcctcctcccattttgacatttgcacttggagaacacttgagttgtgaaggttttgggcatccaccccagaaagtgggaatttgattttatccttccgaactggaagaacatttttatgaagaatttttgtctaggagaatataacagtgttacccaaggttgtgtctttaagggtggttcattttctctgaccttttgttactcaaagtaaagtactaggagtcctaagaaatgttctgttcttgtacattatactgattaagtcaggattaatttgatttcaaagctgagaacagtggtaaaaactcgtttacagaaatgcattttggaagagaaaaatactgtaaaacgtgtcgtgaatgtttcttcagtttcttgttcagccaatgaggaaagggcattgcctttctttttaccattaatcacttctcaataaacgtgagatcctgttgagcatca

SEQ ID NO: 52998 - DNA, 1150 bp, Homo sapiens
gggttacttccattaggcccatatttttggggggcctgacaactaagtattaatctaaacagtataataggaaagcatgtaatgaattttcaagtcaaaagtaattttgcattaaggtgtttaagtgtttaaaacaaagtaaaagccagtttttctttgtggggaatgttctacttagaataattaattttctaataattctaaataattaaatttctgttgagttattctgtgaagtttttaaattcataaagcatgttcagataatttttaaccatttcaatttttttcttacctctgtaggaacgtcaaggtcgtgggaaataaaaggcagttctacacagactgcagcaacggttgcatctgcatatcctaagaggaaaaaatgaccttcaagagaattaggacttttttcttaatttcactgacttcagagacgattgcagacttgcagtttaagtattggaatttcacaaaagacataggacttaactggaaaatgaaaaaaaaaagaaaaagaaaaaactaaacaaaaaatccctctaggtagtttaggtgaaaaatgtcccttttattttggctttggttgtgatttcagagcataatgctatgtttttttgtctttttactatgtttttcggatttttaagtccgtaagtgcatacagttttctctaatttttaaaccctttcctcctcccattttgacatttgcacttggagaacacttgagttgtgaaggttttgggcatccaccccagaaagtgggaatttgattttatccttccgaactggaagaacatttttatgaagaatttttgtctaggagaatataacagtgttacccaaggttgtgtctttaagggtggttcattttctctgaccttttgttactcaaagtaaagtactaggagtcctaagaaatgttctgttcttgtacattatactgattaagtcaggattaatttgatttcaaagctgagaacagtggtaaaaactcgtttacagaaatgcattttggaagagaaaaatactgtaaaacgtgtcgtgaatgtttcttcagtttcttgttcagccaatgaggaaagggcattgcctttctttttaccattaatcacttctcaataaacgtgagatcctgttgagcatca

SEQ ID NO: 52999 - DNA, 924 bp, Homo sapiens
cctctggcccttaagtgatccacctgcctcggcctcaaagtactgagattacagacatgagccaccacacccagcctgaacgtcaaggtcgtgggaaataaaaggcagttctacacagactgcagcaacggttgcatctgcatatcctaagaggaaaaaatgaccttcaagagaattaggacttttttcttaatttcactgacttcagagacgattgcagacttgcagtttaagtattggaatttcacaaaagacataggacttaactggaaaatgaaaaaaaaaagaaaaagaaaaaactaaacaaaaaatccctctaggtagtttaggtgaaaaatgtcccttttattttggctttggttgtgatttcagagcataatgctatgtttttttgtctttttactatgtttttcggatttttaagtccgtaagtgcatacagttttctctaatttttaaaccctttcctcctcccattttgacatttgcacttggagaacacttgagttgtgaaggttttgggcatccaccccagaaagtgggaatttgattttatccttccgaactggaagaacatttttatgaagaatttttgtctaggagaatataacagtgttacccaaggttgtgtctttaagggtggttcattttctctgaccttttgttactcaaagtaaagtactaggagtcctaagaaatgttctgttcttgtacattatactgattaagtcaggattaatttgatttcaaagctgagaacagtggtaaaaactcgtttacagaaatgcattttggaagagaaaaatactgtaaaacgtgtcgtgaatgtttcttcagtttcttgttcagccaatgaggaaagggcattgcctttctttttaccattaatcacttctcaataaacgtgagatcctgttgagcatca

SEQ ID NO: 53000 - DNA, 1365 bp, Homo sapiens
  misc_feature (1)..(5): n is a, c, g, or t
  misc_feature (7)..(8): n is a, c, g, or t
  misc_feature (10)..(10): n is a, c, g, or t
nnnnntnntngcgattttgaagttgtcgaaagactttaatgtgtttgaaaatacctaacaacaaagcctggcccacagctggtatttcaataatgttaatttccttgcttccctcttgaggtccttaagattcataggttctccggactccttgaaagttttgtgtagatgcatgaggtgtatttttcttggaaataaagtccacaatttaacagattatcttggggccagcgatttccccgaaaataaattgtagattctccttccggcaatgctaaggggtgaatctcttttgcgggagactggattctttcggtgtgtgttttgctctctgggtactctttctgtagtcggctaacagaggatgaccaagcccctcgcgggggcgggggcgggtcactcccggacagggcccccatgaagtttccctggggactgtgtgactccctaggggtcgggttacctcccagatgggggtggggtatcacttgcagctggaaggcaggttcattttaaggtctcgcgggcttcggaggcccctccctcactgagaaaccggcttttgtcgttcttctgaagccagagctagtctttccaggtgttagtcgaaacctcgtggtgcgaccctggtcgtcccaaaccccctaggccttaatcctggggcggtgggggcggggaggccgtgagcacagcttccgctcctccaatccgccagagggcgcagcggccggcctctcccttcccggggttcttcgcgccgggccccttccgcgtgggtgagtgaatgtgagagtcagcgctcgcgccgcgcgcgccgcccgcctccgctgttcggcgctctgctttaggcggtggggggcgggcgcgcgcgtaaaagcatagagacgggcattgagctcttgggctagagcgtcgccgagtcggagccggagcctgagccgcgcgctgtgtctccgctgcgtccgccgaggcccccgagtgtcagggacaaaagcctccgcctgctcccgcagccggggctcatctgccgccgccgccgcgctgaggagagttcgccgccgtcgccgcccgtgaggatctgagagccatgtcggccagcagcctcttggagcaggtacaggcccggcccgcatgcctcggccattgtgtgaggcgagaaggagcccgactaggcccgggcccgccgctcctgggcaggccgagccgagccgaggcgtcgtctcttgcgggccaggtttcgggcctctcaggccggccgcgcccggcgcctctccctcagcctgttcttcccgcttctcctcgggcctcggagcccacgggccgggccgcgccgcgttcccttctctcggcgggcctcgttttcct

SEQ ID NO: 53001 - DNA, 3650 bp, Homo sapiens
  misc_feature (1)..(5): n is a, c, g, or t
  misc_feature (7)..(8): n is a, c, g, or t
  misc_feature (10)..(10): n is a, c, g, or t
nnnnntnntngcgattttgaagttgtcgaaagactttaatgtgtttgaaaatacctaacaacaaagcctggcccacagctggtatttcaataatgttaatttccttgcttccctcttgaggtccttaagattcataggttctccggactccttgaaagttttgtgtagatgcatgaggtgtatttttcttggaaataaagtccacaatttaacagattatcttggggccagcgatttccccgaaaataaattgtagattctccttccggcaatgctaaggggtgaatctcttttgcgggagactggattctttcggtgtgtgttttgctctctgggtactctttctgtagtcggctaacagaggatgaccaagcccctcgcgggggcgggggcgggtcactcccggacagggcccccatgaagtttccctggggactgtgtgactccctaggggtcgggttacctcccagatgggggtggggtatcacttgcagctggaaggcaggttcattttaaggtctcgcgggcttcggaggcccctccctcactgagaaaccggcttttgtcgttcttctgaagccagagctagtctttccaggtgttagtcgaaacctcgtggtgcgaccctggtcgtcccaaaccccctaggccttaatcctggggcggtgggggcggggaggccgtgagcacagcttccgctcctccaatccgccagagggcgcagcggccggcctctcccttcccggggttcttcgcgccgggccccttccgcgtgggtgagtgaatgtgagagtcagcgctcgcgccgcgcgcgccgcccgcctccgctgttcggcgctctgctttaggcggtggggggcgggcgcgcgcgtaaaagcatagagacgggcattgagctcttgggctagagcgtcgccgagtcggagccggagcctgagccgcgcgctgtgtctccgctgcgtccgccgaggcccccgagtgtcagggacaaaagcctccgcctgctcccgcagccggggctcatctgccgccgccgccgcgctgaggagagttcgccgccgtcgccgcccgtgaggatctgagagccatgtcggccagcagcctcttggagcagagaccaaaaggtcaaggaaacaaagtacaaaatggatctgtacatcaaaaggatggattaaacgatgatgattttgaaccttacttgagtccacaggcaaggcccaataatgcatatactgccatgtcagattcctacttacccagttactacagtccctccattggcttctcctattctttgggtgaagctgcttggtctacggggggtgacacagccatgccctacttaacttcttatggacagctgagcaacggagagccccacttcctaccagatgcaatgtttgggcaaccaggagccctaggtagcactccatttcttggtcagcatggttttaatttctttcccagtgggattgacttctcagcatggggaaataacagttctcagggacagtctactcagagctctggatatagtagcaattatgcttatgcacctagctccttaggtggagccatgattgatggacagtcagcttttgccaatgagaccctcaataaggctcctggcatgaatactatagaccaagggatggcagcactgaagttgggtagcacagaagttgcaagcaatgttccaaaagttgtaggttctgctgttggtagcgggtccattactagtaacatcgtggcttccaatagtttgcctccagccaccattgctcctccaaaaccagcatcttgggctgatattgctagcaagcctgcaaaacagcaacctaaactgaagaccaagaatggcattgcagggtcaagtcttccgccacccccgataaagcataacatggatattggaacttgggataacaagggtcccgttgcaaaagccccctcacaggctttggttcagaatataggtcagccaacccaggggtctcctcagcctgtaggtcagcaggctaacaatagcccaccagtggctcaggcatcagtagggcaacagacacagccattgcctccacctccaccacagcctgcccagctttcagtccagcaacaggcagctcagccaacccgctgggtagcacctcggaaccgtggcagtgggttcggtcataatggggtggatggtaatggagtaggacagtctcaggctggttctggatctactccttcagaaccccacccagtgttggagaagcttcggtccattaataactataaccccaaagattttgactggaatctgaaacatggccgggttttcatcattaagagctactctgaggacgatattcaccgttccattaagtataatatttggtgcagcacagagcatggtaacaagagactggatgctgcttatcgttccatgaacgggaaaggccccgtttacttacttttcagtgtcaacggcagtggacacttctgtggcgtggcagaaatgaaatctgctgtggactacaacacatgtgcaggtgtgtggtcccaggacaaatggaagggtcgttttgatgtcaggtggatttttgtgaaggacgttcccaatagccaactgcgacacattcgcctagagaacaacgagaataaaccagtgaccaactctagggacactcaggaagtgcctctggaaaaggctaagcaggtgttgaaaattatagccagctacaagcacaccacttccatttttgatgacttctcacactatgagaaacgccaagaggaagaagaaagtgttaaaaaggaacgtcaaggtcgtgggaaataaaaggcagttctacacagactgcagcaacggttgcatctgcatatcctaagaggaaaaaatgaccttcaagagaattaggacttttttcttaatttcactgacttcagagacgattgcagacttgcagtttaagtattggaatttcacaaaagacataggacttaactggaaaatgaaaaaaaaaagaaaaagaaaaaactaaacaaaaaatccctctaggtagtttaggtgaaaaatgtcccttttattttggctttggttgtgatttcagagcataatgctatgtttttttgtctttttactatgtttttcggatttttaagtccgtaagtgcatacagttttctctaatttttaaaccctttcctcctcccattttgacatttgcacttggagaacacttgagttgtgaaggttttgggcatccaccccagaaagtgggaatttgattttatccttccgaactggaagaacatttttatgaagaatttttgtctaggagaatataacagtgttacccaaggttgtgtctttaagggtggttcattttctctgaccttttgttactcaaagtaaagtactaggagtcctaagaaatgttctgttcttgtacattatactgattaagtcaggattaatttgatttcaaagctgagaacagtggtaaaaactcgtttacagaaatgcattttggaagagaaaaatactgtaaaacgtgtcgtgaatgtttcttcagtttcttgttcagccaatgaggaaagggcattgcctttctttttaccattaatcacttctcaataaacgtgagatcctgttgagcatca

SEQ ID NO: 53002 - DNA, 3618 bp, Homo sapiens
  misc_feature (1)..(5): n is a, c, g, or t
  misc_feature (7)..(8): n is a, c, g, or t
  misc_feature (10)..(10): n is a, c, g, or t
nnnnntnntngcgattttgaagttgtcgaaagactttaatgtgtttgaaaatacctaacaacaaagcctggcccacagctggtatttcaataatgttaatttccttgcttccctcttgaggtccttaagattcataggttctccggactccttgaaagttttgtgtagatgcatgaggtgtatttttcttggaaataaagtccacaatttaacagattatcttggggccagcgatttccccgaaaataaattgtagattctccttccggcaatgctaaggggtgaatctcttttgcgggagactggattctttcggtgtgtgttttgctctctgggtactctttctgtagtcggctaacagaggatgaccaagcccctcgcgggggcgggggcgggtcactcccggacagggcccccatgaagtttccctggggactgtgtgactccctaggggtcgggttacctcccagatgggggtggggtatcacttgcagctggaaggcaggttcattttaaggtctcgcgggcttcggaggcccctccctcactgagaaaccggcttttgtcgttcttctgaagccagagctagtctttccaggtgttagtcgaaacctcgtggtgcgaccctggtcgtcccaaaccccctaggccttaatcctggggcggtgggggcggggaggccgtgagcacagcttccgctcctccaatccgccagagggcgcagcggccggcctctcccttcccggggttcttcgcgccgggccccttccgcgtgggtgagtgaatgtgagagtcagcgctcgcgccgcgcgcgccgcccgcctccgctgttcggcgctctgctttaggcggtggggggcgggcgcgcgcgtaaaagcatagagacgggcattgagctcttgggctagagcgtcgccgagtcggagccggagcctgagccgcgcgctgtgtctccgctgcgtccgccgaggcccccgagtgtcagggacaaaagcctccgcctgctcccgcagccggggctcatctgccgccgccgccgcgctgaggagagttcgccgccgtcgccgcccgtgaggatctgagagccatgtcggccagcagcctcttggagcagagaccaaaaggtcaaggaaacaaagtacaaaatggatctgtacatcaaaaggatggattaaacgatgatgattttgaaccttacttgagtccacaggcaaggcccaataatgcatatactgccatgtcagattcctacttacccagttactacagtccctccattggcttctcctattctttgggtgaagctgcttggtctacggggggtgacacagccatgccctacttaacttcttatggacagctgagcaacggagagccccacttcctaccagatgcaatgtttgggcaaccaggagccctaggtagcactccatttcttggtcagcatggttttaatttctttcccagtgggattgacttctcagcatggggaaataacagttctcagggacagtctactcagagctctggatatagtagcaattatgcttatgcacctagctccttaggtggagccatgattgatggacagtcagcttttgccaatgagaccctcaataaggctcctggcatgaatactatagaccaagggatggcagcactgaagttgggtagcacagaagttgcaagcaatgttccaaaagttgtaggttctgctgttggtagcgggtccattactagtaacatcgtggcttccaatagtttgcctccagccaccattgctcctccaaaaccagcatcttgggctgatattgctagcaagcctgcaaaacagcaacctaaactgaagaccaagaatggcattgcagggtcaagtcttccgccacccccgataaagcataacatggatattggaacttgggataacaagggtcccgttgcaaaagccccctcacaggctttggttcagaatataggtcagccaacccaggggtctcctcagcctgtaggtcagcaggctaacaatagcccaccagtggctcaggcatcagtagggcaacagacacagccattgcctccacctccaccacagcctgcccagctttcagtccagcaacaggcagctcagccaacccgctgggtagcacctcggaaccgtggcagtgggttcggtcataatggggtggatggtaatggagtaggacagtctcaggctggttctggatctactccttcagaaccccacccagtgttggagaagcttcggtccattaataactataaccccaaagattttgactggaatctgaaacatggccgggttttcatcattaagagctactctgaggacgatattcaccgttccattaagtataatatttggtgcagcacagagcatggtaacaagagactggatgctgcttatcgttccatgaacgggaaaggccccgtttacttacttttcagtgtcaacggcagtggacacttctgtggcgtggcagaaatgaaatctgctgtggactacaacacatgtgcaggtgtgtggtcccaggacaaatggaagggtcgttttgatgtcaggtggatttttgtgaaggacgttcccaatagccaactgcgacacattcgcctagagaacaacgagaataaaccagtgaccaactctagggacactcaggaagtgcctctggaaaaggctaagcaggtgttgaaaattatagccagctacaagcacaccacttccatttttgatgacttctcacactatgagaaacgccaagaggaagaagaaagtgttaaaaaggaacgtcaaggtcgtgggaaataaaaggcagttctacacagactgcagcaacggttgcatctgcatatcctaagaggaaaaaatgaccttcaagagaattaggacttttttcttaatttcactgacttcagagacgattgcagacttgcagtttaagtattggaatttcacaaaagacataggacttaactggaaaatgaaaaaaaaaagaaaaagaaaaaactaaacaaaaaatccctctaggtagtttaggtgaaaaatgtcccttttattttggctttggttgtgatttcagagcataatgctatgtttttttgtctttttactatgtttttcggatttttaagtccgtaagtgcatacagttttctctaatttttaaaccctttcctcctcccattttgacatttgcacttggagaacacttgagttgtgaaggttttgggcatccaccccagaaagtgggaatttgattttatccttccgaactggaagaacatttttatgaagaatttttgtctaggagaatataacagtgttacccaaggttgtgtctttaagggtggttcattttctctgaccttttgttactcaaagtaaagtactaggagtcctaagaaatgttctgttcttgtacattatactgattaagtcaggattaatttgatttcaaagctgagaacagtggtaaaaactcgtttacagaaatgcattttggaagagaaaaatactgtaaaacgtgtcgtgaatgtttcaccaatcccccgttctcctcctatcccacaaccccgccatcatttccgggttttcctctta

SEQ ID NO: 53003 - DNA, 3413 bp, Homo sapiens
  misc_feature (1)..(5): n is a, c, g, or t
  misc_feature (7)..(8): n is a, c, g, or t
  misc_feature (10)..(10): n is a, c, g, or t
nnnnntnntngcgattttgaagttgtcgaaagactttaatgtgtttgaaaatacctaacaacaaagcctggcccacagctggtatttcaataatgttaatttccttgcttccctcttgaggtccttaagattcataggttctccggactccttgaaagttttgtgtagatgcatgaggtgtatttttcttggaaataaagtccacaatttaacagattatcttggggccagcgatttccccgaaaataaattgtagattctccttccggcaatgctaaggggtgaatctcttttgcgggagactggattctttcggtgtgtgttttgctctctgggtactctttctgtagtcggctaacagaggatgaccaagcccctcgcgggggcgggggcgggtcactcccggacagggcccccatgaagtttccctggggactgtgtgactccctaggggtcgggttacctcccagatgggggtggggtatcacttgcagctggaaggcaggttcattttaaggtctcgcgggcttcggaggcccctccctcactgagaaaccggcttttgtcgttcttctgaagccagagctagtctttccaggtgttagtcgaaacctcgtggtgcgaccctggtcgtcccaaaccccctaggccttaatcctggggcggtgggggcggggaggccgtgagcacagcttccgctcctccaatccgccagagggcgcagcggccggcctctcccttcccggggttcttcgcgccgggccccttccgcgtggccggggctcatctgccgccgccgccgcgctgaggagagttcgccgccgtcgccgcccgtgaggatctgagagccatgtcggccagcagcctcttggagcagagaccaaaaggtcaaggaaacaaagtacaaaatggatctgtacatcaaaaggatggattaaacgatgatgattttgaaccttacttgagtccacaggcaaggcccaataatgcatatactgccatgtcagattcctacttacccagttactacagtccctccattggcttctcctattctttgggtgaagctgcttggtctacggggggtgacacagccatgccctacttaacttcttatggacagctgagcaacggagagccccacttcctaccagatgcaatgtttgggcaaccaggagccctaggtagcactccatttcttggtcagcatggttttaatttctttcccagtgggattgacttctcagcatggggaaataacagttctcagggacagtctactcagagctctggatatagtagcaattatgcttatgcacctagctccttaggtggagccatgattgatggacagtcagcttttgccaatgagaccctcaataaggctcctggcatgaatactatagaccaagggatggcagcactgaagttgggtagcacagaagttgcaagcaatgttccaaaagttgtaggttctgctgttggtagcgggtccattactagtaacatcgtggcttccaatagtttgcctccagccaccattgctcctccaaaaccagcatcttgggctgatattgctagcaagcctgcaaaacagcaacctaaactgaagaccaagaatggcattgcagggtcaagtcttccgccacccccgataaagcataacatggatattggaacttgggataacaagggtcccgttgcaaaagccccctcacaggctttggttcagaatataggtcagccaacccaggggtctcctcagcctgtaggtcagcaggctaacaatagcccaccagtggctcaggcatcagtagggcaacagacacagccattgcctccacctccaccacagcctgcccagctttcagtccagcaacaggcagctcagccaacccgctgggtagcacctcggaaccgtggcagtgggttcggtcataatggggtggatggtaatggagtaggacagtctcaggctggttctggatctactccttcagaaccccacccagtgttggagaagcttcggtccattaataactataaccccaaagattttgactggaatctgaaacatggccgggttttcatcattaagagctactctgaggacgatattcaccgttccattaagtataatatttggtgcagcacagagcatggtaacaagagactggatgctgcttatcgttccatgaacgggaaaggccccgtttacttacttttcagtgtcaacggcagtggacacttctgtggcgtggcagaaatgaaatctgctgtggactacaacacatgtgcaggtgtgtggtcccaggacaaatggaagggtcgttttgatgtcaggtggatttttgtgaaggacgttcccaatagccaactgcgacacattcgcctagagaacaacgagaataaaccagtgaccaactctagggacactcaggaagtgcctctggaaaaggctaagcaggtgttgaaaattatagccagctacaagcacaccacttccatttttgatgacttctcacactatgagaaacgccaagaggaagaagaaagtgttaaaaaggaacgtcaaggtcgtgggaaataaaaggcagttctacacagactgcagcaacggttgcatctgcatatcctaagaggaaaaaatgaccttcaagagaattaggacttttttcttaatttcactgacttcagagacgattgcagacttgcagtttaagtattggaatttcacaaaagacataggacttaactggaaaatgaaaaaaaaaagaaaaagaaaaaactaaacaaaaaatccctctaggtagtttaggtgaaaaatgtcccttttattttggctttggttgtgatttcagagcataatgctatgtttttttgtctttttactatgtttttcggatttttaagtccgtaagtgcatacagttttctctaatttttaaaccctttcctcctcccattttgacatttgcacttggagaacacttgagttgtgaaggttttgggcatccaccccagaaagtgggaatttgattttatccttccgaactggaagaacatttttatgaagaatttttgtctaggagaatataacagtgttacccaaggttgtgtctttaagggtggttcattttctctgaccttttgttactcaaagtaaagtactaggagtcctaagaaatgttctgttcttgtacattatactgattaagtcaggattaatttgatttcaaagctgagaacagtggtaaaaactcgtttacagaaatgcattttggaagagaaaaatactgtaaaacgtgtcgtgaatgtttcttcagtttcttgttcagccaatgaggaaagggcattgcctttctttttaccattaatcacttctcaataaacgtgagatcctgttgagcatca

SEQ ID NO: 53004 - DNA, 2557 bp, Homo sapiens
  misc_feature (1)..(5): n is a, c, g, or t
  misc_feature (7)..(8): n is a, c, g, or t
  misc_feature (10)..(10): n is a, c, g, or t
nnnnntnntngcgattttgaagttgtcgaaagactttaatgtgtttgaaaatacctaacaacaaagcctggcccacagctggtatttcaataatgttaatttccttgcttccctcttgaggtccttaagattcataggttctccggactccttgaaagttttgtgtagatgcatgaggtgtatttttcttggaaataaagtccacaatttaacagattatcttggggccagcgatttccccgaaaataaattgtagattctccttccggcaatgctaaggggtgaatctcttttgcgggagactggattctttcggtgtgtgttttgctctctgggtactctttctgtagtcggctaacagaggatgaccaagcccctcgcgggggcgggggcgggtcactcccggacagggcccccatgaagtttccctggggactgtgtgactccctaggggtcgggttacctcccagatgggggtggggtatcacttgcagctggaaggcaggttcattttaaggtctcgcgggcttcggaggcccctccctcactgagaaaccggcttttgtcgttcttctgaagccagagctagtctttccaggtgttagtcgaaacctcgtggtgcgaccctggtcgtcccaaaccccctaggccttaatcctggggcggtgggggcggggaggccgtgagcacagcttccgctcctccaatccgccagagggcgcagcggccggcctctcccttcccggggttcttcgcgccgggccccttccgcgtgggtgagtgaatgtgagagtcagcgctcgcgccgcgcgcgccgcccgcctccgctgttcggcgctctgctttaggcggtggggggcgggcgcgcgcgtaaaagcatagagacgggcattgagctcttgggctagagcgtcgccgagtcggagccggagcctgagccgcgcgctgtgtctccgctgcgtccgccgaggcccccgagtgtcagggacaaaagcctccgcctgctcccgcagccggggctcatctgccgccgccgccgcgctgaggagagttcgccgccgtcgccgcccgtgaggatctgagagccatgtcggccagcagcctcttggagcagagaccaaaaggtcaaggaaacaaagtacaaaatggatctgtacatcaaaaggatggattaaacgatgatgattttgaaccttacttgagtccacaggcaaggcccaataatgcatatactgccatgtcagattcctacttacccagttactacagtccctccattggcttctcctattctttgggtgaagctgcttggtctacggggggtgacacagccatgccctacttaacttcttatggacagctgagcaacggagagccccacttcctaccagatgcaatgtttgggcaaccaggagccctaggtagcactccatttcttggtcagcatggttttaatttctttcccagtgggattgacttctcagcatggggaaataacagttctcagggacagtctactcagagctctggatatagtagcaattatgcttatgcacctagctccttaggtggagccatgattgatggacagtcagcttttgccaatgagaccctcaataaggctcctggcatgaatactatagaccaagggatggcagcactgaagttgggtagcacagaagttgcaagcaatgttccaaaagttgtaggttctgctgttggtagcgggtccattactagtaacatcgtggcttccaatagtttgcctccagccaccattgctcctccaaaaccagcatcttgggctgatattgctagcaagcctgcaaaacagcaacctaaactgaagaccaagaatggcattgcagggtcaagtcttccgccacccccgataaagcataacatggatattggaacttgggataacaagggtcccgttgcaaaagccccctcacaggctttggttcagaatataggtcagccaacccaggggtctcctcagcctgtaggtcagcaggctaacaatagcccaccagtggctcaggcatcagtagggcaacagacacagccattgcctccacctccaccacagcctgcccagctttcagtccagcaacaggcagctcagccaacccgctgggtagcacctcggaaccgtggcagtgggttcggtcataatggggtggatggtaatggagtaggacagtctcaggctggttctggatctactccttcagaaccccacccagtgttggagaagcttcggtccattaataactataaccccaaagattttgactggaatctgaaacatggccgggttttcatcattaagagctactctgaggacgatattcaccgttccattaagtataatatttggtgcagcacagagcatggtaacaagagactggatgctgcttatcgttccatgaacgggaaaggccccgtttacttacttcttcctcttggcgtttctcatagtgtgagaagtcatcaaaaatggaagtggtgtgcttgtagctggctataattttcaacacctgcttagcctttt

SEQ ID NO: 53005 - DNA, 1089 bp, Homo sapiens
acacattcgcctagagaacaacgagaataaaccagtgaccaactctaggcgaatgtgtcgcattggctattgggaacaacgagaataaaccagtgaccaactctagggacactcaggaagtgcctctggaaaaggctaagcaggtgttgaaaattatagccagctacaagcacaccacttccatttttgatgacttctcacactatgagaaacgccaagaggaagaagaaagtgttaaaaaggaacgtcaaggtcgtgggaaataaaaggcagttctacacagactgcagcaacggttgcatctgcatatcctaagaggaaaaaatgaccttcaagagaattaggacttttttcttaatttcactgacttcagagacgattgcagacttgcagtttaagtattggaatttcacaaaagacataggacttaactggaaaatgaaaaaaaaaagaaaaagaaaaaactaaacaaaaaatccctctaggtagtttaggtgaaaaatgtcccttttattttggctttggttgtgatttcagagcataatgctatgtttttttgtctttttactatgtttttcggatttttaagtccgtaagtgcatacagttttctctaatttttaaaccctttcctcctcccattttgacatttgcacttggagaacacttgagttgtgaaggttttgggcatccaccccagaaagtgggaatttgattttatccttccgaactggaagaacatttttatgaagaatttttgtctaggagaatataacagtgttacccaaggttgtgtctttaagggtggttcattttctctgaccttttgttactcaaagtaaagtactaggagtcctaagaaatgttctgttcttgtacattatactgattaagtcaggattaatttgatttcaaagctgagaacagtggtaaaaactcgtttacagaaatgcattttggaagagaaaaatactgtaaaacgtgtcgtgaatgtttcttcagtttcttgttcagccaatgaggaaagggcattgcctttctttttaccattaatcacttctcaataaacgtgagatcctgttgagcatca

SEQ ID NO: 53006 - DNA, 598 bp, Homo sapiens
cccctcagggttcaggcctcagctgaggttatcaatactctggctgaccatcgtcatcgtgggactgactttggtggaagtccttggttacttatcattactgtgtttctgagaagttataaatttgccatctccctctgcacaagttacctttgtgtgtctttcctgaagactatcttcccgtctcaaaatggacatgatggatccacggatgtacagcagagagccaggaggtccaactgccgtagacaggaaggaattaaaattgtcctggaagacatctttactttatggagacaggtggaaaccaaagttcgagctaaaatccgtaagatgaaggtgacaacaaaagtcaaccgtcatgacaaaatcaatggaaagaggaagaccgccaaagaacatctgaggaaactaagcatgaaagaacgtgagcacggagaaaaggagaggcaggtgtcagaggcagaggaaaatgggaaattggatatgaaagaaatacacacctacatgctggagtgccatgacgtgatcttgggtcactgcaagctctgtctcccaggttcaaagccggggttcaccgtattagccaggatggtct

SEQ ID NO: 53007 - DNA, 1108 bp, Homo sapiens
tggttatgaggttcttcctgccatcctgccatcatttgttttttatgttttgtcgccaaaagtgaccttgaggaaccctgggagctcaggaaggaaggagcacccagaagcagggacagggagctggttggggaggaccagaaatcagtagagactgggtttcaccgtgttcgccaggatagtctccatgtcttgacctcgtgatctgcctgcctcggcctcccagtgctgggattacaggcgtgagccaccgcgcctggccaaaatatataaccttaagtgttatcaatactctggctgaccatcgtcatcgtgggactgactttggtggaagtccttggttacttatcattactgtgtttctgagaagttataaatttgccatctccctctgcacaagttacctttgtgtgtctttcctgaagactatcttcccgtctcaaaatggacatgatggatccacggatgtacagcagagagccaggaggtccaactgccgtagacaggaaggaattaaaattgtcctggaagacatctttactttatggagacaggtggaaaccaaagttcgagctaaaatccgtaagatgaaggtgacaacaaaagtcaaccgtcatgacaaaatcaatggaaagaggaagaccgccaaagaacatctgaggaaactaagcatgaaagaacgtgagcacggagaaaaggagaggcaggtgtcagaggcagaggaaaatgggaaattggatatgaaagaaatacacacctacatggaaatgtttcaacgtgcgcaagcgttgcggcggcgggcagaggactactacagatgcaaaatcaccccttctggcaagaaagcctctttgcaaccgggtcagaatggcggcagtgggagcatccgtcattcttcaggattggcctaactgggcctaacctcaacaggctgaaactttaaaaaaacggatggggcaccaaggcactcctccattcaaaaagattctataattggtaaatccctgaggctcagacaccttccgagtgtgtgcttatcccttcaccctcacggatggtatctcaggaacctccggggtttgttcctcccttcacttgtttactccgg

SEQ ID NO: 53008 - DNA, 1306 bp, Homo sapiens
gctgaacccgctgagcgtcgacacagtcgctgttggcctggtgtccagcgtggttgtctatcccgtctacctggccatcctctttctcttccggatgtcccggagcaaggtggctgggagcccgagccccacacctgccgggcagcaggtgctggacgtcgacagctgcctggactcatccgtgctggacagctccttcctcacgttctcaggcctccacgctgaggtgagggctctactgggggtcctgccgccttggcgcagcttggactcaagaccctgtgcacctctcagcaggcctttgctggacagatgaagagtgacttgtttctggatgattctaagaggttgatggacggatggctacatggatgtgatggagatggtttactatcgggaccttccgcatcctgctgatgttttgttgcttaggatatgaatggctgagcggaggctgtaaaacctggcactctgcttgggttatcaatactctggctgaccatcgtcatcgtgggactgactttggtggaagtccttggttacttatcattactgtgtttctgagaagttataaatttgccatctccctctgcacaagttacctttgtgtgtctttcctgaagactatcttcccgtctcaaaatggacatgatggatccacggatgtacagcagagagccaggaggtccaactgccgtagacaggaaggaattaaaattgtcctggaagacatctttactttatggagacaggtggaaaccaaagttcgagctaaaatccgtaagatgaaggtgacaacaaaagtcaaccgtcatgacaaaatcaatggaaagaggaagaccgccaaagaacatctgaggaaactaagcatgaaagaacgtgagcacggagaaaaggagaggcaggtgtcagaggcagaggaaaatgggaaattggatatgaaagaaatacacacctacatggaaatgtttcaacgtgcgcaagcgttgcggcggcgggcagaggactactacagatgcaaaatcaccccttctggcaagaaagcctctttgcaaccgggtcagaatggcggcagtgggagcatccgtcattcttcaggattggcctaactgggcctaacctcaacaggctgaaactttaaaaaaacggatggggcaccaaggcactcctccattcaaaaagattctataattggtaaatccctgaggctcagacaccttccgagtgtgtgcttatcccttcaccctcacggatggtatctcaggaacctccggggtttgttcctcccttcacttgtttactccgg

SEQ ID NO: 53009 - DNA, 1262 bp, Homo sapiens
gctgaacccgctgagcgtcgacacagtcgctgttggcctggtgtccagcgtggttgtctatcccgtctacctggccatcctctttctcttccggatgtcccggagcaaggtggctgggagcccgagccccacacctgccgggcagcaggtgctggacgtcgacagctgcctggactcatccgtgctggacagctccttcctcacgttctcaggcctccacgctgaggtgagggctctactgggggtcctgccgccttggcgcagcttggactcaagaccctgtgcacctctcagcaggcctttgctggacagatgaagagtgacttgtttctggatgattctaagagagtgaccttgaggaaccctgggagctcaggaaggaaggagcacccagaagcagggacagggagctggttggggaggaccagaaatcaggttatcaatactctggctgaccatcgtcatcgtgggactgactttggtggaagtccttggttacttatcattactgtgtttctgagaagttataaatttgccatctccctctgcacaagttacctttgtgtgtctttcctgaagactatcttcccgtctcaaaatggacatgatggatccacggatgtacagcagagagccaggaggtccaactgccgtagacaggaaggaattaaaattgtcctggaagacatctttactttatggagacaggtggaaaccaaagttcgagctaaaatccgtaagatgaaggtgacaacaaaagtcaaccgtcatgacaaaatcaatggaaagaggaagaccgccaaagaacatctgaggaaactaagcatgaaagaacgtgagcacggagaaaaggagaggcaggtgtcagaggcagaggaaaatgggaaattggatatgaaagaaatacacacctacatggaaatgtttcaacgtgcgcaagcgttgcggcggcgggcagaggactactacagatgcaaaatcaccccttctggcaagaaagcctctttgcaaccgggtcagaatggcggcagtgggagcatccgtcattcttcaggattggcctaactgggcctaacctcaacaggctgaaactttaaaaaaacggatggggcaccaaggcactcctccattcaaaaagattctataattggtaaatccctgaggctcagacaccttccgagtgtgtgcttatcccttcaccctcacggatggtatctcaggaacctccggggtttgttcctcccttcacttgtttactccgg

SEQ ID NO: 53010 - DNA, 238 bp, Homo sapiens
ggagtacacagggaaactgagtggtaagcagggccatcgctttgaggtggagaaggtcgggccatctcaatcacggctgctctctgccttgcttccttgaatttgtgacacagccgcccactgcctctgttgagattacatcataaattactcaggcataagcagaccagagataagagcagtcagaggcagcccagaaaccaaacaaggggtgctggcatttgttaaaaaaaaaaaa

SEQ ID NO: 53011 - DNA, 341 bp, Homo sapiens
atcaagcaccgaatgaatggcatttaaaaaatatgtaatcaggcgtacaggactgataggaaggctgctataaaaaatatatataattgatacttctttgggcccctgtttggagcagtgtgaaaaaaattttaaagattttttaaaaagcgttgaggtataatttacatatcataaagttaacttaaagtaggttgtagtgagtttacgcagcgtgcaagtctcaccgcaatctagtgttttgtttattgttttgtttttgaagcaggataaatttttaagtaactgctacagagaggtcttgcagcgctcccaccttcctgggaaaatgctttgtttct

SEQ ID NO: 53012 - DNA, 4233 bp, Homo sapiens
  misc_feature (37)..(38): n is a, c, g, or t
gcgccgcggggcccaagcccgggtctgccagcgcganntcctctcgcggccctcagggcacagcccaaggctgtcagcctcccggcccagtgatttgccttcaaggaaactggggagtcagaaaattgggaactcatatcaacatggcaaacctattgaaaacagtggtgactggctgctcgtgtcctctacttagcaatttggggtcctgtaagggtctacgtgtgaagaaggattttttacgaacattttatactcaccaagaactgtggtgtaaagcgcctgtaaaaccaggaattccatataagcaactgactgttggagtccccaaagagatattccaaaatgagaagcgagtggcattgtctcctgctggtgttcagaacttggtcaagcagggttttaatgttgtcgtggaatcgggtgcgggcgaagcttccaagttctcagatgatcactatagagtggcaggtgcccaaatccaaggggcaaaggaagtgctggcttctgatttggtggtcaaagtgcgagcccctatggttaatccaacattaggtgttcatgaagctgaccttttaaagacatcaggaacgctgattagttttatttacccagcccaaaatccagagttgctaaataaactttcccaaagaaaaactacagttctggcaatggaccaggttccaagagtcacaattgctcagggatatgatgcgctaagctccatggccaacattgcgggttataaggctgttgtcctagcagcaaatcattttggacgtttttttactggtcagatcacagctgctggaaaagttcctccagctaagattctgatagttggtggtggtgttgctgggcttgcttctgcaggcgcagcaaagtcgatgggtgcaattgttcgaggatttgacacaagagctgcagctttggaacagttcaagtctcttggtgctgagcccttggaggtggacttgaaggaatctggtgagggacaaggaggatatgcaaaagagatgtccaaagagttcattgaagctgaaatgaaactctttgctcaacaatgcaaggaggtagacatccttatcagcacagcacttattccaggtaaaaaagctccagttttatttaataaagaaatgattgagtcaatgaaggaaggttcagttgttgtggatttagctgctgaggctggtggaaactttgaaaccactaagccaggagaactctacattcataagggaattactcacataggctacacagacctgcccagccgaatggccactcaggccagcaccctatattccaacaacatcaccaaactcctgaaggccatcagcccggacaaagataatttttattttgatgtgaaagatgactttgactttggtacgatgggtcatgtcattagaggaactgtagtgatgaaagatggtaaagtgattttcccagctcccacaccgaaaaatattcctcaaggtgccccagtaaaacagaagacagtggctgagctggaagctgaaaaagcagctaccattacacccttcaggaagacaatgtcaacggcttctgcatatacagcaggtctcacagggatactgggtttgggcattgcggctcccaatctagccttttctcagatggtgaccacttttggcttggctggcattgtggggtatcataccgtctggggagtgacccctgctctccactcaccactgatgtctgtgacaaatgcaatctcagggctgactgcagttggtgggttggcactgatgggaggacatttgtatccttccacaacttctcagggccttgctgctcttgctgcattcatatcctctgtcaacattgcaggtggctttctggtgactcagagaatgctggacatgttcaagcgtcccactgaccccccagaatacaactacctgtacctgctccctgccggcacctttgttggtggatatttagctgccctctacagtggttataacattgaacagatcatgtacctaggctcgggtttgtgctgtgtcggtgccttggctggcctctccacccagggaacagcacgtcttggcaatgcactgggcatgattggggttgctggaggactggcagccaccctcggagtcctaaaaccgggcccagaattactagctcagatgtctggagcgatggctttgggtggtaccattggattgacaattgccaaacgcatccagatttctgatttacctcaattagttgctgcttttcacagtttagtgggtttggcagctgtacttacttgcatagctgagtacattatagaatatccacattttgctacggatgcagcagcaaatctcaccaagattgtggcctacctcggcacttacattggtggcgtcacctttagtgggtctctcattgcctatggaaaattgcagggtctcctgaaatctgcccctctcctactgcctggaaggcacttactcaatgcaggcttactggctgctagtgtgggcgggataatcccattcatggtggacccaagctttactactggcatcacctgtctgggttcagtgtctgctctctctgctgtcatgggtgtgactttgacagctgctattgggggtgctgacatgcccgtcgttatcactgtgctgaacagctactcaggctgggccctgtgtgcagagggcttcctgctcaacaacaatctgctgaccatcgtgggtgcactcataggctcgtctggtgctatcctgtcatacatcatgtgtgtggcaatgaatcgctccctggctaatgtgattcttggaggctatggcaccacttcaacagctggtggaaaacccatggaaatttctggcacacatacggaaatcaaccttgacaatgcaattgacatgattcgagaagctaatagcattattattacaccaggctatggtctctgtgcagccaaagctcaataccccattgctgatttggtaaagatgctcactgagcaaggcaaaaaagtcaggtttggaattcacccagttgcaggccgaatgcctggtcagcttaatgtgctgctggctgaggctggtgtgccatatgacattgtgttggaaatggatgagatcaaccatgattttccagatactgatttggtccttgtaattggagctaatgacactgttaattcagcagctcaagaagatcccaactctattattgcaggcatgccagtccttgaggtctggaaatcaaagcaggtgattgttatgaagaggtctttgggtgttggctatgctgcagtggacaatccaatcttctacaaacctaacacggccatgcttctaggtgatgccaagaaaacatgtgacgcgctccaggcgaaagttagagaatcctatcagaagtaaatattaaggatcaagctgttagctaataatgccacctctgcagttttgggaacaggcaaataaagtatcagtatacatggtgatgtacatctgtagcaaagctcttggagaaaatgaagactgaagaaagcaaagcaaaaactgtatagagagatttttcaaaagcagtaatccctcaattttaaaaaaggattgaaaattctaaatgtctttctgtgcatattttttgtgttaggaatcaaaagtattttataaaaggagaaagaacagcctcattttagatgtagtcctgttggattttttatgcctcctcagtaaccagaaatgttttaaaaaactaagtgtttaggatttcaagacaacattatacatggctctgaaatatctgacacaatgtaaacattgcaggcacctgcattttatgttttttttttcaacaaatgtgactaatttgaaacttttatgaacttctgagctgtccccttgcaattcaaccgcagtttgaattaatcatatcaaatcagttttaattttttaaattgtacttcagagtctatatttcaagggcacattttctcactactattttaatacattaaaggactaaataatctttcagagatgctggaaacaaatcatttgctttatatgtttcattagaataccaatgaaacatacaacttgaaaattagtaatagtatttttgaagatcccatttctaattggagatctctttaatttcgatcaacttataatgtgtagtactatattaagtgcacttgagtggaattcaacatttgactaataaaatgagttcatcatgttggca

SEQ ID NO: 53013 - DNA, 1086 bp, Homo sapiens
gagaagagttggagcagtgagtcagaaagaccttagtctgaattccagatttccaatttattgatcatttgccttggagaaaatatgcaacttctttaagctttgattctgtcttttgcaaaatgaggataatgatttttccctcttgtggatctcatgacactgtgacaacacaaataaaacatgtggcaaagcccctggcacttacctcaggggttggctcttttacagcatttggtcaggtttagtatttttagatccagtaatgactccatttaaatttaggtacttttatgtgtatttgtgcatgatagcaaatccagaaaaaatcaatttatataaatggtataagtgcaaatacaatataagtatttaatatgttaatattcctaattggcaggaaaatatattgaaatctctaagctaatagaccaaaggttttaataatctctctctcacttttcctttgaaaagatcatgtacctaggctcgggtttgtgctgtgtcggtgccttggctggcctctccacccagggaacagcacgtcttggcaatgcactgggcatgattggggttgctggaggactggcagccaccctcggagtcctaaaaccgggcccagaattactagctcagatgtctggagcgatggctttgggtggtaccattgattggtaagcacttgtgggcttctgccttcatgtgaactccagtttctcaatatatatttctaaggtccatattgatgaaataattaaattttgttcatggaagttgcttcagttaatattattttggtgaaaattcattccagttggtgtaattctcattcaaatacattttagaacactgaataaatgcatcaactgagtcaaaatatcctatactcaattcttatcttcctttactgactgtgtcccgttagctgataatggaatgggggattggaatccttatgtatgtactatacataagctaacttttgttctgctgggtataaataacagccaaagattctgcttcatagacctgttaaagacttgagcagcttatgcatgcggccgcatttcggcttacttgcccaat

SEQ ID NO: 53014 - DNA, 1050 bp, Homo sapiens
gtatccccatttgttggagtctgggtcaagtaaggaggttttttgggttcaatggtggcaggtccctcatgaatggctgggttctgtccctggtggtaatgaggtgagtttcttattccagttagctcatgttagagctggttttgaaaagagtctagtgtctttctcacctgttctcgttgctccctttgtggccatgtgatatgcctgctcctcctcttcgccttcgcaccatgattgtaagcttctgttttctgtgtctgtgcggtctgtctgtgtgtttttgagatagagtatcactctgttgcccaggctggagtacagtggtgtgatctcagctcacagcaacctctgcctcccaagttccaagtgatcctcttgcctcagcctcctgagtagcagggactccagacacatgccaccatgcccagctaatttttgtatttttagtagagatggggtttcaccatgttggccagcctggtctcgaactcctgacctcaaatgatccatctgtctccgcctcccgaagtgctggcattacaggcatgagccaccgcacgcggccaattgtaaacttcttgaggttgtcaccagaagcagatgctggcatcatgcttcttgtacagcctagaaaggcctgtctgtctagattcttcttggcatctctgagcatggatttcattctggatatggggcaggatgctctctggaatgagggtctttagacctgtttctttgttctgatgggaccccagagaggacatcacgctttgtaactggttcttcaaggggagaagcaaatgtgtccctgaaaacttcagctgccgcgtttggcaccaggtttgattgacaaggactggcggagggaaagcgcggaggctgggctgggggccgcaggccgaggcagagacaaagaggtttcgcctgtccccgagagtggaagggcccctgggggtaactagcctttgagctcaaaggggcatttcgtgaggtcgccttttggttcggagagcgcgcggcgatcgggtggagggggcctggcgggaa

SEQ ID NO: 53015 - DNA, 905 bp, Homo sapiens
cggacgcgtgggtcgacccacgcgtccgccatttctaattggagatctctttaatttcgatcaacttataatgtgtagtactatattaagtgcacttgagtggaattcaacatttgactaataaaatgagttcatcatgttggcaagtgatgtggcaattatctctggtgacaaaagagtaaaatcaaatatttctgcctgttacaaatatcaaggaagacctgctactatgaaatagatgacattaatctgtcttcactgtttataatacggatggattttttttcaaatcagtgtgtgttttgaggtcttatgtaattgatgacatttgagagaaatggtggctttttttagctacctctttgttcatttaagcaccagtaaagatcatgtctttttatagaaaaaaaaaaaaaaaaaaaaaaaaaaaaaaaaaaaaaaaaaaaaaacaaaaaaaaaaaaaaaaaaaaaagaaaaaaaagaaaaaaaaaaggaggggggggggataaaaaaatccacaggaggggaggagaaaataagagagcgaacaagatgtaattatgtaaagacaacgacagcccaccacaaaaacggagggagaaaacaataaaaacaacaccagcagcggcgcgcggccagcctaaaaccactcagacgtgatagtatcaagacaaaacatcgtcagaatgaagagaactactgcagagaaagagcacacgaccattctatctggtgagaagacgacatatagagggcagcaccacaacaatacacaaagtagaacccactacaaagtaaagaaaaacaataaaaaagaagttaatgatagaacaaaacaacgatacataacgtagccgggaaacaacgtacaacagcaatgagtgagcaacaaactatacacggcg

SEQ ID NO: 53016 - DNA, 4986 bp, Homo sapiens
gtatccccatttgttggagtctgggtcaagtaaggaggttttttgggttcaatggtggcaggtccctcatgaatggctgggttctgtccctggtggtaatgaggtgagtttcttattccagttagctcatgttagagctggttttgaaaagagtctagtgtctttctcacctgttctcgttgctccctttgtggccatgtgatatgcctgctcctcctcttcgccttcgcaccatgattgtaagcttctgttttctgtgtctgtgcggtctgtctgtgtgtttttgagatagagtatcactctgttgcccaggctggagtacagtggtgtgatctcagctcacagcaacctctgcctcccaagttccaagtgatcctcttgcctcagcctcctgagtagcagggactccagacacatgccaccatgcccagctaatttttgtatttttagtagagatggggtttcaccatgttggccagcctggtctcgaactcctgacctcaaatgatccatctgtctccgcctcccgaagtgctggcattacaggcatgagccaccgcacgcggccaattgtaaacttcttgaggttgtcaccagaagcagatgctggcatcatgcttcttgtacagcctagaaaggcctgtctgtctagattcttcttggcatctctgagcatggatttcattctggatatggggcaggatgctctctggaatgagggtctttagacctgtttctttgttctgatgggaccccagagaggacatcacgctttgtaactggttcttcaaggggagaagcaaatgtgtccctgaaaacttcagctgccgcgtttggcaccagtgatttgccttcaaggaaactggggagtcagaaaattgggaactcatatcaacatggcaaacctattgaaaacagtggtgactggctgctcgtgtcctctacttagcaatttggggtcctgtaagggtctacgtgtgaagaaggattttttacgaacattttatactcaccaagaactgtggtgtaaagcgcctgtaaaaccaggaattccatataagcaactgactgttggagtccccaaagagatattccaaaatgagaagcgagtggcattgtctcctgctggtgttcagaacttggtcaagcagggttttaatgttgtcgtggaatcgggtgcgggcgaagcttccaagttctcagatgatcactatagagtggcaggtgcccaaatccaaggggcaaaggaagtgctggcttctgatttggtggtcaaagtgcgagcccctatggttaatccaacattaggtgttcatgaagctgaccttttaaagacatcaggaacgctgattagttttatttacccagcccaaaatccagagttgctaaataaactttcccaaagaaaaactacagttctggcaatggaccaggttccaagagtcacaattgctcagggatatgatgcgctaagctccatggccaacattgcgggttataaggctgttgtcctagcagcaaatcattttggacgtttttttactggtcagatcacagctgctggaaaagttcctccagctaagattctgatagttggtggtggtgttgctgggcttgcttctgcaggcgcagcaaagtcgatgggtgcaattgttcgaggatttgacacaagagctgcagctttggaacagttcaagtctcttggtgctgagcccttggaggtggacttgaaggaatctggtgagggacaaggaggatatgcaaaagagatgtccaaagagttcattgaagctgaaatgaaactctttgctcaacaatgcaaggaggtagacatccttatcagcacagcacttattccaggtaaaaaagctccagttttatttaataaagaaatgattgagtcaatgaaggaaggttcagttgttgtggatttagctgctgaggctggtggaaactttgaaaccactaagccaggagaactctacattcataagggaattactcacataggctacacagacctgcccagccgaatggccactcaggccagcaccctatattccaacaacatcaccaaactcctgaaggccatcagcccggacaaagataatttttattttgatgtgaaagatgactttgactttggtacgatgggtcatgtcattagaggaactgtagtgatgaaagatggtaaagtgattttcccagctcccacaccgaaaaatattcctcaaggtgccccagtaaaacagaagacagtggctgagctggaagctgaaaaagcagctaccattacacccttcaggaagacaatgtcaacggcttctgcatatacagcaggtctcacagggatactgggtttgggcattgcggctcccaatctagccttttctcagatggtgaccacttttggcttggctggcattgtggggtatcataccgtctggggagtgacccctgctctccactcaccactgatgtctgtgacaaatgcaatctcagggctgactgcagttggtgggttggcactgatgggaggacatttgtatccttccacaacttctcagggccttgctgctcttgctgcattcatatcctctgtcaacattgcaggtggctttctggtgactcagagaatgctggacatgttcaagcgtcccactgaccccccagaatacaactacctgtacctgctccctgccggcacctttgttggtggatatttagctgccctctacagtggttataacattgaacagatcatgtacctaggctcgggtttgtgctgtgtcggtgccttggctggcctctccacccagggaacagcacgtcttggcaatgcactgggcatgattggggttgctggaggactggcagccaccctcggagtcctaaaaccgggcccagaattactagctcagatgtctggagcgatggctttgggtggtaccattggattgacaattgccaaacgcatccagatttctgatttacctcaattagttgctgcttttcacagtttagtgggtttggcagctgtacttacttgcatagctgagtacattatagaatatccacattttgctacggatgcagcagcaaatctcaccaagattgtggcctacctcggcacttacattggtggcgtcacctttagtgggtctctcattgcctatggaaaattgcagggtctcctgaaatctgcccctctcctactgcctggaaggcacttactcaatgcaggcttactggctgctagtgtgggcgggataatcccattcatggtggacccaagctttactactggcatcacctgtctgggttcagtgtctgctctctctgctgtcatgggtgtgactttgacagctgctattgggggtgctgacatgcccgtcgttatcactgtgctgaacagctactcaggctgggccctgtgtgcagagggcttcctgctcaacaacaatctgctgaccatcgtgggtgcactcataggctcgtctggtgctatcctgtcatacatcatgtgtgtggcaatgaatcgctccctggctaatgtgattcttggaggctatggcaccacttcaacagctggtggaaaacccatggaaatttctggcacacatacggaaatcaaccttgacaatgcaattgacatgattcgagaagctaatagcattattattacaccaggctatggtctctgtgcagccaaagctcaataccccattgctgatttggtaaagatgctcactgagcaaggcaaaaaagtcaggtttggaattcacccagttgcaggccgaatgcctggtcagcttaatgtgctgctggctgaggctggtgtgccatatgacattgtgttggaaatggatgagatcaaccatgattttccagatactgatttggtccttgtaattggagctaatgacactgttaattcagcagctcaagaagatcccaactctattattgcaggcatgccagtccttgaggtctggaaatcaaagcaggtgattgttatgaagaggtctttgggtgttggctatgctgcagtggacaatccaatcttctacaaacctaacacggccatgcttctaggtgatgccaagaaaacatgtgacgcgctccaggcgaaagttagagaatcctatcagaagtaaatattaaggatcaagctgttagctaataatgccacctctgcagttttgggaacaggcaaataaagtatcagtatacatggtgatgtacatctgtagcaaagctcttggagaaaatgaagactgaagaaagcaaagcaaaaactgtatagagagatttttcaaaagcagtaatccctcaattttaaaaaaggattgaaaattctaaatgtctttctgtgcatattttttgtgttaggaatcaaaagtattttataaaaggagaaagaacagcctcattttagatgtagtcctgttggattttttatgcctcctcagtaaccagaaatgttttaaaaaactaagtgtttaggatttcaagacaacattatacatggctctgaaatatctgacacaatgtaaacattgcaggcacctgcattttatgttttttttttcaacaaatgtgactaatttgaaacttttatgaacttctgagctgtccccttgcaattcaaccgcagtttgaattaatcatatcaaatcagttttaattttttaaattgtacttcagagtctatatttcaagggcacattttctcactactattttaatacattaaaggactaaataatctttcagagatgctggaaacaaatcatttgctttatatgtttcattagaataccaatgaaacatacaacttgaaaattagtaatagtatttttgaagatcccatttctaattggagatctctttaatttcgatcaacttataatgtgtagtactatattaagtgcacttgagtggaattcaacatttgactaataaaatgagttcatcatgttggca

SEQ ID NO: 53017 - DNA, 4319 bp, Homo sapiens
gaagttctgatttttcctagcgagctggaggaaaggcaggtacccggagtggagttatattacctgtttctttgttctgatgggaccccagagaggacatcacgctttgtaactggttcttcaaggggagaagcaaatgtgtccctgaaaacttcagctgccgcgtttggcaccagtgatttgccttcaaggaaactggggagtcagaaaattgggaactcatatcaacatggcaaacctattgaaaacagtggtgactggctgctcgtgtcctctacttagcaatttggggtcctgtaagggtctacgtgtgaagaaggattttttacgaacattttatactcaccaagaactgtggtgtaaagcgcctgtaaaaccaggaattccatataagcaactgactgttggagtccccaaagagatattccaaaatgagaagcgagtggcattgtctcctgctggtgttcagaacttggtcaagcagggttttaatgttgtcgtggaatcgggtgcgggcgaagcttccaagttctcagatgatcactatagagtggcaggtgcccaaatccaaggggcaaaggaagtgctggcttctgatttggtggtcaaagtgcgagcccctatggttaatccaacattaggtgttcatgaagctgaccttttaaagacatcaggaacgctgattagttttatttacccagcccaaaatccagagttgctaaataaactttcccaaagaaaaactacagttctggcaatggaccaggttccaagagtcacaattgctcagggatatgatgcgctaagctccatggccaacattgcgggttataaggctgttgtcctagcagcaaatcattttggacgtttttttactggtcagatcacagctgctggaaaagttcctccagctaagattctgatagttggtggtggtgttgctgggcttgcttctgcaggcgcagcaaagtcgatgggtgcaattgttcgaggatttgacacaagagctgcagctttggaacagttcaagtctcttggtgctgagcccttggaggtggacttgaaggaatctggtgagggacaaggaggatatgcaaaagagatgtccaaagagttcattgaagctgaaatgaaactctttgctcaacaatgcaaggaggtagacatccttatcagcacagcacttattccaggtaaaaaagctccagttttatttaataaagaaatgattgagtcaatgaaggaaggttcagttgttgtggatttagctgctgaggctggtggaaactttgaaaccactaagccaggagaactctacattcataagggaattactcacataggctacacagacctgcccagccgaatggccactcaggccagcaccctatattccaacaacatcaccaaactcctgaaggccatcagcccggacaaagataatttttattttgatgtgaaagatgactttgactttggtacgatgggtcatgtcattagaggaactgtagtgatgaaagatggtaaagtgattttcccagctcccacaccgaaaaatattcctcaaggtgccccagtaaaacagaagacagtggctgagctggaagctgaaaaagcagctaccattacacccttcaggaagacaatgtcaacggcttctgcatatacagcaggtctcacagggatactgggtttgggcattgcggctcccaatctagccttttctcagatggtgaccacttttggcttggctggcattgtggggtatcataccgtctggggagtgacccctgctctccactcaccactgatgtctgtgacaaatgcaatctcagggctgactgcagttggtgggttggcactgatgggaggacatttgtatccttccacaacttctcagggccttgctgctcttgctgcattcatatcctctgtcaacattgcaggtggctttctggtgactcagagaatgctggacatgttcaagcgtcccactgaccccccagaatacaactacctgtacctgctccctgccggcacctttgttggtggatatttagctgccctctacagtggttataacattgaacagatcatgtacctaggctcgggtttgtgctgtgtcggtgccttggctggcctctccacccagggaacagcacgtcttggcaatgcactgggcatgattggggttgctggaggactggcagccaccctcggagtcctaaaaccgggcccagaattactagctcagatgtctggagcgatggctttgggtggtaccattggattgacaattgccaaacgcatccagatttctgatttacctcaattagttgctgcttttcacagtttagtgggtttggcagctgtacttacttgcatagctgagtacattatagaatatccacattttgctacggatgcagcagcaaatctcaccaagattgtggcctacctcggcacttacattggtggcgtcacctttagtgggtctctcattgcctatggaaaattgcagggtctcctgaaatctgcccctctcctactgcctggaaggcacttactcaatgcaggcttactggctgctagtgtgggcgggataatcccattcatggtggacccaagctttactactggcatcacctgtctgggttcagtgtctgctctctctgctgtcatgggtgtgactttgacagctgctattgggggtgctgacatgcccgtcgttatcactgtgctgaacagctactcaggctgggccctgtgtgcagagggcttcctgctcaacaacaatctgctgaccatcgtgggtgcactcataggctcgtctggtgctatcctgtcatacatcatgtgtgtggcaatgaatcgctccctggctaatgtgattcttggaggctatggcaccacttcaacagctggtggaaaacccatggaaatttctggcacacatacggaaatcaaccttgacaatgcaattgacatgattcgagaagctaatagcattattattacaccaggctatggtctctgtgcagccaaagctcaataccccattgctgatttggtaaagatgctcactgagcaaggcaaaaaagtcaggtttggaattcacccagttgcaggccgaatgcctggtcagcttaatgtgctgctggctgaggctggtgtgccatatgacattgtgttggaaatggatgagatcaaccatgattttccagatactgatttggtccttgtaattggagctaatgacactgttaattcagcagctcaagaagatcccaactctattattgcaggcatgccagtccttgaggtctggaaatcaaagcaggtgattgttatgaagaggtctttgggtgttggctatgctgcagtggacaatccaatcttctacaaacctaacacggccatgcttctaggtgatgccaagaaaacatgtgacgcgctccaggcgaaagttagagaatcctatcagaagtaaatattaaggatcaagctgttagctaataatgccacctctgcagttttgggaacaggcaaataaagtatcagtatacatggtgatgtacatctgtagcaaagctcttggagaaaatgaagactgaagaaagcaaagcaaaaactgtatagagagatttttcaaaagcagtaatccctcaattttaaaaaaggattgaaaattctaaatgtctttctgtgcatattttttgtgttaggaatcaaaagtattttataaaaggagaaagaacagcctcattttagatgtagtcctgttggattttttatgcctcctcagtaaccagaaatgttttaaaaaactaagtgtttaggatttcaagacaacattatacatggctctgaaatatctgacacaatgtaaacattgcaggcacctgcattttatgttttttttttcaacaaatgtgactaatttgaaacttttatgaacttctgagctgtccccttgcaattcaaccgcagtttgaattaatcatatcaaatcagttttaattttttaaattgtacttcagagtctatatttcaagggcacattttctcactactattttaatacattaaaggactaaataatctttcagagatgctggaaacaaatcatttgctttatatgtttcattagaataccaatgaaacatacaacttgaaaattagtaatagtatttttgaagatcccatttctaattggagatctctttaatttcgatcaacttataatgtgtagtactatattaagtgcacttgagtggaattcaacatttgactaataaaatgagttcatcatgttggca

SEQ ID NO: 53018 - DNA, 5245 bp, Homo sapiens
gtatccccatttgttggagtctgggtcaagtaaggaggttttttgggttcaatggtggcaggtccctcatgaatggctgggttctgtccctggtggtaatgaggtgagtttcttattccagttagctcatgttagagctggttttgaaaagagtctagtgtctttctcacctgttctcgttgctccctttgtggccatgtgatatgcctgctcctcctcttcgccttcgcaccatgattgtaagcttctgttttctgtgtctgtgcggtctgtctgtgtgtttttgagatagagtatcactctgttgcccaggctggagtacagtggtgtgatctcagctcacagcaacctctgcctcccaagttccaagtgatcctcttgcctcagcctcctgagtagcagggactccagacacatgccaccatgcccagctaatttttgtatttttagtagagatggggtttcaccatgttggccagcctggtctcgaactcctgacctcaaatgatccatctgtctccgcctcccgaagtgctggcattacaggcatgagccaccgcacgcggccaattgtaaacttcttgaggttgtcaccagaagcagatgctggcatcatgcttcttgtacagcctagaaaggcctgtctgtctagattcttcttggcatctctgagcatggatttcattctggatatggggcaggatgctctctggaatgagggtctttagacctgtttctttgttctgatgggaccccagagaggacatcacgctttgtaactggttcttcaaggggagaagcaaatgtgtccctgaaaacttcagctgccgcgtttggcaccagtgatttgccttcaaggaaactggggagtcagaaaattgggaactcatatcaacatggcaaacctattgaaaacagtggtgactggctgctcgtgtcctctacttagcaatttggggtcctgtaagggtctacgtgtgaagaaggattttttacgaacattttatactcaccaagaactgtggtgtaaagcgcctgtaaaaccaggaattccatataagcaactgactgttggagtccccaaagagatattccaaaatgagaagcgagtggcattgtctcctgctggtgttcagaacttggtcaagcagggttttaatgttgtcgtggaatcgggtgcgggcgaagcttccaagttctcagatgatcactatagagtggcaggtgcccaaatccaaggggcaaaggaagtgctggcttctgatttggtggtcaaagtgcgagcccctatggttaatccaacattaggtgttcatgaagctgaccttttaaagacatcaggaacgctgattagttttatttacccagcccaaaatccagagttgctaaataaactttcccaaagaaaaactacagttctggcaatggaccaggttccaagagtcacaattgctcagggatatgatgcgctaagctccatggccaacattgcgggttataaggctgttgtcctagcagcaaatcattttggacgtttttttactggtcagatcacagctgctggaaaagttcctccagctaagattctgatagttggtggtggtgttgctgggcttgcttctgcaggcgcagcaaagtcgatgggtgcaattgttcgaggatttgacacaagagctgcagctttggaacagttcaagtctcttggtgctgagcccttggaggtggacttgaaggaatctggtgagggacaaggaggatatgcaaaagagatgtccaaagagttcattgaagctgaaatgaaactctttgctcaacaatgcaaggaggtagacatccttatcagcacagcacttattccaggtaaaaaagctccagttttatttaataaagaaatgattgagtcaatgaaggaaggttcagttgttgtggatttagctgctgaggctggtggaaactttgaaaccactaagccaggagaactctacattcataagggaattactcacataggctacacagacctgcccagccgaatggccactcaggccagcaccctatattccaacaacatcaccaaactcctgaaggccatcagcccggacaaagataatttttattttgatgtgaaagatgactttgactttggtacgatgggtcatgtcattagaggaactgtagtgatgaaagatggtaaagtgattttcccagctcccacaccgaaaaatattcctcaaggtgccccagtaaaacagaagacagtggctgagctggaagctgaaaaagcagctaccattacacccttcaggaagacaatgtcaacggcttctgcatatacagcaggtctcacagggatactgggtttgggcattgcggctcccaatctagccttttctcagatggtgaccacttttggcttggctggcattgtggggtatcataccgtctggggagtgacccctgctctccactcaccactgatgtctgtgacaaatgcaatctcagggctgactgcagttggtgggttggcactgatgggaggacatttgtatccttccacaacttctcagggccttgctgctcttgctgcattcatatcctctgtcaacattgcaggtggctttctggtgactcagagaatgctggacatgttcaagcgtcccactgaccccccagaatacaactacctgtacctgctccctgccggcacctttgttggtggatatttagctgccctctacagtggttataacattgaacagatcatgtacctaggctcgggtttgtgctgtgtcggtgccttggctggcctctccacccagggaacagcacgtcttggcaatgcactgggcatgattggggttgctggaggactggcagccaccctcggagtcctaaaaccgggcccagaattactagctcagatgtctggagcgatggctttgggtggtaccattggattgacaattgccaaacgcatccagatttctgatttacctcaattagttgctgcttttcacagtttagtgggtttggcagctgtacttacttgcatagctgagtacattatagaatatccacattttgctacggatgcagcagcaaatctcaccaagattgtggcctacctcggcacttacattggtggcgtcacctttagtgggtctctcattgcctatggaaaattgcagggtctcctgaaatctgcccctctcctactgcctggaaggcacttactcaatgcaggcttactggctgctagtgtgggcgggataatcccattcatggtggacccaagctttactactggcatcacctgtctgggttcagtgtctgctctctctgctgtcatgggtgtgactttgacagctgctattgggggtgctgacatgcccgtcgttatcactgtgctgaacagctactcaggctgggccctgtgtgcagagggcttcctgctcaacaacaatctgctgaccatcgtgggtgcactcataggctcgtctggtgctatcctgtcatacatcatgtgtgtggcaatgaatcgctccctggctaatgtgattcttggaggctatggcaccacttcaacagctggtggaaaacccatggaaatttctggcacacatacggaaatcaaccttgacaatgcaattgacatgattcgagaagctaatagcattattattacaccaggctatggtctctgtgcagccaaagctcaataccccattgctgatttggtaaagatgctcactgagcaaggcaaaaaagtcaggtttggaattcacccagttgcaggccgaatgcctggtcagcttaatgtgctgctggctgaggctggtgtgccatatgacattgtgttggaaatggatgagatcaaccatgattttccagatactgatttggtccttgtaattggagctaatgacactgttaattcagcagctcaagaagatcccaactctattattgcaggcatgccagtccttgaggtctggaaatcaaagcaggtgattgttatgaagaggtctttgggtgttggctatgctgcagtggacaatccaatcttctacaaacctaacacggccatgcttctaggtgatgccaagaaaacatgtgacgcgctccaggcgaaagttagagaatcctatcagaagtaaatattaaggatcaagctgttagctaataatgccacctctgcagttttgggaacaggcaaataaagtatcagtatacatggtgatgtacatctgtagcaaagctcttggagaaaatgaagactgaagaaagcaaagcaaaaactgtatagagagatttttcaaaagcagtaatccctcaattttaaaaaaggattgaaaattctaaatgtctttctgtgcatattttttgtgttaggaatcaaaagtattttataaaaggagaaagaacagcctcattttagatgtagtcctgttggattttttatgcctcctcagtaaccagaaatgttttaaaaaactaagtgtttaggatttcaagacaacattatacatggctctgaaatatctgacacaatgtaaacattgcaggcacctgcattttatgttttttttttcaacaaatgtgactaatttgaaacttttatgaacttctgagctgtccccttgcaattcaaccgcagtttgaattaatcatatcaaatcagttttaattttttaaattgtacttcagagtctatatttcaagggcacattttctcactactattttaatacattaaaggactaaataatctttcagagatgctggaaacaaatcatttgctttatatgtttcattagaataccaatgaaacatacaacttgaaaattagtaatagtatttttgaagatcccatttctaattggagatctctttaatttcgatcaacttataatgtgtagtactatattaagtgcacttgagtggaattcaacatttgactaataaaatgagttcatcatgttggcaagtgatgtggcaattatctctggtgacaaaagagtaaaatcaaatatttctgcctgttacaaatatcaaggaagacctgctactatgaaatagatgacattaatctgtcttcactgtttataatacggatggattttttttcaaatcagtgtgtgttttgaggtcttatgtaattgatgacatttgagagaaatggtggctttttttagctacctctttgttcatttaagcaccagtaaagatcatgtctttttataga

SEQ ID NO: 53019 - DNA, 6711 bp, Homo sapiens
gtatccccatttgttggagtctgggtcaagtaaggaggttttttgggttcaatggtggcaggtccctcatgaatggctgggttctgtccctggtggtaatgaggtgagtttcttattccagttagctcatgttagagctggttttgaaaagagtctagtgtctttctcacctgttctcgttgctccctttgtggccatgtgatatgcctgctcctcctcttcgccttcgcaccatgattgtaagcttctgttttctgtgtctgtgcggtctgtctgtgtgtttttgagatagagtatcactctgttgcccaggctggagtacagtggtgtgatctcagctcacagcaacctctgcctcccaagttccaagtgatcctcttgcctcagcctcctgagtagcagggactccagacacatgccaccatgcccagctaatttttgtatttttagtagagatggggtttcaccatgttggccagcctggtctcgaactcctgacctcaaatgatccatctgtctccgcctcccgaagtgctggcattacaggcatgagccaccgcacgcggccaattgtaaacttcttgaggttgtcaccagaagcagatgctggcatcatgcttcttgtacagcctagaaaggcctgtctgtctagattcttcttggcatctctgagcatggatttcattctggatatggggcaggatgctctctggaatgagggtctttagacctgtttctttgttctgatgggaccccagagaggacatcacgctttgtaactggttcttcaaggggagaagcaaatgtgtccctgaaaacttcagctgccgcgtttggcaccagtgatttgccttcaaggaaactggggagtcagaaaattgggaactcatatcaacatggcaaacctattgaaaacagtggtgactggctgctcgtgtcctctacttagcaatttggggtcctgtaagggtctacgtgtgaagaaggattttttacgaacattttatactcaccaagaactgtggtgtaaagcgcctgtaaaaccaggaattccatataagcaactgactgttggagtccccaaagagatattccaaaatgagaagcgagtggcattgtctcctgctggtgttcagaacttggtcaagcagggttttaatgttgtcgtggaatcgggtgcgggcgaagcttccaagttctcagatgatcactatagagtggcaggtgcccaaatccaaggggcaaaggaagtgctggcttctgatttggtggtcaaagtgcgagcccctatggttaatccaacattaggtgttcatgaagctgaccttttaaagacatcaggaacgctgattagttttatttacccagcccaaaatccagagttgctaaataaactttcccaaagaaaaactacagttctggcaatggaccaggttccaagagtcacaattgctcagggatatgatgcgctaagctccatggccaacattgcgggttataaggctgttgtcctagcagcaaatcattttggacgtttttttactggtcagatcacagctgctggaaaagttcctccagctaagattctgatagttggtggtggtgttgctgggcttgcttctgcaggcgcagcaaagtcgatgggtgcaattgttcgaggatttgacacaagagctgcagctttggaacagttcaagtctcttggtgctgagcccttggaggtggacttgaaggaatctggtgagggacaaggaggatatgcaaaagagatgtccaaagagttcattgaagctgaaatgaaactctttgctcaacaatgcaaggaggtagacatccttatcagcacagcacttattccaggtaaaaaagctccagttttatttaataaagaaatgattgagtcaatgaaggaaggttcagttgttgtggatttagctgctgaggctggtggaaactttgaaaccactaagccaggagaactctacattcataagggaattactcacataggctacacagacctgcccagccgaatggccactcaggccagcaccctatattccaacaacatcaccaaactcctgaaggccatcagcccggacaaagataatttttattttgatgtgaaagatgactttgactttggtacgatgggtcatgtcattagaggaactgtagtgatgaaagatggtaaagtgattttcccagctcccacaccgaaaaatattcctcaaggtgccccagtaaaacagaagacagtggctgagctggaagctgaaaaagcagctaccattacacccttcaggaagacaatgtcaacggcttctgcatatacagcaggtctcacagggatactgggtttgggcattgcggctcccaatctagccttttctcagatggtgaccacttttggcttggctggcattgtggggtatcataccgtctggggagtgacccctgctctccactcaccactgatgtctgtgacaaatgcaatctcagggctgactgcagttggtgggttggcactgatgggaggacatttgtatccttccacaacttctcagggccttgctgctcttgctgcattcatatcctctgtcaacattgcaggtggctttctggtgactcagagaatgctggacatgttcaagcgtcccactgaccccccagaatacaactacctgtacctgctccctgccggcacctttgttggtggatatttagctgccctctacagtggttataacattgaacagatcatgtacctaggctcgggtttgtgctgtgtcggtgccttggctggcctctccacccagggaacagcacgtcttggcaatgcactgggcatgattggggttgctggaggactggcagccaccctcggagtcctaaaaccgggcccagaattactagctcagatgtctggagcgatggctttgggtggtaccattggattgacaattgccaaacgcatccagatttctgatttacctcaattagttgctgcttttcacagtttagtgggtttggcagctgtacttacttgcatagctgagtacattatagaatatccacattttgctacggatgcagcagcaaatctcaccaagattgtggcctacctcggcacttacattggtggcgtcacctttagtgggtctctcattgcctatggaaaattgcagggtctcctgaaatctgcccctctcctactgcctggaaggcacttactcaatgcaggcttactggctgctagtgtgggcgggataatcccattcatggtggacccaagctttactactggcatcacctgtctgggttcagtgtctgctctctctgctgtcatgggtgtgactttgacagctgctattgggggtgctgacatgcccgtcgttatcactgtgctgaacagctactcaggctgggccctgtgtgcagagggcttcctgctcaacaacaatctgctgaccatcgtgggtgcactcataggctcgtctggtgctatcctgtcatacatcatgtgtgtggcaatgaatcgctccctggctaatgtgattcttggaggctatggcaccacttcaacagctggtggaaaacccatggaaatttctggcacacatacggaaatcaaccttgacaatgcaattgacatgattcgagaagctaatagcattattattacaccaggctatggtctctgtgcagccaaagctcaataccccattgctgatttggtaaagatgctcactgagcaaggcaaaaaagtcaggtttggaattcacccagttgcaggccgaatgcctggtcagcttaatgtgctgctggctgaggctggtgtgccatatgacattgtgttggaaatggatgagatcaaccatgattttccagatactgatttggtccttgtaattggagctaatgacactgttaattcagcagctcaagaagatcccaactctattattgcaggcatgccagtccttgaggtctggaaatcaaagcaggtgattgttatgaagaggtctttgggtgttggctatgctgcagtggacaatccaatcttctacaaacctaacacggccatgcttctaggtgatgccaagaaaacatgtgacgcgctccaggcgaaagttagagaatcctatcagaagtaaatattaaggatcaagctgttagctaataatgccacctctgcagttttgggaacaggcaaataaagtatcagtatacatggtgatgtacatctgtagcaaagctcttggagaaaatgaagactgaagaaagcaaagcaaaaactgtatagagagatttttcaaaagcagtaatccctcaattttaaaaaaggattgaaaattctaaatgtctttctgtgcatattttttgtgttaggaatcaaaagtattttataaaaggagaaagaacagcctcattttagatgtagtcctgttggattttttatgcctcctcagtaaccagaaatgttttaaaaaactaagtgtttaggatttcaagacaacattatacatggctctgaaatatctgacacaatgtaaacattgcaggcacctgcattttatgttttttttttcaacaaatgtgactaatttgaaacttttatgaacttctgagctgtccccttgcaattcaaccgcagtttgaattaatcatatcaaatcagttttaattttttaaattgtacttcagagtctatatttcaagggcacattttctcactactattttaatacattaaaggactaaataatctttcagagatgctggaaacaaatcatttgctttatatgtttcattagaataccaatgaaacatacaacttgaaaattagtaatagtatttttgaagatcccatttctaattggagatctctttaatttcgatcaacttataatgtgtagtactatattaagtgcacttgagtggaattcaacatttgactaataaaatgagttcatcatgttggcaagtgatgtggcaattatctctggtgacaaaagagtaaaatcaaatatttctgcctgttacaaatatcaaggaagacctgctactatgaaatagatgacattaatctgtcttcactgtttataatacggatggattttttttcaaatcagtgtgtgttttgaggtcttatgtaattgatgacatttgagagaaatggtggctttttttagctacctctttgttcatttaagcaccagtaaagatcatgtctttttatagagaagtgtagattttctttgtgactttgctatcgtgcctaaagctctaaatataggtgaatgtgtgatgaatactcagattatttgtctctctatataattagtttggtactaagtttctcaaaaaattattaacacatgaaagacaatctctaaaccagaaaaagaagtagtacaaattttgttactgtaatgctcgcgtttagtgagtttaaaacacacagtatcttttggttttataatcagtttctattttgctgtgcctgagattaagatctgtgtatgtgtgtgtgtgtgtgtgtgcgtttgtgtgttaaagcagaaaagacttttttaaaagttttaagtgataaatgcaatttgttaattgatcttagatcactagtaaactcagggctgaattataccatgtatattctattagaagaaagtaaacaccatctttattcctgccctttttcttctctcaaagtagttgtagttatatctagaaagaagcaattttgatttcttgaaaaggtagttcctgcactcagtttaaactaaaaataatcatacttggattttatttatttttgtcatagtaaaaattttaatttatatatatttttatttagtattatcttattctttgctatttgccaatcctttgtcatcaattgtgttaaatgaattgaaaattcatgccctgttcattttattttactttattggttaggatatttaaaggatttttgtatatataatttcttaaattaatattccaaaaggttagtggacttagattataaattatggcaaaaatctaaaaacaacaaaaatgatttttatacattctatttcattattcctctttttccaataagtcatacaattggtagatatgacttattttatttttgtattattcactatatctttatgatatttaagtataaataattaaaaaaatttattgtaccttatagtctgtcaccaaaaaaaaaaaattatctgtaggtagtgaaatgctaatgttgatttgtctttaagggcttgttaactatcctttattttctcatttgtcttaaattaggagtttgtgtttaaattactcatctaagcaaaaaatgtatataaatcccattactgggtatatacccaaaggattataaatcatgctgctataaagacacatgcacacgtatgtttattgcagcactattcacaatagcaaagacttggaaccaacccaaatgtccatcaatgatagacttgattaagaaaatggtgcagcacaccaacatggcacatgtatacatatgtagcaaacctgcacgttgtgcacatgtaccctagaacttaaagtataattaaaaaaaaaaagaaaacagaagctatttataaagaagttatttgctgaaataaatgtgatctttcccattaaaaaaataaagaaattttggggtaaaaaaacacaatatattgt

SEQ ID NO: 53020 - DNA, 5587 bp, Homo sapiens
  misc_feature (5587)..(5587): n is a, c, g, or t
gtatccccatttgttggagtctgggtcaagtaaggaggttttttgggttcaatggtggcaggtccctcatgaatggctgggttctgtccctggtggtaatgaggtgagtttcttattccagttagctcatgttagagctggttttgaaaagagtctagtgtctttctcacctgttctcgttgctccctttgtggccatgtgatatgcctgctcctcctcttcgccttcgcaccatgattgtaagcttctgttttctgtgtctgtgcggtctgtctgtgtgtttttgagatagagtatcactctgttgcccaggctggagtacagtggtgtgatctcagctcacagcaacctctgcctcccaagttccaagtgatcctcttgcctcagcctcctgagtagcagggactccagacacatgccaccatgcccagctaatttttgtatttttagtagagatggggtttcaccatgttggccagcctggtctcgaactcctgacctcaaatgatccatctgtctccgcctcccgaagtgctggcattacaggcatgagccaccgcacgcggccaattgtaaacttcttgaggttgtcaccagaagcagatgctggcatcatgcttcttgtacagcctagaaaggcctgtctgtctagattcttcttggcatctctgagcatggatttcattctggatatggggcaggatgctctctggaatgagggtctttagacctgtttctttgttctgatgggaccccagagaggacatcacgctttgtaactggttcttcaaggggagaagcaaatgtgtccctgaaaacttcagctgccgcgtttggcaccagtgatttgccttcaaggaaactggggagtcagaaaattgggaactcatatcaacatggcaaacctattgaaaacagtggtgactggctgctcgtgtcctctacttagcaatttggggtcctgtaagggtctacgtgtgaagaaggattttttacgaacattttatactcaccaagaactgtggtgtaaagcgcctgtaaaaccaggaattccatataagcaactgactgttggagtccccaaagagatattccaaaatgagaagcgagtggcattgtctcctgctggtgttcagaacttggtcaagcagggttttaatgttgtcgtggaatcgggtgcgggcgaagcttccaagttctcagatgatcactatagagtggcaggtgcccaaatccaaggggcaaaggaagtgctggcttctgatttggtggtcaaagtgcgagcccctatggttaatccaacattaggtgttcatgaagctgaccttttaaagacatcaggaacgctgattagttttatttacccagcccaaaatccagagttgctaaataaactttcccaaagaaaaactacagttctggcaatggaccaggttccaagagtcacaattgctcagggatatgatgcgctaagctccatggccaacattgcgggttataaggctgttgtcctagcagcaaatcattttggacgtttttttactggtcagatcacagctgctggaaaagttcctccagctaagattctgatagttggtggtggtgttgctgggcttgcttctgcaggcgcagcaaagtcgatgggtgcaattgttcgaggatttgacacaagagctgcagctttggaacagttcaagtctcttggtgctgagcccttggaggtggacttgaaggaatctggtgagggacaaggaggatatgcaaaagagatgtccaaagagttcattgaagctgaaatgaaactctttgctcaacaatgcaaggaggtagacatccttatcagcacagcacttattccaggtaaaaaagctccagttttatttaataaagaaatgattgagtcaatgaaggaaggttcagttgttgtggatttagctgctgaggctggtggaaactttgaaaccactaagccaggagaactctacattcataagggaattactcacataggctacacagacctgcccagccgaatggccactcaggccagcaccctatattccaacaacatcaccaaactcctgaaggccatcagcccggacaaagataatttttattttgatgtgaaagatgactttgactttggtacgatgggtcatgtcattagaggaactgtagtgatgaaagatggtaaagtgattttcccagctcccacaccgaaaaatattcctcaaggtgccccagtaaaacagaagacagtggctgagctggaagctgaaaaagcagctaccattacacccttcaggaagacaatgtcaacggcttctgcatatacagcaggtctcacagggatactgggtttgggcattgcggctcccaatctagccttttctcagatggtgaccacttttggcttggctggcattgtggggtatcataccgtctggggagtgacccctgctctccactcaccactgatgtctgtgacaaatgcaatctcagggctgactgcagttggtgggttggcactgatgggaggacatttgtatccttccacaacttctcagggccttgctgctcttgctgcattcatatcctctgtcaacattgcaggtggctttctggtgactcagagaatgctggacatgttcaagcgtcccactgaccccccagaatacaactacctgtacctgctccctgccggcacctttgttggtggatatttagctgccctctacagtggttataacattgaacagatcatgtacctaggctcgggtttgtgctgtgtcggtgccttggctggcctctccacccagggaacagcacgtcttggcaatgcactgggcatgattggggttgctggaggactggcagccaccctcggagtcctaaaaccgggcccagaattactagctcagatgtctggagcgatggctttgggtggtaccattggattgacaattgccaaacgcatccagatttctgatttacctcaattagttgctgcttttcacagtttagtgggtttggcagctgtacttacttgcatagctgagtacattatagaatatccacattttgctacggatgcagcagcaaatctcaccaagattgtggcctacctcggcacttacattggtggcgtcacctttagtgggtctctcattgcctatggaaaattgcagggtctcctgaaatctgcccctctcctactgcctggaaggcacttactcaatgcaggcttactggctgctagtgtgggcgggataatcccattcatggtggacccaagctttactactggcatcacctgtctgggttcagtgtctgctctctctgctgtcatgggtgtgactttgacagctgctattgggggtgctgacatgcccgtcgttatcactgtgctgaacagctactcaggctgggccctgtgtgcagagggcttcctgctcaacaacaatctgctgaccatcgtgggtgcactcataggctcgtctggtgctatcctgtcatacatcatgtgtgtggcaatgaatcgctccctggctaatgtgattcttggaggctatggcaccacttcaacagctggtggaaaacccatggaaatttctggcacacatacggaaatcaaccttgacaatgcaattgacatgattcgagaagctaatagcattattattacaccaggctatggtctctgtgcagccaaagctcaataccccattgctgatttggtaaagatgctcactgagcaaggcaaaaaagtcaggtttggaattcacccagttgcaggccgaatgcctggtcagcttaatgtgctgctggctgaggctggtgtgccatatgacattgtgttggaaatggatgagatcaaccatgattttccagatactgatttggtccttgtaattggagctaatgacactgttaattcagcagctcaagaagatcccaactctattattgcaggcatgccagtccttgaggtctggaaatcaaagcaggtgattgttatgaagaggtctttgggtgttggctatgctgcagtggacaatccaatcttctacaaacctaacacggccatgcttctaggtgatgccaagaaaacatgtgacgcgctccaggcgaaagttagagaatcctatcagaagtaaatattaaggatcaagctgttagctaataatgccacctctgcagttttgggaacaggcaaataaagtatcagtatacatggtgatgtacatctgtagcaaagctcttggagaaaatgaagactgaagaaagcaaagcaaaaactgtatagagagatttttcaaaagcagtaatccctcaattttaaaaaaggattgaaaattctaaatgtctttctgtgcatattttttgtgttaggaatcaaaagtattttataaaaggagaaagaacagcctcattttagatgtagtcctgttggattttttatgcctcctcagtaaccagaaatgttttaaaaaactaagtgtttaggatttcaagacaacattatacatggctctgaaatatctgacacaatgtaaacattgcaggcacctgcattttatgttttttttttcaacaaatgtgactaatttgaaacttttatgaacttctgagctgtccccttgcaattcaaccgcagtttgaattaatcatatcaaatcagttttaattttttaaattgtacttcagagtctatatttcaagggcacattttctcactactattttaatacattaaaggactaaataatctttcagagatgctggaaacaaatcatttgctttatatgtttcattagaataccaatgaaacatacaacttgaaaattagtaatagtatttttgaagatcccatttctaattggagatctctttaatttcgatcaacttataatgtgtagtactatattaagtgcacttgagtggaattcaacatttgactaataaaatgagttcatcatgttggcaagtgatgtggcaattatctctggtgacaaaagagtaaaatcaaatatttctgcctgttacaaatatcaaggaagacctgctactatgaaatagatgacattaatctgtcttcactgtttataatacggatggattttttttcaaatcagtgtgtgttttgaggtcttatgtaattgatgacatttgagagaaatggtggctttttttagctacctctttgttcatttaagcaccagtaaagatcatgtctttttatagagaagtgtagattttctttgtgactttgctatcgtgcctaaagctctaaatataggtgaatgtgtgatgaatactcagattatttgtctctctatataattagtttggtactaagtttctcaaaaaattattaacacatgaaagacaatctctaaaccagaaaaagaagtagtacaaattttgttactgtaatgctcgcgtttagtgagtttaaaacacacagtatcttttggttttataatcagtttctattttgctgtgcctgagattaagatctgtgtatgtgtgtgtgtgtgtgtgtgcgtttgtgtgttgcaggacttttttctcagggctgttatcn

SEQ ID NO: 53021 - DNA, 5025 bp, Homo sapiens
gtatccccatttgttggagtctgggtcaagtaaggaggttttttgggttcaatggtggcaggtccctcatgaatggctgggttctgtccctggtggtaatgaggtgagtttcttattccagttagctcatgttagagctggttttgaaaagagtctagtgtctttctcacctgttctcgttgctccctttgtggccatgtgatatgcctgctcctcctcttcgccttcgcaccatgattgtaagcttctgttttctgtgtctgtgcggtctgtctgtgtgtttttgagatagagtatcactctgttgcccaggctggagtacagtggtgtgatctcagctcacagcaacctctgcctcccaagttccaagtgatcctcttgcctcagcctcctgagtagcagggactccagacacatgccaccatgcccagctaatttttgtatttttagtagagatggggtttcaccatgttggccagcctggtctcgaactcctgacctcaaatgatccatctgtctccgcctcccgaagtgctggcattacaggcatgagccaccgcacgcggccaattgtaaacttcttgaggttgtcaccagaagcagatgctggcatcatgcttcttgtacagcctagaaaggcctgtctgtctagattcttcttggcatctctgagcatggatttcattctggatatggggcaggatgctctctggaatgagggtctttagacctgtttctttgttctgatgggaccccagagaggacatcacgctttgtaactggttcttcaaggggagaagcaaatgtgtccctgaaaacttcagctgccgcgtttggcaccagtgatttgccttcaaggaaactggggagtcagaaaattgggaactcatatcaacatggcaaacctattgaaaacagtggtgactggctgctcgtgtcctctacttagcaatttggggtcctgtaagggtctacgtgtgaagaaggattttttacgaacattttatactcaccaagaactgtggtgtaaagcgcctgtaaaaccaggaattccatataagcaactgactgttggagtccccaaagagatattccaaaatgagaagcgagtggcattgtctcctgctggtgttcagaacttggtcaagcagggttttaatgttgtcgtggaatcgggtgcgggcgaagcttccaagttctcagatgatcactatagagtggcaggtgcccaaatccaaggggcaaaggaagtgctggcttctgatttggtggtcaaagtgcgagcccctatggttaatccaacattaggtgttcatgaagctgaccttttaaagacatcaggaacgctgattagttttatttacccagcccaaaatccagagttgctaaataaactttcccaaagaaaaactacagttctggcaatggaccaggttccaagagtcacaattgctcagggatatgatgcgctaagctccatggccaacattgcgggttataaggctgttgtcctagcagcaaatcattttggacgtttttttactggtcagatcacagctgctggaaaagttcctccagctaagattctgatagttggtggtggtgttgctgggcttgcttctgcaggcgcagcaaagtcgatgggtgcaattgttcgaggatttgacacaagagctgcagctttggaacagttcaagtctcttggtgctgagcccttggaggtggacttgaaggaatctggtgagggacaaggaggatatgcaaaagagatgtccaaagagttcattgaagctgaaatgaaactctttgctcaacaatgcaaggaggtagacatccttatcagcacagcacttattccaggtaaaaaagctccagttttatttaataaagaaatgattgagtcaatgaaggaaggttcagttgttgtggatttagctgctgaggctggtggaaactttgaaaccactaagccaggagaactctacattcataagggaattactcacataggctacacagacctgcccagccgaatggccactcaggccagcaccctatattccaacaacatcaccaaactcctgaaggccatcagcccggacaaagataatttttattttgatgtgaaagatgactttgactttggtacgatgggtcatgtcattagaggaactgtagtgatgaaagatggtaaagtgattttcccagctcccacaccgaaaaatattcctcaaggtgccccagtaaaacagaagacagtggctgagctggaagctgaaaaagcagctaccattacacccttcaggaagacaatgtcaacggcttctgcatatacagcaggtctcacagggatactgggtttgggcattgcggctcccaatctagccttttctcagatggtgaccacttttggcttggctggcattgtggggtatcataccgtctggggagtgacccctgctctccactcaccactgatgtctgtgacaaatgcaatctcagggctgactgcagttggtgggttggcactgatgggaggacatttgtatccttccacaacttctcagggccttgctgctcttgctgcattcatatcctctgtcaacattgcaggtggctttctggtgactcagagaatgctggacatgttcaagcgtcccactgaccccccagaatacaactacctgtacctgctccctgccggcacctttgttggtggatatttagctgccctctacagtggttataacattgaacagatcatgtacctaggctcgggtttgtgctgtgtcggtgccttggctggcctctccacccagggaacagcacgtcttggcaatgcactgggcatgattggggttgctggaggactggcagccaccctcggagtcctaaaaccgggcccagaattactagctcagatgtctggagcgatggctttgggtggtaccattggattgacaattgccaaacgcatccagatttctgatttacctcaattagttgctgcttttcacagtttagtgggtttggcagctgtacttacttgcatagctgagtacattatagaatatccacattttgctacggatgcagcagcaaatctcaccaagattgtggcctacctcggcacttacattggtggcgtcacctttagtgggtctctcattgcctatggaaaattgcagggtctcctgaaatctgcccctctcctactgcctggaaggcacttactcaatgcaggcttactggctgctagtgtgggcgggataatcccattcatggtggacccaagctttactactggcatcacctgtctgggttcagtgtctgctctctctgctgtcatgggtgtgactttgacagctgctattgggggtgctgacatgcccgtcgttatcactgtgctgaacagctactcaggctgggccctgtgtgcagagggcttcctgctcaacaacaatctgctgaccatcgtgggtgcactcataggctcgtctggtgctatcctgtcatacatcatgtgtgtggcaatgaatcgctccctggctaatgtgattcttggaggctatggcaccacttcaacagctggtggaaaacccatggaaatttctggcacacatacggaaatcaaccttgacaatgcaattgacatgattcgagaagctaatagcattattattacaccaggctatggtctctgtgcagccaaagctcaataccccattgctgatttggtaaagatgctcactgagcaaggcaaaaaagtcaggtttggaattcacccagttgcaggccgaatgcctggtcagcttaatgtgctgctggctgaggctggtgtgccatatgacattgtgttggaaatggatgagatcaaccatgattttccagatactgatttggtccttgtaattggagctaatgacactgttaattcagcagctcaagaagatcccaactctattattgcaggcatgccagtccttgaggtctggaaatcaaagcaggtgattgttatgaagaggtctttgggtgttggctatgctgcagtggacaatccaatcttctacaaacctaacacggccatgcttctaggtgatgccaagaaaacatgtgacgcgctccaggcgaaagttagagaatcctatcagaagtaaatattaaggatcaagctgttagctaataatgccacctctgcagttttgggaacaggcaaataaagtatcagtatacatggtgatgtacatctgtagcaaagctcttggagaaaatgaagactgaagaaagcaaagcaaaaactgtatagagagatttttcaaaagcagtaatccctcaattttaaaaaaggattgaaaattctaaatgtctttctgtgcatattttttgtgttaggaatcaaaagtattttataaaaggagaaagaacagcctcattttagatgtagtcctgttggattttttatgcctcctcagtaaccagaaatgttttaaaaaactaagtgtttaggatttcaagacaacattatacatggctctgaaatatctgacacaatgtaaacattgcaggcacctgcattttatgttttttttttcaacaaatgtgactaatttgaaacttttatgaacttctgagctgtccccttgcaattcaaccgcagtttgaattaatcatatcaaatcagttttaattttttaaattgtacttcagagtctatatttcaagggcacattttctcactactattttaatacattaaaggactaaataatctttcagagatgctggaaacaaatcatttgctttatatgtttcattagaataccaatgaaacatacaacttgaatagttagtttttggggaccctttaggggattttatcggacactataggggcattaaggggggggggacttgggtaaagggtcttgggaaaaaagggggggaatccggcagagaacttaaggaaggataaaaaagggaggagagattagtgtggtgcaaaaattatgtttggtattatacgtc

SEQ ID NO: 53022 - DNA, 2701 bp, Homo sapiens
gagaagagttggagcagtgagtcagaaagaccttagtctgaattccagatttccaatttattgatcatttgccttggagaaaatatgcaacttctttaagctttgattctgtcttttgcaaaatgaggataatgatttttccctcttgtggatctcatgacactgtgacaacacaaataaaacatgtggcaaagcccctggcacttacctcaggggttggctcttttacagcatttggtcaggtttagtatttttagatccagtaatgactccatttaaatttaggtacttttatgtgtatttgtgcatgatagcaaatccagaaaaaatcaatttatataaatggtataagtgcaaatacaatataagtatttaatatgttaatattcctaattggcaggaaaatatattgaaatctctaagctaatagaccaaaggttttaataatctctctctcacttttcctttgaaaagatcatgtacctaggctcgggtttgtgctgtgtcggtgccttggctggcctctccacccagggaacagcacgtcttggcaatgcactgggcatgattggggttgctggaggactggcagccaccctcggagtcctaaaaccgggcccagaattactagctcagatgtctggagcgatggctttgggtggtaccattggattgacaattgccaaacgcatccagatttctgatttacctcaattagttgctgcttttcacagtttagtgggtttggcagctgtacttacttgcatagctgagtacattatagaatatccacattttgctacggatgcagcagcaaatctcaccaagattgtggcctacctcggcacttacattggtggcgtcacctttagtgggtctctcattgcctatggaaaattgcagggtctcctgaaatctgcccctctcctactgcctggaaggcacttactcaatgcaggcttactggctgctagtgtgggcgggataatcccattcatggtggacccaagctttactactggcatcacctgtctgggttcagtgtctgctctctctgctgtcatgggtgtgactttgacagctgctattgggggtgctgacatgcccgtcgttatcactgtgctgaacagctactcaggctgggccctgtgtgcagagggcttcctgctcaacaacaatctgctgaccatcgtgggtgcactcataggctcgtctggtgctatcctgtcatacatcatgtgtgtggcaatgaatcgctccctggctaatgtgattcttggaggctatggcaccacttcaacagctggtggaaaacccatggaaatttctggcacacatacggaaatcaaccttgacaatgcaattgacatgattcgagaagctaatagcattattattacaccaggctatggtctctgtgcagccaaagctcaataccccattgctgatttggtaaagatgctcactgagcaaggcaaaaaagtcaggtttggaattcacccagttgcaggccgaatgcctggtcagcttaatgtgctgctggctgaggctggtgtgccatatgacattgtgttggaaatggatgagatcaaccatgattttccagatactgatttggtccttgtaattggagctaatgacactgttaattcagcagctcaagaagatcccaactctattattgcaggcatgccagtccttgaggtctggaaatcaaagcaggtgattgttatgaagaggtctttgggtgttggctatgctgcagtggacaatccaatcttctacaaacctaacacggccatgcttctaggtgatgccaagaaaacatgtgacgcgctccaggcgaaagttagagaatcctatcagaagtaaatattaaggatcaagctgttagctaataatgccacctctgcagttttgggaacaggcaaataaagtatcagtatacatggtgatgtacatctgtagcaaagctcttggagaaaatgaagactgaagaaagcaaagcaaaaactgtatagagagatttttcaaaagcagtaatccctcaattttaaaaaaggattgaaaattctaaatgtctttctgtgcatattttttgtgttaggaatcaaaagtattttataaaaggagaaagaacagcctcattttagatgtagtcctgttggattttttatgcctcctcagtaaccagaaatgttttaaaaaactaagtgtttaggatttcaagacaacattatacatggctctgaaatatctgacacaatgtaaacattgcaggcacctgcattttatgttttttttttcaacaaatgtgactaatttgaaacttttatgaacttctgagctgtccccttgcaattcaaccgcagtttgaattaatcatatcaaatcagttttaattttttaaattgtacttcagagtctatatttcaagggcacattttctcactactattttaatacattaaaggactaaataatctttcagagatgctggaaacaaatcatttgctttatatgtttcattagaataccaatgaaacatacaacttgaaaattagtaatagtatttttgaagatcccatttctaattggagatctctttaatttcgatcaacttataatgtgtagtactatattaagtgcacttgagtggaattcaacatttgactaataaaatgagttcatcatgttggca

SEQ ID NO: 53023 - DNA, 4677 bp, Homo sapiens
taacaacagtctgagaaggcactttgattgctgtattgcagatgataagcagcttgccgaagatcacccagaactagttagtaacagagtcaggattttgacctaagctctctgactcttactcactgtgtctttttctttactccatgctttagagagaaaaagtaaatttcgatagtaagatctgctgcttttgtgcgattctgcttttttaaattatggtttttttttttttttgttatgtcttgattcaggataacttggccaagtcctgtgacttttacttatttttatttactttttctttctttctttttttctttctttaagtggtgatggagcttctgtgtggaagagtttggtgctttgaagcctagagcctgcttattccctctggtcactctttgccccatttcctatagacttacccctgtccccaaacacagcaccaaacaccccattatcaagatcaattcacatgacctctgagacactgcccagagctcactggagcacagtctgactagcctagtctttgtaaaggcagaaggacatgtggggcatgatggggtggggtgggcaatttgtaagcttcactgattctgtggggtggcattttttttctacaggaacaaagtgttgctttcaattgactgtttatgggatatataacaggactttactctggaaggcccgttccagactggagacaatgttcttactttgtttcttagaaggcgggggtagggggagacttgtttctgaggaattttttggttctcttgttgctgatccttccatgattagggacattagttacattgcttcagacttacggagagttgctcaaaatggttcagaattgtggttgctcatcagctgttcctttcagaagcattttggctgaaaatagaggttggggtagatgtttcaccaatgttgtacccatctttgaaatgtgttttgatgtttgatgaacaaagaaaaaccttataatttgatagggtaaaggtagttagaatgccacactgggacttttagtagaaggaacttttagacagtggaaaagaatctgttaatcttcaacatacgtaatgctgatcatgcttaggtagttttacacggatattctgattattaggctatttttagtgaattgttgttggcctttgctagcagttgtttctttgataaaatttcaagatcagtggtggttcagttaaagaatagtctatgtactccatacagttactaagggctgatcatcattatcaccatctgcaccgccatttattgatgctaaacttatactaggcaccaataattgttagctgatgatttttcattattagttgataatgagccttaacacataactgggtctgtcttctagattctgatagttggtggtggtgttgctgggcttgcttctgcaggcgcagcaaagtcgatgggtgcaattgttcgaggatttgacacaagagctgcagctttggaacagttcaagtctcttggtgctgagcccttggaggtggacttgaaggaatctggtgagggacaaggaggatatgcaaaagagatgtccaaagagttcattgaagctgaaatgaaactctttgctcaacaatgcaaggaggtagacatccttatcagcacagcacttattccaggtaaaaaagctccagttttatttaataaagaaatgattgagtcaatgaaggaaggttcagttgttgtggatttagctgctgaggctggtggaaactttgaaaccactaagccaggagaactctacattcataagggaattactcacataggctacacagacctgcccagccgaatggccactcaggccagcaccctatattccaacaacatcaccaaactcctgaaggccatcagcccggacaaagataatttttattttgatgtgaaagatgactttgactttggtacgatgggtcatgtcattagaggaactgtagtgatgaaagatggtaaagtgattttcccagctcccacaccgaaaaatattcctcaaggtgccccagtaaaacagaagacagtggctgagctggaagctgaaaaagcagctaccattacacccttcaggaagacaatgtcaacggcttctgcatatacagcaggtctcacagggatactgggtttgggcattgcggctcccaatctagccttttctcagatggtgaccacttttggcttggctggcattgtggggtatcataccgtctggggagtgacccctgctctccactcaccactgatgtctgtgacaaatgcaatctcagggctgactgcagttggtgggttggcactgatgggaggacatttgtatccttccacaacttctcagggccttgctgctcttgctgcattcatatcctctgtcaacattgcaggtggctttctggtgactcagagaatgctggacatgttcaagcgtcccactgaccccccagaatacaactacctgtacctgctccctgccggcacctttgttggtggatatttagctgccctctacagtggttataacattgaacagatcatgtacctaggctcgggtttgtgctgtgtcggtgccttggctggcctctccacccagggaacagcacgtcttggcaatgcactgggcatgattggggttgctggaggactggcagccaccctcggagtcctaaaaccgggcccagaattactagctcagatgtctggagcgatggctttgggtggtaccattggattgacaattgccaaacgcatccagatttctgatttacctcaattagttgctgcttttcacagtttagtgggtttggcagctgtacttacttgcatagctgagtacattatagaatatccacattttgctacggatgcagcagcaaatctcaccaagattgtggcctacctcggcacttacattggtggcgtcacctttagtgggtctctcattgcctatggaaaattgcagggtctcctgaaatctgcccctctcctactgcctggaaggcacttactcaatgcaggcttactggctgctagtgtgggcgggataatcccattcatggtggacccaagctttactactggcatcacctgtctgggttcagtgtctgctctctctgctgtcatgggtgtgactttgacagctgctattgggggtgctgacatgcccgtcgttatcactgtgctgaacagctactcaggctgggccctgtgtgcagagggcttcctgctcaacaacaatctgctgaccatcgtgggtgcactcataggctcgtctggtgctatcctgtcatacatcatgtgtgtggcaatgaatcgctccctggctaatgtgattcttggaggctatggcaccacttcaacagctggtggaaaacccatggaaatttctggcacacatacggaaatcaaccttgacaatgcaattgacatgattcgagaagctaatagcattattattacaccaggctatggtctctgtgcagccaaagctcaataccccattgctgatttggtaaagatgctcactgagcaaggcaaaaaagtcagatactgatttggtccttgtaattggagctaatgacactgttaattcagcagctcaagaagatcccaactctattattgcaggcatgccagtccttgaggtctggaaatcaaagcaggtgattgttatgaagaggtctttgggtgttggctatgctgcagtggacaatccaatcttctacaaacctaacacggccatgcttctaggtgatgccaagaaaacatgtgacgcgctccaggcgaaagttagagaatcctatcagaagtaaatattaaggatcaagctgttagctaataatgccacctctgcagttttgggaacaggcaaataaagtatcagtatacatggtgatgtacatctgtagcaaagctcttggagaaaatgaagactgaagaaagcaaagcaaaaactgtatagagagatttttcaaaagcagtaatccctcaattttaaaaaaggattgaaaattctaaatgtctttctgtgcatattttttgtgttaggaatcaaaagtattttataaaaggagaaagaacagcctcattttagatgtagtcctgttggattttttatgcctcctcagtaaccagaaatgttttaaaaaactaagtgtttaggatttcaagacaacattatacatggctctgaaatatctgacacaatgtaaacattgcaggcacctgcattttatgttttttttttcaacaaatgtgactaatttgaaacttttatgaacttctgagctgtccccttgcaattcaaccgcagtttgaattaatcatatcaaatcagttttaattttttaaattgtacttcagagtctatatttcaagggcacattttctcactactattttaatacattaaaggactaaataatctttcagagatgctggaaacaaatcatttgctttatatgtttcattagaataccaatgaaacatacaacttgaaaattagtaatagtatttttgaagatcccatttctaattggagatctctttaatttcgatcaacttataatgtgtagtactatattaagtgcacttgagtggaattcaacatttgactaataaaatgagttcatcatgttggca

SEQ ID NO: 53024 - DNA, 1027 bp, Homo sapiens
ctacctgtattccagcgtgtccagcctttaggctggaatcaaagcagggtgattgttatgaagaggtctttgggtgttggctatgctgcagtggacaatccaatcttctacaaacctaacacggccatgcttctaggtgatgccaagaaaacatgtgacgcgctccaggcgaaagttagagaatcctatcagaagtaaatattaaggatcaagctgttagctaataatgccacctctgcagttttgggaacaggcaaataaagtatcagtatacatggtgatgtacatctgtagcaaagctcttggagaaaatgaagactgaagaaagcaaagcaaaaactgtatagagagatttttcaaaagcagtaatccctcaattttaaaaaaggattgaaaattctaaatgtctttctgtgcatattttttgtgttaggaatcaaaagtattttataaaaggagaaagaacagcctcattttagatgtagtcctgttggattttttatgcctcctcagtaaccagaaatgttttaaaaaactaagtgtttaggatttcaagacaacattatacatggctctgaaatatctgacacaatgtaaacattgcaggcacctgcattttatgttttttttttcaacaaatgtgactaatttgaaacttttatgaacttctgagctgtccccttgcaattcaaccgcagtttgaattaatcatatcaaatcagttttaattttttaaattgtacttcagagtctatatttcaagggcacattttctcactactattttaatacattaaaggactaaataatctttcagagatgctggaaacaaatcatttgctttatatgtttcattagaataccaatgaaacatacaacttgaaaattagtaatagtatttttgaagatcccatttctaattggagatctctttaatttcgatcaacttataatgtgtagtactatattaagtgcacttgagtggaattcaacatttgactaataaaatgagttcatcatgttggca

SEQ ID NO: 53025 - DNA, 941 bp, Homo sapiens
gagagagagagagagagagagagagagagagagagagagagagagagagagagagagagagaaaacatgtgacgcgctccaggcgaaagttagagaatcctatcagaagtaaatattaaggatcaagctgttagctaataatgccacctctgcagttttgggaacaggcaaataaagtatcagtatacatggtgatgtacatctgtagcaaagctcttggagaaaatgaagactgaagaaagcaaagcaaaaactgtatagagagatttttcaaaagcagtaatccctcaattttaaaaaaggattgaaaattctaaatgtctttctgtgcatattttttgtgttaggaatcaaaagtattttataaaaggagaaagaacagcctcattttagatgtagtcctgttggattttttatgcctcctcagtaaccagaaatgttttaaaaaactaagtgtttaggatttcaagacaacattatacatggctctgaaatatctgacacaatgtaaacattgcaggcacctgcattttatgttttttttttcaacaaatgtgactaatttgaaacttttatgaacttctgagctgtccccttgcaattcaaccgcagtttgaattaatcatatcaaatcagttttaattttttaaattgtacttcagagtctatatttcaagggcacattttctcactactattttaatacattaaaggactaaataatctttcagagatgctggaaacaaatcatttgctttatatgtttcattagaataccaatgaaacatacaacttgaaaattagtaatagtatttttgaagatcccatttctaattggagatctctttaatttcgatcaacttataatgtgtagtactatattaagtgcacttgagtggaattcaacatttgactaataaaatgagttcatcatgttggca

SEQ ID NO: 53026 - DNA, 3458 bp, Homo sapiens
taacaacagtctgagaaggcactttgattgctgtattgcagatgataagcagcttgccgaagatcacccagaactagttagtaacagagtcaggattttgacctaagctctctgactcttactcactgtgtctttttctttactccatgctttagagagaaaaagtaaatttcgatagtaagatctgctgcttttgtgcgattctgcttttttaaattatggtttttttttttttttgttatgtcttgattcaggataacttggccaagtcctgtgacttttacttatttttatttactttttctttctttctttttttctttctttaagtggtgatggagcttctgtgtggaagagtttggtgctttgaagcctagagcctgcttattccctctggtcactctttgccccatttcctatagacttacccctgtccccaaacacagcaccaaacaccccattatcaagatcaattcacatgacctctgagacactgcccagagctcactggagcacagtctgactagcctagtctttgtaaaggcagaaggacatgtggggcatgatggggtggggtgggcaatttgtaagcttcactgattctgtggggtggcattttttttctacaggaacaaagtgttgctttcaattgactgtttatgggatatataacaggactttactctggaaggcccgttccagactggagacaatgttcttactttgtttcttagaaggcgggggtagggggagacttgtttctgaggaattttttggttctcttgttgctgatccttccatgattagggacattagttacattgcttcagacttacggagagttgctcaaaatggttcagaattgtggttgctcatcagctgttcctttcagaagcattttggctgaaaatagaggttggggtagatgtttcaccaatgttgtacccatctttgaaatgtgttttgatgtttgatgaacaaagaaaaaccttataatttgatagggtaaaggtagttagaatgccacactgggacttttagtagaaggaacttttagacagtggaaaagaatctgttaatcttcaacatacgtaatgctgatcatgcttaggtagttttacacggatattctgattattaggctatttttagtgaattgttgttggcctttgctagcagttgtttctttgataaaatttcaagatcagtggtggttcagttaaagaatagtctatgtactccatacagttactaagggctgatcatcattatcaccatctgcaccgccatttattgatgctaaacttatactaggcaccaataattgttagctgatgatttttcattattagttgataatgagccttaacacataactgggtctgtcttctagattctgatagttggtggtggtgttgctgggcttgcttctgcaggcgcagcaaagtcgatgggtgcaattgttcgaggatttgacacaagagctgcagctttggaacagttcaagtctcttggtgctgagcccttggaggtggacttgaaggaatctggtgagggacaaggaggatatgcaaaagagatgtccaaagagttcattgaagctgaaatgaaactctttgctcaacaatgcaaggaggtagacatccttatcagcacagcacttattccaggtaaaaaagctccagttttatttaataaagaaatgattgagtcaatgaaggaaggttcagttgttgtggatttagctgctgaggctggtggaaactttgaaaccactaagccaggagaactctacattcataagggaattactcacataggctacacagacctgcccagccgaatggccactcaggccagcaccctatattccaacaacatcaccaaactcctgaaggccatcagcccggacaaagataatttttattttgatgtgaaagatgactttgactttggtacgatgggtcatgtcattagaggaactgtagtgatgaaagatggtaaagtgattttcccagctcccacaccgaaaaatattcctcaaggtgccccagtaaaacagaagacagtggctgagctggaagctgaaaaagcagctaccattacacccttcaggaagacaatgtcaacggcttctgcatatacagcaggtctcacagggatactgggtttgggcattgcggctcccaatctagccttttctcagatggtgaccacttttggcttggctggcattgtggggtatcataccgtctggggagtgacccctgctctccactcaccactgatgtctgtgacaaatgcaatctcagggctgactgcagttggtgggttggcactgatgggaggacatttgtatccttccacaacttctcagggccttgctgctcttgctgcattcatatcctctgtcaacattgcaggtggctttctggtgactcagagaatgctggacatgttcaagcgtcccactgaccccccagaatacaactacctgtacctgctccctgccggcacctttgttggtggatatttagctgccctctacagtggttataacattgaacagatcatgtacctaggctcgggtttgtgctgtgtcggtgccttggctggcctctccacccagggaacagcacgtcttggcaatgcactgggcatgattggggttgctggaggactggcagccaccctcggagtcctattggtaagcacttgtgggcttctgccttcatgtgaactccagtttctcaatatatatttctaaggtccatattgatgaaataattaaattttgttcatggaagttgcttcagttaatattattttggtgaaaattcattccagttggtgtaattctcattcaaatacattttagaacactgaataaatgcatcaactgagtcaaaatatcctatactcaattcttatcttcctttactgactgtgtcccgttagctgataatggaatgggggattggaatccttatgtatgtactatacataagctaacttttgttctgctgggtataaataacagccaaagattctgcttcatagacctgttaaaaatgaaaaaaaaaaaaaaaaacatgtgccagcagaaaaactactgttttaattttattcagttgtttgctggattgttaaattttcaggaatttttaggctgggcatggtggctcagactgtaatcccagcactttgggaggctgatgtgggtggatcacttgaggccaggagtttgaaactggcctggccaacatggtgaaaccccgtcgctattaaatatacaaaaattagttgggcatggtggcgtacaactgtaatcccagcttcttgggtggctgaagcatgataatcgcttgaacctgggatgtggaggttgcagtgagctgtgatcatgctgctgcactccagcctgggtgacaaagcgagactctgtctcaaaaaaaaaa

SEQ ID NO: 53027 - DNA, 2305 bp, Homo sapiens
taacaacagtctgagaaggcactttgattgctgtattgcagatgataagcagcttgccgaagatcacccagaactagttagtaacagagtcaggattttgacctaagctctctgactcttactcactgtgtctttttctttactccatgctttagagagaaaaagtaaatttcgatagtaagatctgctgcttttgtgcgattctgcttttttaaattatggtttttttttttttttgttatgtcttgattcaggataacttggccaagtcctgtgacttttacttatttttatttactttttctttctttctttttttctttctttaagtggtgatggagcttctgtgtggaagagtttggtgctttgaagcctagagcctgcttattccctctggtcactctttgccccatttcctatagacttacccctgtccccaaacacagcaccaaacaccccattatcaagatcaattcacatgacctctgagacactgcccagagctcactggagcacagtctgactagcctagtctttgtaaaggcagaaggacatgtggggcatgatggggtggggtgggcaatttgtaagcttcactgattctgtggggtggcattttttttctacaggaacaaagtgttgctttcaattgactgtttatgggatatataacaggactttactctggaaggcccgttccagactggagacaatgttcttactttgtttcttagaaggcgggggtagggggagacttgtttctgaggaattttttggttctcttgttgctgatccttccatgattagggacattagttacattgcttcagacttacggagagttgctcaaaatggttcagaattgtggttgctcatcagctgttcctttcagaagcattttggctgaaaatagaggttggggtagatgtttcaccaatgttgtacccatctttgaaatgtgttttgatgtttgatgaacaaagaaaaaccttataatttgatagggtaaaggtagttagaatgccacactgggacttttagtagaaggaacttttagacagtggaaaagaatctgttaatcttcaacatacgtaatgctgatcatgcttaggtagttttacacggatattctgattattaggctatttttagtgaattgttgttggcctttgctagcagttgtttctttgataaaatttcaagatcagtggtggttcagttaaagaatagtctatgtactccatacagttactaagggctgatcatcattatcaccatctgcaccgccatttattgatgctaaacttatactaggcaccaataattgttagctgatgatttttcattattagttgataatgagccttaacacataactgggtctgtcttctagattctgatagttggtggtggtgttgctgggcttgcttctgcaggcgcagcaaagtcgatgggtgcaattgttcgaggatttgacacaagagctgcagctttggaacagttcaagtctcttggtgctgagcccttggaggtggacttgaaggaatctggtgagggacaaggaggatatgcaaaagagatgtccaaagagttcattgaagctgaaatgaaactctttgctcaacaatgcaaggaggtagacatccttatcagcacagcacttattccaggtaaaaaagctccagttttatttaataaagaaatgattgagtcaatgaaggaaggttcagttgttgtggatttagctgctgaggctggtggaaactttgaaaccactaagccaggagaactctacattcataagggaattactcacataggctacacagacctgcccagccgaatggccactcaggccagcaccctatattccaacaacatcaccaaactcctgaaggccatcagcccggacaaagataatttttattttgatgtgaaagatgactttgactttggtacgatgggtcatgtcattagaggaactgtagtgatgaaagatggtaaagtgattttcccagctcccacaccgaaaaatattcctcaaggtgccccagtaaaacagaagacagtggctgagctggaagctgaaaaagcagctaccattacacccttcaggaagacaatgtcaacggcttctgcatatacagcaggtgaggataccatttaccagggtttagtcttgattgtttgattttgcaagttatatatatatatatctatagatatatgtgtagctatatatacgtatatatagatatatatacacatatatatctacacatctatctatctatctctctctctc

SEQ ID NO: 53028 - DNA, 708 bp, Homo sapiens
ttccatttctacacttcacacccacaaccttgttaatttggccactttttttttcaacaaatgtgactaatttgaaacttttatgaacttctgagctgtccccttgcaattcaaccgcagtttgaattaatcatatcaaatcagttttaattttttaaattgtacttcagagtctatatttcaagggcacattttctcactactattttaatacattaaaggactaaataatctttcagagatgctggaaacaaatcatttgctttatatgtttcattagaataccaatgaaacatacaacttgaaaattagtaatagtatttttgaagatcccatttctaattggagatctctttaatttcgatcaacttataatgtgtagtactatattaagtgcacttgagtggaattcaacatttgactaataaaatgagttcatcatgttggcaagtgatgtggcaattatctctggtgacaaaagagtaaaatcaaatatttctgcctgttacaaatatcaaggaagacctgctactatgaaatagatgacattaatctgtcttcactgtttataatacggatggattttttttcaaatcagtgtgtgttttgaggtcttatgtaattgatgacatttgagagaaatggtggctttttttagctacctctttgttcatttaagcaccagtaaagatcatgtctttttataga

SEQ ID NO: 53029 - DNA, 1425 bp, Homo sapiens
gagaagagttggagcagtgagtcagaaagaccttagtctgaattccagatttccaatttattgatcatttgccttggagaaaatatgcaacttctttaagctttgattctgtcttttgcaaaatgaggataatgatttttccctcttgtggatctcatgacactgtgacaacacaaataaaacatgtggcaaagcccctggcacttacctcaggggttggctcttttacagcatttggtcaggtttagtatttttagatccagtaatgactccatttaaatttaggtacttttatgtgtatttgtgcatgatagcaaatccagaaaaaatcaatttatataaatggtataagtgcaaatacaatataagtatttaatatgttaatattcctaattggcaggaaaatatattgaaatctctaagctaatagaccaaaggttttaataatctctctctcacttttcctttgaaaagatcatgtacctaggctcgggtttgtgctgtgtcggtgccttggctggcctctccacccagggaacagcacgtcttggcaatgcactgggcatgattggggttgctggaggactggcagccaccctcggagtcctaaaaccgggcccagaattactagctcagatgtctggagcgatggctttgggtggtaccattgattggtaagcacttgtgggcttctgccttcatgtgaactccagtttctcaatatatatttctaaggtccatattgatgaaataattaaattttgttcatggaagttgcttcagttaatattattttggtgaaaattcattccagttggtgtaattctcattcaaatacattttagaacactgaataaatgcatcaactgagtcaaaatatcctatactcaattcttatcttcctttactgactgtgtcccgttagctgataatggaatgggggattggaatccttatgtatgtactatacataagctaacttttgttctgctgggtataaataacagccaaagattctgcttcatagacctgttaaaaatgaaaaaaaaaaaaaaaaacatgtgccagcagaaaaactactgttttaattttattcagttgtttgctggattgttaaattttcaggaatttttaggctgggcatggtggctcagactgtaatcccagcactttgggaggctgatgtgggtggatcacttgaggccaggagtttgaaactggcctggccaacatggtgaaaccccgtcgctattaaatatacaaaaattagttgggcatggtggcgtacaactgtaatcccagcttcttgggtggctgaagcatgataatcgcttgaacctgggatgtggaggttgcagtgagctgtgatcatgctgctgcactccagcctgggtgacaaagcgagactctgtctcaaaaaaaaaa

SEQ ID NO: 53030 - DNA, 1107 bp, Homo sapiens
aacggagggggggggggtggttaacaaacttttaagttaataaagcattgtatgatctagtcctagaatcaggctgatatcctttattataaaagtaccctttattctgcctttctcttcaagagtgagttaattaaaaaacattttttcttgaaaaggtagttcctgcactcagtttaaactaaaaataatcatacttggattttatttatttttgtcatagtaaaaattttaatttatatatatttttatttagtattatcttattctttgctatttgccaatcctttgtcatcaattgtgttaaatgaattgaaaattcatgccctgttcattttattttactttattggttaggatatttaaaggatttttgtatatataatttcttaaattaatattccaaaaggttagtggacttagattataaattatggcaaaaatctaaaaacaacaaaaatgatttttatacattctatttcattattcctctttttccaataagtcatacaattggtagatatgacttattttatttttgtattattcactatatctttatgatatttaagtataaataattaaaaaaatttattgtaccttatagtctgtcaccaaaaaaaaaaaattatctgtaggtagtgaaatgctaatgttgatttgtctttaagggcttgttaactatcctttattttctcatttgtcttaaattaggagtttgtgtttaaattactcatctaagcaaaaaatgtatataaatcccattactgggtatatacccaaaggattataaatcatgctgctataaagacacatgcacacgtatgtttattgcagcactattcacaatagcaaagacttggaaccaacccaaatgtccatcaatgatagacttgattaagaaaatggtgcagcacaccaacatggcacatgtatacatatgtagcaaacctgcacgttgtgcacatgtaccctagaacttaaagtataattaaaaaaaaaaagaaaacagaagctatttataaagaagttatttgctgaaataaatgtgatctttcccattaaaaaaataaagaaattttggggtaaaaaaacacaatatattgt

SEQ ID NO: 53031 - DNA, 167 bp, Homo sapiens
tttatgttattaattttgagttctgatttgattgttgttctagggtgtgactttgacagctgctattgggggtgctgacatgcccgtcgttatcactgtgctgaacagctactcaggctgggccctgtgtgcagagggcttcctgctcaacaacaatctgctgacca

SEQ ID NO: 53032 - DNA, 5700 bp, Homo sapiens
gtatccccatttgttggagtctgggtcaagtaaggaggttttttgggttcaatggtggcaggtccctcatgaatggctgggttctgtccctggtggtaatgaggtgagtttcttattccagttagctcatgttagagctggttttgaaaagagtctagtgtctttctcacctgttctcgttgctccctttgtggccatgtgatatgcctgctcctcctcttcgccttcgcaccatgattgtaagcttctgttttctgtgtctgtgcggtctgtctgtgtgtttttgagatagagtatcactctgttgcccaggctggagtacagtggtgtgatctcagctcacagcaacctctgcctcccaagttccaagtgatcctcttgcctcagcctcctgagtagcagggactccagacacatgccaccatgcccagctaatttttgtatttttagtagagatggggtttcaccatgttggccagcctggtctcgaactcctgacctcaaatgatccatctgtctccgcctcccgaagtgctggcattacaggcatgagccaccgcacgcggccaattgtaaacttcttgaggttgtcaccagaagcagatgctggcatcatgcttcttgtacagcctagaaaggcctgtctgtctagattcttcttggcatctctgagcatggatttcattctggatatggggcaggatgctctctggaatgagggtctttagacctgtttctttgttctgatgggaccccagagaggacatcacgctttgtaactggttcttcaaggggagaagcaaatgtgtccctgaaaacttcagctgccgcgtttggcaccagtgatttgccttcaaggaaactggggagtcagaaaattgggaactcatatcaacatggcaaacctattgaaaacagtggtgactggctgctcgtgtcctctacttagcaatttggggtcctgtaagggtctacgtgtgaagaaggattttttacgaacattttatactcaccaagaactgtggtgtaaagcgcctgtaaaaccaggaattccatataagcaactgactgttggagtccccaaagagatattccaaaatgagaagcgagtggcattgtctcctgctggtgttcagaacttggtcaagcagggttttaatgttgtcgtggaatcgggtgcgggcgaagcttccaagttctcagatgatcactatagagtggcaggtgcccaaatccaaggggcaaaggaagtgctggcttctgatttggtggtcaaagtgcgagcccctatggttaatccaacattaggtgttcatgaagctgaccttttaaagacatcaggaacgctgattagttttatttacccagcccaaaatccagagttgctaaataaactttcccaaagaaaaactacagttctggcaatggaccaggttccaagagtcacaattgctcagggatatgatgcgctaagctccatggccaacattgcgggttataaggctgttgtcctagcagcaaatcattttggacgtttttttactggtcagatcacagctgctggaaaagttcctccagctaagattctgatagttggtggtggtgttgctgggcttgcttctgcaggcgcagcaaagtcgatgggtgcaattgttcgaggatttgacacaagagctgcagctttggaacagttcaagtctcttggtgctgagcccttggaggtggacttgaaggaatctggtgagggacaaggaggatatgcaaaagagatgtccaaagagttcattgaagctgaaatgaaactctttgctcaacaatgcaaggaggtagacatccttatcagcacagcacttattccaggtaaaaaagctccagttttatttaataaagaaatgattgagtcaatgaaggaaggttcagttgttgtggatttagctgctgaggctggtggaaactttgaaaccactaagccaggagaactctacattcataagggaattactcacataggctacacagacctgcccagccgaatggccactcaggccagcaccctatattccaacaacatcaccaaactcctgaaggccatcagcccggacaaagataatttttattttgatgtgaaagatgactttgactttggtacgatgggtcatgtcattagaggaactgtagtgatgaaagatggtaaagtgattttcccagctcccacaccgaaaaatattcctcaaggtgccccagtaaaacagaagacagtggctgagctggaagctgaaaaagcagctaccattacacccttcaggaagacaatgtcaacggcttctgcatatacagcaggtctcacagggatactgggtttgggcattgcggctcccaatctagccttttctcagatggtgaccacttttggcttggctggcattgtggggtatcataccgtctggggagtgacccctgctctccactcaccactgatgtctgtgacaaatgcaatctcagggctgactgcagttggtgggttggcactgatgggaggacatttgtatccttccacaacttctcagggccttgctgctcttgctgcattcatatcctctgtcaacattgcaggtggctttctggtgactcagagaatgctggacatgttcaagcgtcccactgaccccccagaatacaactacctgtacctgctccctgccggcacctttgttggtggatatttagctgccctctacagtggttataacattgaacagatcatgtacctaggctcgggtttgtgctgtgtcggtgccttggctggcctctccacccagggaacagcacgtcttggcaatgcactgggcatgattggggttgctggaggactggcagccaccctcggagtcctaaaaccgggcccagaattactagctcagatgtctggagcgatggctttgggtggtaccattggattgacaattgccaaacgcatccagatttctgatttacctcaattagttgctgcttttcacagtttagtgggtttggcagctgtacttacttgcatagctgagtacattatagaatatccacattttgctacggatgcagcagcaaatctcaccaagattgtggcctacctcggcacttacattggtggcgtcacctttagtgggtctctcattgcctatggaaaattgcagggtctcctgaaatctgcccctctcctactgcctggaaggcacttactcaatgcaggcttactggctgctagtgtgggcgggataatcccattcatggtggacccaagctttactactggcatcacctgtctgggttcagtgtctgctctctctgctgtcatgggtgtgactttgacagctgctattgggggtgctgacatgcccgtcgttatcactgtgctgaacagctactcaggctgggccctgtgtgcagagggcttcctgctcaacaacaatctgctgaccatcgtgggtgcactcataggctcgtctggtgctatcctgtcatacatcatgtgtgtggcaatgaatcgctccctggctaatgtgattcttggaggctatggcaccacttcaacagctggtggaaaacccatggaaatttctggcacacatacggaaatcaaccttgacaatgcaattgacatgattcgagaagctaatagcattattattacaccaggctatggtctctgtgcagccaaagctcaataccccattgctgatttggtaaagatgctcactgagcaaggcaaaaaagtcaggtttggaattcacccagttgcaggccgaatgcctggtcagcttaatgtgctgctggctgaggctggtgtgccatatgacattgtgttggaaatggatgagatcaaccatgattttccagatactgatttggtccttgtaattggagctaatgacactgttaattcagcagctcaagaagatcccaactctattattgcaggcatgccagtccttgaggtctggaaatcaaagcaggtgattgttatgaagaggtctttgggtgttggctatgctgcagtggacaatccaatcttctacaaacctaacacggccatgcttctaggtgatgccaagaaaacatgtgacgcgctccaggcgaaagttagagaatcctatcagaagtaaatattaaggatcaagctgttagctaataatgccacctctgcagttttgggaacaggcaaataaagtatcagtatacatggtgatgtacatctgtagcaaagctcttggagaaaatgaagactgaagaaagcaaagcaaaaactgtatagagagatttttcaaaagcagtaatccctcaattttaaaaaaggattgaaaattctaaatgtctttctgtgcatattttttgtgttaggaatcaaaagtattttataaaaggagaaagaacagcctcattttagatgtagtcctgttggattttttatgcctcctcagtaaccagaaatgttttaaaaaactaagtgtttaggatttcaagacaacattatacatggctctgaaatatctgacacaatgtaaacattgcaggcacctgcattttatgttttttttttcaacaaatgtgactaatttgaaacttttatgaacttctgagctgtccccttgcaattcaaccgcagtttgaattaatcatatcaaatcagttttaattttttaaattgtacttcagagtctatatttcaagggcacattttctcactactattttaatacattaaaggactaaataatctttcagagatgctggaaacaaatcatttgctttatatgtttcattagaataccaatgaaacatacaacttgaaaattagtaatagtatttttgaagatcccatttctaattggagatctctttaatttcgatcaacttataatgtgtagtactatattaagtgcacttgagtggaattcaacatttgactaataaaatgagttcatcatgttggcaagtgatgtggcaattatctctggtgacaaaagagtaaaatcaaatatttctgcctgttacaaatatcaaggaagacctgctactatgaaatagatgacattaatctgtcttcactgtttataatacggatggattttttttcaaatcagtgtgtgttttgaggtcttatgtaattgatgacatttgagagaaatggtggctttttttagctacctctttgttcatttaagcaccagtaaagatcatgtctttttatagaaaaaaaaaaaaaaaaaaaaaaagaaaaaaaagaaaaaaaaaaggaggggggggggataaaaaaatccacaggaggggaggagaaaataagagagcgaacaagatgtaattatgtaaagacaacgacagcccaccacaaaaacggagggagaaaacaataaaaacaacaccagcagcggcgcgcggccagcctaaaaccactcagacgtgatagtatcaagacaaaacatcgtcagaatgaagagaactactgcagagaaagagcacacgaccattctatctggtgagaagacgacatatagagggcagcaccacaacaatacacaaagtagaacccactacaaagtaaagaaaaacaataaaaaagaagttaatgatagaacaaaacaacgatacataacgtagccgggaaacaacgtacaacagcaatgagtgagcaacaaactatacacggcg

SEQ ID NO: 53033 - DNA, 4796 bp, Homo sapiens
taacaacagtctgagaaggcactttgattgctgtattgcagatgataagcagcttgccgaagatcacccagaactagttagtaacagagtcaggattttgacctaagctctctgactcttactcactgtgtctttttctttactccatgctttagagagaaaaagtaaatttcgatagtaagatctgctgcttttgtgcgattctgcttttttaaattatggtttttttttttttttgttatgtcttgattcaggataacttggccaagtcctgtgacttttacttatttttatttactttttctttctttctttttttctttctttaagtggtgatggagcttctgtgtggaagagtttggtgctttgaagcctagagcctgcttattccctctggtcactctttgccccatttcctatagacttacccctgtccccaaacacagcaccaaacaccccattatcaagatcaattcacatgacctctgagacactgcccagagctcactggagcacagtctgactagcctagtctttgtaaaggcagaaggacatgtggggcatgatggggtggggtgggcaatttgtaagcttcactgattctgtggggtggcattttttttctacaggaacaaagtgttgctttcaattgactgtttatgggatatataacaggactttactctggaaggcccgttccagactggagacaatgttcttactttgtttcttagaaggcgggggtagggggagacttgtttctgaggaattttttggttctcttgttgctgatccttccatgattagggacattagttacattgcttcagacttacggagagttgctcaaaatggttcagaattgtggttgctcatcagctgttcctttcagaagcattttggctgaaaatagaggttggggtagatgtttcaccaatgttgtacccatctttgaaatgtgttttgatgtttgatgaacaaagaaaaaccttataatttgatagggtaaaggtagttagaatgccacactgggacttttagtagaaggaacttttagacagtggaaaagaatctgttaatcttcaacatacgtaatgctgatcatgcttaggtagttttacacggatattctgattattaggctatttttagtgaattgttgttggcctttgctagcagttgtttctttgataaaatttcaagatcagtggtggttcagttaaagaatagtctatgtactccatacagttactaagggctgatcatcattatcaccatctgcaccgccatttattgatgctaaacttatactaggcaccaataattgttagctgatgatttttcattattagttgataatgagccttaacacataactgggtctgtcttctagattctgatagttggtggtggtgttgctgggcttgcttctgcaggcgcagcaaagtcgatgggtgcaattgttcgaggatttgacacaagagctgcagctttggaacagttcaagtctcttggtgctgagcccttggaggtggacttgaaggaatctggtgagggacaaggaggatatgcaaaagagatgtccaaagagttcattgaagctgaaatgaaactctttgctcaacaatgcaaggaggtagacatccttatcagcacagcacttattccaggtaaaaaagctccagttttatttaataaagaaatgattgagtcaatgaaggaaggttcagttgttgtggatttagctgctgaggctggtggaaactttgaaaccactaagccaggagaactctacattcataagggaattactcacataggctacacagacctgcccagccgaatggccactcaggccagcaccctatattccaacaacatcaccaaactcctgaaggccatcagcccggacaaagataatttttattttgatgtgaaagatgactttgactttggtacgatgggtcatgtcattagaggaactgtagtgatgaaagatggtaaagtgattttcccagctcccacaccgaaaaatattcctcaaggtgccccagtaaaacagaagacagtggctgagctggaagctgaaaaagcagctaccattacacccttcaggaagacaatgtcaacggcttctgcatatacagcaggtctcacagggatactgggtttgggcattgcggctcccaatctagccttttctcagatggtgaccacttttggcttggctggcattgtggggtatcataccgtctggggagtgacccctgctctccactcaccactgatgtctgtgacaaatgcaatctcagggctgactgcagttggtgggttggcactgatgggaggacatttgtatccttccacaacttctcagggccttgctgctcttgctgcattcatatcctctgtcaacattgcaggtggctttctggtgactcagagaatgctggacatgttcaagcgtcccactgaccccccagaatacaactacctgtacctgctccctgccggcacctttgttggtggatatttagctgccctctacagtggttataacattgaacagatcatgtacctaggctcgggtttgtgctgtgtcggtgccttggctggcctctccacccagggaacagcacgtcttggcaatgcactgggcatgattggggttgctggaggactggcagccaccctcggagtcctaaaaccgggcccagaattactagctcagatgtctggagcgatggctttgggtggtaccattggattgacaattgccaaacgcatccagatttctgatttacctcaattagttgctgcttttcacagtttagtgggtttggcagctgtacttacttgcatagctgagtacattatagaatatccacattttgctacggatgcagcagcaaatctcaccaagattgtggcctacctcggcacttacattggtggcgtcacctttagtgggtctctcattgcctatggaaaattgcagggtctcctgaaatctgcccctctcctactgcctggaaggcacttactcaatgcaggcttactggctgctagtgtgggcgggataatcccattcatggtggacccaagctttactactggcatcacctgtctgggttcagtgtctgctctctctgctgtcatgggtgtgactttgacagctgctattgggggtgctgacatgcccgtcgttatcactgtgctgaacagctactcaggctgggccctgtgtgcagagggcttcctgctcaacaacaatctgctgaccatcgtgggtgcactcataggctcgtctggtgctatcctgtcatacatcatgtgtgtggcaatgaatcgctccctggctaatgtgattcttggaggctatggcaccacttcaacagctggtggaaaacccatggaaatttctggcacacatacggaaatcaaccttgacaatgcaattgacatgattcgagaagctaatagcattattattacaccaggctatggtctctgtgcagccaaagctcaataccccattgctgatttggtaaagatgctcactgagcaaggcaaaaaagtcaggtttggaattcacccagttgcaggccgaatgcctggtcagcttaatgtgctgctggctgaggctggtgtgccatatgacattgtgttggaaatggatgagatcaaccatgattttccagatactgatttggtccttgtaattggagctaatgacactgttaattcagcagctcaagaagatcccaactctattattgcaggcatgccagtccttgaggtctggaaatcaaagcaggtgattgttatgaagaggtctttgggtgttggctatgctgcagtggacaatccaatcttctacaaacctaacacggccatgcttctaggtgatgccaagaaaacatgtgacgcgctccaggcgaaagttagagaatcctatcagaagtaaatattaaggatcaagctgttagctaataatgccacctctgcagttttgggaacaggcaaataaagtatcagtatacatggtgatgtacatctgtagcaaagctcttggagaaaatgaagactgaagaaagcaaagcaaaaactgtatagagagatttttcaaaagcagtaatccctcaattttaaaaaaggattgaaaattctaaatgtctttctgtgcatattttttgtgttaggaatcaaaagtattttataaaaggagaaagaacagcctcattttagatgtagtcctgttggattttttatgcctcctcagtaaccagaaatgttttaaaaaactaagtgtttaggatttcaagacaacattatacatggctctgaaatatctgacacaatgtaaacattgcaggcacctgcattttatgttttttttttcaacaaatgtgactaatttgaaacttttatgaacttctgagctgtccccttgcaattcaaccgcagtttgaattaatcatatcaaatcagttttaattttttaaattgtacttcagagtctatatttcaagggcacattttctcactactattttaatacattaaaggactaaataatctttcagagatgctggaaacaaatcatttgctttatatgtttcattagaataccaatgaaacatacaacttgaaaattagtaatagtatttttgaagatcccatttctaattggagatctctttaatttcgatcaacttataatgtgtagtactatattaagtgcacttgagtggaattcaacatttgactaataaaatgagttcatcatgttggca

SEQ ID NO: 53034 - DNA, 5510 bp, Homo sapiens
gtatccccatttgttggagtctgggtcaagtaaggaggttttttgggttcaatggtggcaggtccctcatgaatggctgggttctgtccctggtggtaatgaggtgagtttcttattccagttagctcatgttagagctggttttgaaaagagtctagtgtctttctcacctgttctcgttgctccctttgtggccatgtgatatgcctgctcctcctcttcgccttcgcaccatgattgtaagcttctgttttctgtgtctgtgcggtctgtctgtgtgtttttgagatagagtatcactctgttgcccaggctggagtacagtggtgtgatctcagctcacagcaacctctgcctcccaagttccaagtgatcctcttgcctcagcctcctgagtagcagggactccagacacatgccaccatgcccagctaatttttgtatttttagtagagatggggtttcaccatgttggccagcctggtctcgaactcctgacctcaaatgatccatctgtctccgcctcccgaagtgctggcattacaggcatgagccaccgcacgcggccaattgtaaacttcttgaggttgtcaccagaagcagatgctggcatcatgcttcttgtacagcctagaaaggcctgtctgtctagattcttcttggcatctctgagcatggatttcattctggatatggggcaggatgctctctggaatgagggtctttagacctgtttctttgttctgatgggaccccagagaggacatcacgctttgtaactggttcttcaaggggagaagcaaatgtgtccctgaaaacttcagctgccgcgtttggcaccagtgatttgccttcaaggaaactggggagtcagaaaattgggaactcatatcaacatggcaaacctattgaaaacagtggtgactggctgctcgtgtcctctacttagcaatttggggtcctgtaagggtctacgtgtgaagaaggattttttacgaacattttatactcaccaagaactgtggtgtaaagcgcctgtaaaaccaggaattccatataagcaactgactgttggagtccccaaagagatattccaaaatgagaagcgagtggcattgtctcctgctggtgttcagaacttggtcaagcagggttttaatgttgtcgtggaatcgggtgcgggcgaagcttccaagttctcagatgatcactatagagtggcaggtgcccaaatccaaggggcaaaggaagtgctggcttctgatttggtggtcaaatggtggtcaaagtaattattcctttttcctctcccatttacagcatgctgactttttgaaatcttttcatagaaaaattaaattactttatctggagttacaccttttcctattttcaaacagtgtatttttctcaaagaaatgactgcatgtcgtcatattcttcatgctccagtaaaacttttatcagacaatatgatctatgtttaaccatgaggagagaaaaagtgatcttcatttttacatttgctatatggacattttcttttaattggctaggaaaaatttgttctacatggtccatatatatccagagtacccacacgtgaacatttactgctagaatggaaagaaggtatggaacttagtctgggactaaatgttcagtgatcttctgacacctgaaggcgcaatgacttacactgacatacgtgctatttctagagagggcatgactattttggagaaagcagctttgggctgagtggcgagtagctttacctactctaaaataagttcttaaggtgcgagcccctatggttaatccaacattaggtgttcatgaagctgaccttttaaagacatcaggaacgctgattagttttatttacccagcccaaaatccagagttgctaaataaactttcccaaagaaaaactacagttctggcaatggaccaggttccaagagtcacaattgctcagggatatgatgcgctaagctccatggccaacattgcgggttataaggctgttgtcctagcagcaaatcattttggacgtttttttactggtcagatcacagctgctggaaaagttcctccagctaagattctgatagttggtggtggtgttgctgggcttgcttctgcaggcgcagcaaagtcgatgggtgcaattgttcgaggatttgacacaagagctgcagctttggaacagttcaagtctcttggtgctgagcccttggaggtggacttgaaggaatctggtgagggacaaggaggatatgcaaaagagatgtccaaagagttcattgaagctgaaatgaaactctttgctcaacaatgcaaggaggtagacatccttatcagcacagcacttattccaggtaaaaaagctccagttttatttaataaagaaatgattgagtcaatgaaggaaggttcagttgttgtggatttagctgctgaggctggtggaaactttgaaaccactaagccaggagaactctacattcataagggaattactcacataggctacacagacctgcccagccgaatggccactcaggccagcaccctatattccaacaacatcaccaaactcctgaaggccatcagcccggacaaagataatttttattttgatgtgaaagatgactttgactttggtacgatgggtcatgtcattagaggaactgtagtgatgaaagatggtaaagtgattttcccagctcccacaccgaaaaatattcctcaaggtgccccagtaaaacagaagacagtggctgagctggaagctgaaaaagcagctaccattacacccttcaggaagacaatgtcaacggcttctgcatatacagcaggtctcacagggatactgggtttgggcattgcggctcccaatctagccttttctcagatggtgaccacttttggcttggctggcattgtggggtatcataccgtctggggagtgacccctgctctccactcaccactgatgtctgtgacaaatgcaatctcagggctgactgcagttggtgggttggcactgatgggaggacatttgtatccttccacaacttctcagggccttgctgctcttgctgcattcatatcctctgtcaacattgcaggtggctttctggtgactcagagaatgctggacatgttcaagcgtcccactgaccccccagaatacaactacctgtacctgctccctgccggcacctttgttggtggatatttagctgccctctacagtggttataacattgaacagatcatgtacctaggctcgggtttgtgctgtgtcggtgccttggctggcctctccacccagggaacagcacgtcttggcaatgcactgggcatgattggggttgctggaggactggcagccaccctcggagtcctaaaaccgggcccagaattactagctcagatgtctggagcgatggctttgggtggtaccattggattgacaattgccaaacgcatccagatttctgatttacctcaattagttgctgcttttcacagtttagtgggtttggcagctgtacttacttgcatagctgagtacattatagaatatccacattttgctacggatgcagcagcaaatctcaccaagattgtggcctacctcggcacttacattggtggcgtcacctttagtgggtctctcattgcctatggaaaattgcagggtctcctgaaatctgcccctctcctactgcctggaaggcacttactcaatgcaggcttactggctgctagtgtgggcgggataatcccattcatggtggacccaagctttactactggcatcacctgtctgggttcagtgtctgctctctctgctgtcatgggtgtgactttgacagctgctattgggggtgctgacatgcccgtcgttatcactgtgctgaacagctactcaggctgggccctgtgtgcagagggcttcctgctcaacaacaatctgctgaccatcgtgggtgcactcataggctcgtctggtgctatcctgtcatacatcatgtgtgtggcaatgaatcgctccctggctaatgtgattcttggaggctatggcaccacttcaacagctggtggaaaacccatggaaatttctggcacacatacggaaatcaaccttgacaatgcaattgacatgattcgagaagctaatagcattattattacaccaggctatggtctctgtgcagccaaagctcaataccccattgctgatttggtaaagatgctcactgagcaaggcaaaaaagtcaggtttggaattcacccagttgcaggccgaatgcctggtcagcttaatgtgctgctggctgaggctggtgtgccatatgacattgtgttggaaatggatgagatcaaccatgattttccagatactgatttggtccttgtaattggagctaatgacactgttaattcagcagctcaagaagatcccaactctattattgcaggcatgccagtccttgaggtctggaaatcaaagcaggtgattgttatgaagaggtctttgggtgttggctatgctgcagtggacaatccaatcttctacaaacctaacacggccatgcttctaggtgatgccaagaaaacatgtgacgcgctccaggcgaaagttagagaatcctatcagaagtaaatattaaggatcaagctgttagctaataatgccacctctgcagttttgggaacaggcaaataaagtatcagtatacatggtgatgtacatctgtagcaaagctcttggagaaaatgaagactgaagaaagcaaagcaaaaactgtatagagagatttttcaaaagcagtaatccctcaattttaaaaaaggattgaaaattctaaatgtctttctgtgcatattttttgtgttaggaatcaaaagtattttataaaaggagaaagaacagcctcattttagatgtagtcctgttggattttttatgcctcctcagtaaccagaaatgttttaaaaaactaagtgtttaggatttcaagacaacattatacatggctctgaaatatctgacacaatgtaaacattgcaggcacctgcattttatgttttttttttcaacaaatgtgactaatttgaaacttttatgaacttctgagctgtccccttgcaattcaaccgcagtttgaattaatcatatcaaatcagttttaattttttaaattgtacttcagagtctatatttcaagggcacattttctcactactattttaatacattaaaggactaaataatctttcagagatgctggaaacaaatcatttgctttatatgtttcattagaataccaatgaaacatacaacttgaaaattagtaatagtatttttgaagatcccatttctaattggagatctctttaatttcgatcaacttataatgtgtagtactatattaagtgcacttgagtggaattcaacatttgactaataaaatgagttcatcatgttggca

SEQ ID NO: 53035 - DNA, 3520 bp, Homo sapiens
taacaacagtctgagaaggcactttgattgctgtattgcagatgataagcagcttgccgaagatcacccagaactagttagtaacagagtcaggattttgacctaagctctctgactcttactcactgtgtctttttctttactccatgctttagagagaaaaagtaaatttcgatagtaagatctgctgcttttgtgcgattctgcttttttaaattatggtttttttttttttttgttatgtcttgattcaggataacttggccaagtcctgtgacttttacttatttttatttactttttctttctttctttttttctttctttaagtggtgatggagcttctgtgtggaagagtttggtgctttgaagcctagagcctgcttattccctctggtcactctttgccccatttcctatagacttacccctgtccccaaacacagcaccaaacaccccattatcaagatcaattcacatgacctctgagacactgcccagagctcactggagcacagtctgactagcctagtctttgtaaaggcagaaggacatgtggggcatgatggggtggggtgggcaatttgtaagcttcactgattctgtggggtggcattttttttctacaggaacaaagtgttgctttcaattgactgtttatgggatatataacaggactttactctggaaggcccgttccagactggagacaatgttcttactttgtttcttagaaggcgggggtagggggagacttgtttctgaggaattttttggttctcttgttgctgatccttccatgattagggacattagttacattgcttcagacttacggagagttgctcaaaatggttcagaattgtggttgctcatcagctgttcctttcagaagcattttggctgaaaatagaggttggggtagatgtttcaccaatgttgtacccatctttgaaatgtgttttgatgtttgatgaacaaagaaaaaccttataatttgatagggtaaaggtagttagaatgccacactgggacttttagtagaaggaacttttagacagtggaaaagaatctgttaatcttcaacatacgtaatgctgatcatgcttaggtagttttacacggatattctgattattaggctatttttagtgaattgttgttggcctttgctagcagttgtttctttgataaaatttcaagatcagtggtggttcagttaaagaatagtctatgtactccatacagttactaagggctgatcatcattatcaccatctgcaccgccatttattgatgctaaacttatactaggcaccaataattgttagctgatgatttttcattattagttgataatgagccttaacacataactgggtctgtcttctagattctgatagttggtggtggtgttgctgggcttgcttctgcaggcgcagcaaagtcgatgggtgcaattgttcgaggatttgacacaagagctgcagctttggaacagttcaagtctcttggtgctgagcccttggaggtggacttgaaggaatctggtgagggacaaggaggatatgcaaaagagatgtccaaagagttcattgaagctgaaatgaaactctttgctcaacaatgcaaggaggtagacatccttatcagcacagcacttattccaggtaaaaaagctccagttttatttaataaagaaatgattgagtcaatgaaggaaggttcagttgttgtggatttagctgctgaggctggtggaaactttgaaaccactaagccaggagaactctacattcataagggaattactcacataggctacacagacctgcccagccgaatggccactcaggccagcaccctatattccaacaacatcaccaaactcctgaaggccatcagcccggacaaagataatttttattttgatgtgaaagatgactttgactttggtacgatgggtcatgtcattagaggaactgtagtgatgaaagatggtaaagtgattttcccagctcccacaccgaaaaatattcctcaaggtgccccagtaaaacagaagacagtggctgagctggaagctgaaaaagcagctaccattacacccttcaggaagacaatgtcaacggcttctgcatatacagcaggtctcacagggatactgggtttgggcattgcggctcccaatctagccttttctcagatggtgaccacttttggcttggctggcattgtggggtatcataccgtctggggagtgacccctgctctccactcaccactgatgtctgtgacaaatgcaatctcagggctgactgcagttggtgggttggcactgatgggaggacatttgtatccttccacaacttctcagggccttgctgctcttgctgcattcatatcctctgtcaacattgcaggtggctttctggtgactcagagaatgctggacatgttcaagcgtcccactgaccccccagaatacaactacctgtacctgctccctgccggcacctttgttggtggatatttagctgccctctacagtggttataacattgaacagatcatgtacctaggctcgggtttgtgctgtgtcggtgccttggctggcctctccacccagggaacagcacgtcttggcaatgcactgggcatgattggggttgctggaggactggcagccaccctcggagtcctaaaaccgggcccagaattactagctcagatgtctggagcgatggctttgggtggtaccattgattggtaagcacttgtgggcttctgccttcatgtgaactccagtttctcaatatatatttctaaggtccatattgatgaaataattaaattttgttcatggaagttgcttcagttaatattattttggtgaaaattcattccagttggtgtaattctcattcaaatacattttagaacactgaataaatgcatcaactgagtcaaaatatcctatactcaattcttatcttcctttactgactgtgtcccgttagctgataatggaatgggggattggaatccttatgtatgtactatacataagctaacttttgttctgctgggtataaataacagccaaagattctgcttcatagacctgttaaaaatgaaaaaaaaaaaaaaaaacatgtgccagcagaaaaactactgttttaattttattcagttgtttgctggattgttaaattttcaggaatttttaggctgggcatggtggctcagactgtaatcccagcactttgggaggctgatgtgggtggatcacttgaggccaggagtttgaaactggcctggccaacatggtgaaaccccgtcgctattaaatatacaaaaattagttgggcatggtggcgtacaactgtaatcccagcttcttgggtggctgaagcatgataatcgcttgaacctgggatgtggaggttgcagtgagctgtgatcatgctgctgcactccagcctgggtgacaaagcgagactctgtctcaaaaaaaaaa

SEQ ID NO: 53036 - DNA, 1030 bp, Homo sapiens
aggcttggaagagaagttgagtgacttcagcaaggtcacacagcaaggaggtgatgctgacaagactccaactgagggctggttccagagcctgtattctttgcattgcactacacaacttcaaaacattcctacattcagaagtctggtagaagaaaaaagaatgaaatacaaatattccaaacataaggcagtatgagatcaatgccatatgagatctattaagagaagcactatgtgggtgaaatagagagaagggttatttctggtcagagcaattaaggaaggaatcccagaaacgttgggctttaccagaaaggtgagatttctttctttcttttctttttttttttttttttttgagatggagtttcactcttgttgcccaggctggagtgcaagggcacgatctcggctcacagcaacctccaactcctgggttccagccattctcctgcctcagcctcccaagtagctgggattacgggcaagtgccaccaccctcagctaattctacattgtaagtagagacagcgtttcaccatgttggtcaggctggtctcgaactcccgacctcaggtgatccactgcccccagcagaaggatgagatttcaataggtgaagatacgggactgcgcagcgaaaaaggggcatttcatgagcaacacgtagaacttagactctggcgacaaccaaggttcctattccattattcaccagctgcagaccctggagaaataactgaatgtcctacacctcacttttttcatcagtaaaatgggatactagtaacatctttttcctaaagttggagtaaggattatggaataatctatataaagtatttagcataatgcttagtaagtggtaaacatccaacagacagcaaatgttagctagtagtctatgtgtttaaagaatggtaagcagtcaagttaggcttccagtcctcttaaagcaaaataagaaatgtggtcgaaacaataggttgcagtcagattgagaatgaagttcatgtctaccttagaa

SEQ ID NO: 53037 - DNA, 286 bp, Homo sapiens
aaaatgttttgagaagtactggttgctataagagcatgtaatttaggccctgtcctagtttaagaggtcagtgaagtctttcttaaggaaatcatttttagctgaaatctgaaggatgagtaggaatttatgaggggacaacagggaatgttccacgagtaggaacagaaaacagttctctaactcagtattttagtcatattggtcttctttcagttacagttgtgtgctgctcagtgacactttgatctagggcagactgcatgtttgatggtggtcccacaag

SEQ ID NO: 53038 - DNA, 300 bp, Homo sapiens
accatgcccagctcattttgttcttttttaatgctattacaaatggaatattttaattcaaatttcaattttttcctaatgtattgaaataagaatttgtgcattaatatgcgatcgactttcgtgtcttgatcttgcatcctgcaaacttgctgaattgtttattagttctaacagtaattttacatattccttaaagtattctatacacaagatcatgttatgaaatattcctgatactgcggagaaagttttcttttttttttaacctgactcctaatttatttttttacttttttt

SEQ ID NO: 53039 - DNA, 190 bp, Homo sapiens
atcccccaggccggtcactgcccccacccccattccttccatccacttcttcacaccttaattacctcctgcctgccgggaggggacaaggatttccagccctggggcacgtgagcattctagattcacctgcaccctctgttcgcccatccccagattcagggactggtcaggcgtccccaactccctc

SEQ ID NO: 53040 - DNA, 2562 bp, Homo sapiens
cacgctagcgccgcccaggctggcacaaaggaggaagcctagtcccgcccctgcgtgcggcgcttctcccaggccccaccttccatccagtgccctggaccctcggctgggtagcgccaccagagcgaccaaacgtcccgcgccttccaggccgcactccagagccaaaagagctccatggcggcggcggccaagcccaacaacctttccctggtggtgcacggaccgggggacttgcgcctggagaactatcctatccctgaaccaggcccaaatgaggtcttgctgaggatgcattctgttggaatctgtggctcagatgtccactactgggagtatggtcgaattgggaattttattgtgaaaaagcccatggtgctgggacatgaagcttcgggaacagtcgaaaaagtgggatcatcggtaaagcacctaaaaccaggtgatcgtgttgccatcgagcctggtgctccccgagaaaatgatgaattctgcaagatgggccgatacaatctgtcaccttccatcttcttctgtgccacgccccccgatgacgggaacctctgccggttctataagcacaatgcagccttttgttacaagcttcctgacaatgtcacctttgaggaaggcgccctgatcgagccactttctgtggggatccatgcctgcaggagaggcggagttaccctgggacacaaggtccttgtgtgtggagctgggccaatcgggatggtcactttgctcgtggccaaagcaatgggagcagctcaagtagtggtgactgatctgtctgctacccgattgtccaaagccaaggagattggggctgatttagtcctccagatctccaaggagagccctcaggaaatcgccaggaaagtagaaggtcagctggggtgcaagccggaagtcaccatcgagtgcacgggggcagaggcctccatccaggcgggcatctacgccactcgctctggtgggaccctcgtgcttgtggggctgggctctgagatgaccaccgtacccctactgcatgcagccatccgggaggtggatatcaagggcgtgtttcgatactgcaacacgtggccagtggcgatttcgatgcttgcgtccaagtctgtgaatgtaaaacccctcgtcacccataggtttcctctggagaaagctctggaggcctttgaaacatttaaaaagggattggggttgaaaatcatgctcaagtgtgaccccagtgaccagaatccctgatgttaatgggctctgccctcatccccacagtcttgggatctcagggcacaatggctggacatgggtgggctctgatgcagaactttctcttttgaatgttaagaataactaatacaattcattgtgaacagaagtccttaagcagaggaattggtgtgccttaaagatacaatctgggatagtttgggggaacttgtagccagaatgccctgttcatgctgagcaaagttcagcaagtagagcagagtttggcaggcaggtgccaggaactccccttcttcctggagtgccttcattgaggaaggaaatctggcccttgggtttcctggttccactgctactgacccagaggggaatgagggctgagttatgaaaagataacttcatgaagacttaactggcccagaagctgattttcatgaaaatctgccactcagggtctgggatgaaggcttgtcagcacttccagtttagaacgcaatgtttctagagacatattggctgtttgttttgatgataaaaggagaataagaaaaggcatcactttcctggatccaggataatttttaaaccaatcaaatgaaaaaaacaaacaaacaaaaaaggaaatgtcatgtgaggttaaaccagtttgcattcccctaatgtggaaaaagtaagaggactactcagcactgtttgaagattgcctcttctacagcttctgagaattgtgttatttcacttgccaagtgaaggaccccctccccaacatgccccagcccacccctaagcatggtcccttgtcaccaggcaaccaggaaactgctacttgtggacctcaccagagaccaggagggtttggttagctcacaggacttcccccaccccagaagattagcatcccatactagactcatactcaactcaactaggctcatactcaattgatggttattagacaattccatttctttctggttattataaacagaaaatctttcctcttctcattaccagtaaaggctcttggtatctttctgttggaatgatttctatgaacttgtcttattttaatggtgggttttttttctggtaagatttagacctaaatcgcatcatgccaacttgtgactttgagactattcatcaagaatgaggatatagtagccatgacatagcttgagctatagcctttaattccttactttggctatgggtggagggtgagtttgaagaggttctgattttcttgtaacctgggaaagccatgaccttgtgcccgattctttcagattgctttgggtaataaatattggtggtggtatctga

SEQ ID NO: 53041 - DNA, 2666 bp, Homo sapiens
cacgctagcgccgcccaggctggcacaaaggaggaagcctagtcccgcccctgcgtgcggcgcttctcccaggccccaccttccatccagtgccctggaccctcggctgggtagcgccaccagagcgaccaaacgtcccgcgccttccaggccgcactccagagccaaaagagctccatggcggcggcggccaagcccaacaacctttccctggtggtgcacggaccgggggacttgcgcctggagaactatcctatccctgaaccaggcccaaatgaggtcttgctgaggatgcattctgttggaatctgtggctcagatgtccactactgggagtatggtcgaattgggaattttattgtgaaaaagcccatggtgctgggacatgaagcttcgggaacagtcgaaaaagtgggatcatcggtaaagcacctaaaaccaggtgatcgtgttgccatcgagcctggtgctccccgagaaaatgatgaattctgcaagatgggccgatacaatctgtcaccttccatcttcttctgtgccacgccccccgatgacgggaacctctgccggttctataagcacaatgcagccttttgttacaagcttcctgacaatgtcacctttgaggaaggcgccctgatcgagccactttctgtggggatccatgcctgcaggagaggcggagttaccctgggacacaaggtccttgtgtgtggagctgggccaatcgggatggtcactttgctcgtggccaaagcaatgggagcagctcaagtagtggtgactgatctgtctgctacccgattgtccaaagccaaggagattggggctgatttagtcctccagatctccaaggagagccctcaggaaatcgccaggaaagtagaaggtcagctggggtgcaagccggaagtcaccatcgagtgcacgggggcagaggcctccatccaggcgggcatctacgccactcgctctggtgggaccctcgtgcttgtggggctgggctctgagatgaccaccgtacccctactgcatgcagccatccgggaggtggatatcaagggcgtgtttcgatactgcaacacgtggccagtggcgatttcgatgcttgcgtccaagtctgtgaatgtaaaacccctcgtcacccataggtttcctctggagaaagctctggaggcctttgaaacatttaaaaagggattggggttgaaaatcatgctcaagtgtgaccccagtgaccagaatccctgatgttaatgggctctgccctcatccccacagtcttgggatctcagggcacaatggctggacatgggtgggctctgatgcagaactttctcttttgaatgttaagaataactaatacaattcattgtgaacagaagtccttaagcagaggaattggtgtgccttaaagatacaatctgggatagtttgggggaacttgtagccagaatgccctgttcatgctgagcaaagttcagcaagtagagcagagtttggcaggcaggtgccaggaactccccttcttcctggagtgccttcattgaggaaggaaatctggcccttgggtttcctggttccactgctactgacccagaggggaatgagggctgagttatgaaaagataacttcatgaagacttaactggcccagaagctgattttcatgaaaatctgccactcagggtctgggatgaaggcttgtcagcacttccagtttagaacgcaatgtttctagagacatattggctgtttgttttgatgataaaaggagaataagaaaaggcatcactttcctggatccaggataatttttaaaccaatcaaatgaaaaaaacaaacaaacaaaaaaggaaatgtcatgtgaggttaaaccagtttgcattcccctaatgtggaaaaagtaagaggactactcagcactgtttgaagattgcctcttctacagcttctgagaattgtgttatttcacttgccaagtgaaggaccccctccccaacatgccccagcccacccctaagcatggtcccttgtcaccaggcaaccaggaaactgctacttgtggacctcaccagagaccaggagggtttggttagctcacaggacttcccccaccccagaagattagcatcccatactagactcatactcaactcaactaggctcatactcaattgatggttattagacaattccatttctttctggttattataaacagaaaatctttcctcttctcattaccagtaaaggctcttggtatctttctgttggaatgatttctatgaacttgtcttattttaatggtgggttttttttctggtaagatttagacctaaatcgcatcatgccaacttgtgactttgagactattcatcaagaatgaggatatagtagccatgacatagcttgagctatagcctttaattccttactttggctatgggtggagggtgagtttgaagaggttctgattttcttgtaacctgggaaagccatgaccttgtgcccgattctttcagattgctttgggtaataaatattggtggtggtatctgaaaaaaaacaaatacaaaaaggggcgcctaaaattcccggggggcaaatcgcatcccctttgaaaggccacacgaggaaaaaaaagggggggttaaatcgcgaaa

SEQ ID NO: 53042 - DNA, 2420 bp, Homo sapiens
cacgctagcgccgcccaggctggcacaaaggaggaagcctagtcccgcccctgcgtgcggcgcttctcccaggccccaccttccatccagtgccctggaccctcggctgggtagcgccaccagagcgaccaaacgtcccgcgccttccaggccgcactccagagccaaaagagctccatggcggcggcggccaagcccaacaacctttccctggtggtgcacggaccgggggacttgcgcctggagaactatcctatccctgaaccaggcccaaatgaggtcttgctgaggatgcattctgttggaatctgtggctcagatgtccactactgggagtatggtcgaattgggaattttattgtgaaaaagcccatggtgctgggacatgaagcttcgggaacagtcgaaaaagtgggatcatcggtaaagcacctaaaaccaggtgatcgtgttgccatcgagcctggtgctccccgagaaaatgatgaattctgcaagatgggccgatacaatctgtcaccttccatcttcttctgtgccacgccccccgatgacgggaacctctgccggttctataagcacaatgcagccttttgttacaagcttcctgacaatgtcacctttgaggaaggcgccctgatcgagccactttctgtggggatccatgcctgcaggagaggcggagttaccctgggacacaaggtccttgtgtgtggagctgggccaatcgggatggtcactttgctcgtggccaaagcaatgggagcagctcaagtagtggtgactgatctgtctgctacccgattgtccaaagccaaggagattggggctgatttagtcctccagatctccaaggagagccctcaggaaatcgccaggaaagtagaaggtcagctggggtgcaagccggaagtcaccatcgagtgcacgggggcagaggcctccatccaggcgggcatctacgccactcgctctggtgggaccctcgtgcttgtggggctgggctctgagatgaccaccgtacccctactgcatgcagccatccgggaggtggatatcaagggcgtgtttcgatactgcaacacgtggccagtggcgatttcgatgcttgcgtccaagtctgtgaatgtaaaacccctcgtcacccataggtttcctctggagaaagctctggaggcctttgaaacatttaaaaagggattggggttgaaaatcatgctcaagtgtgaccccagtgaccagaatccctgatgttaatgggctctgccctcatccccacagtcttgggatctcagggcacaatggctggacatgggtgggctctgatgcagaactttctcttttgaatgttaagaataactaatacaattcattgtgaacagaagtccttaagcagtgccttcattgaggaaggaaatctggcccttgggtttcctggttccactgctactgacccagaggggaatgagggctgagttatgaaaagataacttcatgaagacttaactggcccagaagctgattttcatgaaaatctgccactcagggtctgggatgaaggcttgtcagcacttccagtttagaacgcaatgtttctagagacatattggctgtttgttttgatgataaaaggagaataagaaaaggcatcactttcctggatccaggataatttttaaaccaatcaaatgaaaaaaacaaacaaacaaaaaaggaaatgtcatgtgaggttaaaccagtttgcattcccctaatgtggaaaaagtaagaggactactcagcactgtttgaagattgcctcttctacagcttctgagaattgtgttatttcacttgccaagtgaaggaccccctccccaacatgccccagcccacccctaagcatggtcccttgtcaccaggcaaccaggaaactgctacttgtggacctcaccagagaccaggagggtttggttagctcacaggacttcccccaccccagaagattagcatcccatactagactcatactcaactcaactaggctcatactcaattgatggttattagacaattccatttctttctggttattataaacagaaaatctttcctcttctcattaccagtaaaggctcttggtatctttctgttggaatgatttctatgaacttgtcttattttaatggtgggttttttttctggtaagatttagacctaaatcgcatcatgccaacttgtgactttgagactattcatcaagaatgaggatatagtagccatgacatagcttgagctatagcctttaattccttactttggctatgggtggagggtgagtttgaagaggttctgattttcttgtaacctgggaaagccatgaccttgtgcccgattctttcagattgctttgggtaataaatattggtggtggtatctga

SEQ ID NO: 53043 - DNA, 2388 bp, Homo sapiens
gtatatatgtgattaagatatgtatttctgacttgaagtgaaatattctggaaaactcacacaactatggagaactatcctatccctgaaccaggcccaaatgaggtcttgctgaggatgcattctgttggaatctgtggctcagatgtccactactgggagtatggtcgaattgggaattttattgtgaaaaagcccatggtgctgggacatgaagcttcgggaacagtcgaaaaagtgggatcatcggtaaagcacctaaaaccaggtgatcgtgttgccatcgagcctggtgctccccgagaaaatgatgaattctgcaagatgggccgatacaatctgtcaccttccatcttcttctgtgccacgccccccgatgacgggaacctctgccggttctataagcacaatgcagccttttgttacaagcttcctgacaatgtcacctttgaggaaggcgccctgatcgagccactttctgtggggatccatgcctgcaggagaggcggagttaccctgggacacaaggtccttgtgtgtggagctgggccaatcgggatggtcactttgctcgtggccaaagcaatgggagcagctcaagtagtggtgactgatctgtctgctacccgattgtccaaagccaaggagattggggctgatttagtcctccagatctccaaggagagccctcaggaaatcgccaggaaagtagaaggtcagctggggtgcaagccggaagtcaccatcgagtgcacgggggcagaggcctccatccaggcgggcatctacgccactcgctctggtgggaccctcgtgcttgtggggctgggctctgagatgaccaccgtacccctactgcatgcagccatccgggaggtggatatcaagggcgtgtttcgatactgcaacacgtggccagtggcgatttcgatgcttgcgtccaagtctgtgaatgtaaaacccctcgtcacccataggtttcctctggagaaagctctggaggcctttgaaacatttaaaaagggattggggttgaaaatcatgctcaagtgtgaccccagtgaccagaatccctgatgttaatgggctctgccctcatccccacagtcttgggatctcagggcacaatggctggacatgggtgggctctgatgcagaactttctcttttgaatgttaagaataactaatacaattcattgtgaacagaagtccttaagcagaggaattggtgtgccttaaagatacaatctgggatagtttgggggaacttgtagccagaatgccctgttcatgctgagcaaagttcagcaagtagagcagagtttggcaggcaggtgccaggaactccccttcttcctggagtgccttcattgaggaaggaaatctggcccttgggtttcctggttccactgctactgacccagaggggaatgagggctgagttatgaaaagataacttcatgaagacttaactggcccagaagctgattttcatgaaaatctgccactcagggtctgggatgaaggcttgtcagcacttccagtttagaacgcaatgtttctagagacatattggctgtttgttttgatgataaaaggagaataagaaaaggcatcactttcctggatccaggataatttttaaaccaatcaaatgaaaaaaacaaacaaacaaaaaaggaaatgtcatgtgaggttaaaccagtttgcattcccctaatgtggaaaaagtaagaggactactcagcactgtttgaagattgcctcttctacagcttctgagaattgtgttatttcacttgccaagtgaaggaccccctccccaacatgccccagcccacccctaagcatggtcccttgtcaccaggcaaccaggaaactgctacttgtggacctcaccagagaccaggagggtttggttagctcacaggacttcccccaccccagaagattagcatcccatactagactcatactcaactcaactaggctcatactcaattgatggttattagacaattccatttctttctggttattataaacagaaaatctttcctcttctcattaccagtaaaggctcttggtatctttctgttggaatgatttctatgaacttgtcttattttaatggtgggttttttttctggtaagatttagacctaaatcgcatcatgccaacttgtgactttgagactattcatcaagaatgaggatatagtagccatgacatagcttgagctatagcctttaattccttactttggctatgggtggagggtgagtttgaagaggttctgattttcttgtaacctgggaaagccatgaccttgtgcccgattctttcagattgctttgggtaataaatattggtggtggtatctga

SEQ ID NO: 53044 - DNA, 1898 bp, Homo sapiens
cacgctagcgccgcccaggctggcacaaaggaggaagcctagtcccgcccctgcgtgcggcgcttctcccaggccccaccttccatccagtgccctggaccctcggctgggtagcgccaccagagcgaccaaacgtcccgcgccttccaggccgcactccagagccaaaagagctccatggcggcggcggccaagcccaacaacctttccctggtggtgcacggaccgggggacttgcgcctggagaactatcctatccctgaaccaggcccaaatgaggtcttgctgaggatgcattctgttggaatctgtggctcagatgtccactactgggagtatggtcgaattgggaattttattgtgaaaaagcccatggtgctgggacatgaagcttcgggaacagtcgaaaaagtgggatcatcggtaaagcacctaaaaccaggtgatcgtgttgccatcgagcctggtgctccccgagaaaatgatgaattctgcaagatgggccgatacaatctgtcaccttccatcttcttctgtgccacgccccccgatgacgggaacctctgccggttctataagcacaatgcagccttttgttacaagcttcctgacaatgtcacctttgaggaaggcgccctgatcgagccactttctgtggggatccatgcctgcaggagaggcggagttaccctgggacacaaggtccttgtgtgtggagctgggccaatcgggatggtcactttgctcgtggccaaagcaatgggagcagctcaagtagtggtgactgatctgtctgctacccgattgtccaaagccaaggagattggggctgatttagtcctccagatctccaaggagagccctcaggaaatcgccaggaaagtagaaggtcagctggggtgcaagccggaagtcaccatcgagtgcacgggggcagaggcctccatccaggcgggcatctacgccactcgctctggtgggaccctcgtgcttgtggggctgggctctgagatgaccaccgtacccctactgcatgcagccatccgggaggtggatatcaagggcgtgtttcgatactgcaacacgtggccagtggcgatttcgatgcttgcgtccaagtctgtgaatgtaaaacccctcgtcacccataggtttcctctggagaaagctctggaggcctttgaaacatttaaaaagggattggggttgaaaatcatgctcaagtgtgaccccagtgaccagaatccctgatgttaatgggctctgccctcatccccacagtcttgggatctcagggcacaatggctggacatgggtgggctctgatgcagaactttctcttttgaatgttaagaataactaatacaattcattgtgaacagaagtccttaagcagacttgtggacctcaccagagaccaggagggtttggttagctcacaggacttcccccaccccagaagattagcatcccatactagactcatactcaactcaactaggctcatactcaattgatggttattagacaattccatttctttctggttattataaacagaaaatctttcctcttctcattaccagtaaaggctcttggtatctttctgttggaatgatttctatgaacttgtcttattttaatggtgggttttttttctggtaagatttagacctaaatcgcatcatgccaacttgtgactttgagactattcatcaagaatgaggatatagtagccatgacatagcttgagctatagcctttaattccttactttggctatgggtggagggtgagtttgaagaggttctgattttcttgtaacctgggaaagccatgaccttgtgcccgattctttcagattgctttgggtaataaatattggtggtggtatctga

SEQ ID NO: 53045 - DNA, 2086 bp, Homo sapiens
aattaatcataaatgatctgtgtgtgatcgttatctcctataaccgtccaacttcttctgtgccacgccccccgatgacgggaacctctgccggttctataagcacaatgcagccttttgttacaagcttcctgacaatgtcacctttgaggaaggcgccctgatcgagccactttctgtggggatccatgcctgcaggagaggcggagttaccctgggacacaaggtccttgtgtgtggagctgggccaatcgggatggtcactttgctcgtggccaaagcaatgggagcagctcaagtagtggtgactgatctgtctgctacccgattgtccaaagccaaggagattggggctgatttagtcctccagatctccaaggagagccctcaggaaatcgccaggaaagtagaaggtcagctggggtgcaagccggaagtcaccatcgagtgcacgggggcagaggcctccatccaggcgggcatctacgccactcgctctggtgggaccctcgtgcttgtggggctgggctctgagatgaccaccgtacccctactgcatgcagccatccgggaggtggatatcaagggcgtgtttcgatactgcaacacgtggccagtggcgatttcgatgcttgcgtccaagtctgtgaatgtaaaacccctcgtcacccataggtttcctctggagaaagctctggaggcctttgaaacatttaaaaagggattggggttgaaaatcatgctcaagtgtgaccccagtgaccagaatccctgatgttaatgggctctgccctcatccccacagtcttgggatctcagggcacaatggctggacatgggtgggctctgatgcagaactttctcttttgaatgttaagaataactaatacaattcattgtgaacagaagtccttaagcagaggaattggtgtgccttaaagatacaatctgggatagtttgggggaacttgtagccagaatgccctgttcatgctgagcaaagttcagcaagtagagcagagtttggcaggcaggtgccaggaactccccttcttcctggagtgccttcattgaggaaggaaatctggcccttgggtttcctggttccactgctactgacccagaggggaatgagggctgagttatgaaaagataacttcatgaagacttaactggcccagaagctgattttcatgaaaatctgccactcagggtctgggatgaaggcttgtcagcacttccagtttagaacgcaatgtttctagagacatattggctgtttgttttgatgataaaaggagaataagaaaaggcatcactttcctggatccaggataatttttaaaccaatcaaatgaaaaaaacaaacaaacaaaaaaggaaatgtcatgtgaggttaaaccagtttgcattcccctaatgtggaaaaagtaagaggactactcagcactgtttgaagattgcctcttctacagcttctgagaattgtgttatttcacttgccaagtgaaggaccccctccccaacatgccccagcccacccctaagcatggtcccttgtcaccaggcaaccaggaaactgctacttgtggacctcaccagagaccaggagggtttggttagctcacaggacttcccccaccccagaagattagcatcccatactagactcatactcaactcaactaggctcatactcaattgatggttattagacaattccatttctttctggttattataaacagaaaatctttcctcttctcattaccagtaaaggctcttggtatctttctgttggaatgatttctatgaacttgtcttattttaatggtgggttttttttctggtaagatttagacctaaatcgcatcatgccaacttgtgactttgagactattcatcaagaatgaggatatagtagccatgacatagcttgagctatagcctttaattccttactttggctatgggtggagggtgagtttgaagaggttctgattttcttgtaacctgggaaagccatgaccttgtgcccgattctttcagattgctttgggtaataaatattggtggtggtatctga

SEQ ID NO: 53046 - DNA, 796 bp, Homo sapiens
ctagaggatcgtccctaagccaacacacacattctccactaagtagacaagtcttagggtttccttctttcccttacaaataatgtacaaatttagaagtagctggtaaaactgatagatatatataagatggcaaataaaaggtgacattttctgttggttccgaaactgttcctgcaaattttgtcctttgctgtgttctttaaccgtatgtgttacatgcagaaagctcttttcataagaattgacaacaaactcgatgtaagttacatttacagtactgtataaagttattcagattcacggacaaatgtggaaaaatattaacaggtggtggtatagctgataccaccccagaagattagcatcccatactagactcatactcaactcaactaggctcatactcaattgatggttattagacaattccatttctttctggttattataaacagaaaatctttcctcttctcattaccagtaaaggctcttggtatctttctgttggaatgatttctatgaacttgtcttattttaatggtgggttttttttctggtaagatttagacctaaatcgcatcatgccaacttgtgactttgagactattcatcaagaatgaggatatagtagccatgacatagcttgagctatagcctttaattccttactttggctatgggtggagggtgagtttgaagaggttctgattttcttgtaacctgggaaagccatgaccttgtgcccgattctttcagattgctttgggtaataaatattggtggtggtatctga

SEQ ID NO: 53047 - DNA, 2040 bp, Homo sapiens
cacgctagcgccgcccaggctggcacaaaggaggaagcctagtcccgcccctgcgtgcggcgcttctcccaggccccaccttccatccagtgccctggaccctcggctgggtagcgccaccagagcgaccaaacgtcccgcgccttccaggccgcactccagagccaaaagagctccatggcggcggcggccaagcccaacaacctttccctggtggtgcacggaccgggggacttgcgcctggagaactatcctatccctgaaccaggcccaaatgaggtcttgctgaggatgcattctgttggaatctgtggctcagatgtccactactgggagtatggtcgaattgggaattttattgtgaaaaagcccatggtgctgggacatgaagcttcgggaacagtcgaaaaagtgggatcatcggtaaagcacctaaaaccaggtgatcgtgttgccatcgagcctggtgctccccgagaaaatgatgaattctgcaagatgggccgatacaatctgtcaccttccatcttcttctgtgccacgccccccgatgacgggaacctctgccggttctataagcacaatgcagccttttgttacaagcttcctgacaatgtcacctttgaggaaggcgccctgatcgagccactttctgtggggatccatgcctgcaggagaggcggagttaccctgggacacaaggtccttgtgtgtggagctgggccaatcgggatggtcactttgctcgtggccaaagcaatgggagcagctcaagtagtggtgactgatctgtctgctacccgattgtccaaagccaaggagattggggctgatttagtcctccagatctccaaggagagccctcaggaaatcgccaggaaagtagaaggtcagctggggtgcaagccggaagtcaccatcgagtgcacgggggcagaggcctccatccaggcgggcatctacgccactcgctctggtgggaccctcgtgcttgtggggctgggctctgagatgaccaccgtacccctactgcatgcagccatccgggaggtggatatcaagggcgtgtttcgatactgcaacacgtggccagtggcgatttcgatgcttgcgtccaagtctgtgaatgtaaaacccctcgtcacccataggtttcctctggagaaagctctggaggcctttgaaacatttaaaaagggattggggttgaaaatcatgctcaagtgtgaccccagtgaccagaatccctgatgttaatgggctctgccctcatccccacagtcttgggatctcagggcacaatggctggacatgggtgggctctgatgcagaactttctcttttgaatgttaagaataactaatacaattcattgtgaacagaagtccttaagcagaggaattggtgtgccttaaagatacaatctgggatagtttgggggaacttgtagccagaatgccctgttcatgctgagcaaagttcagcaagtagagcagagtttggcaggcaggtgccaggaactccccttcttcctggagacttgtggacctcaccagagaccaggagggtttggttagctcacaggacttcccccaccccagaagattagcatcccatactagactcatactcaactcaactaggctcatactcaattgatggttattagacaattccatttctttctggttattataaacagaaaatctttcctcttctcattaccagtaaaggctcttggtatctttctgttggaatgatttctatgaacttgtcttattttaatggtgggttttttttctggtaagatttagacctaaatcgcatcatgccaacttgtgactttgagactattcatcaagaatgaggatatagtagccatgacatagcttgagctatagcctttaattccttactttggctatgggtggagggtgagtttgaagaggttctgattttcttgtaacctgggaaagccatgaccttgtgcccgattctttcagattgctttgggtaataaatattggtggtggtatctga

SEQ ID NO: 53048 - DNA, 2508 bp, Homo sapiens
cacgctagcgccgcccaggctggcacaaaggaggaagcctagtcccgcccctgcgtgcggcgcttctcccaggccccaccttccatccagtgccctggaccctcggctgggtagcgccaccagagcgaccaaacgtcccgcgccttccaggccgcactccagagccaaaagagctccatggcggcggcggccaagcccaacaacctttccctggtggtgcacggaccgggggacttgcgcctggagaactatcctatccctgaaccaggcccaaatgaggtcttgctgaggatgcattctgttggaatctgtggctcagatgtccactactgggagtatggtcgaattgggaattttattgtgaaaaagcccatggtgctgggacatgaagcttcgggaacagtcgaaaaagtgggatcatcggtaaagcacctaaaaccaggtgatcgtgttgccatcgagcctggtgctccccgagtctgtgccacgccccccgatgacgggaacctctgccggttctataagcacaatgcagccttttgttacaagcttcctgacaatgtcacctttgaggaaggcgccctgatcgagccactttctgtggggatccatgcctgcaggagaggcggagttaccctgggacacaaggtccttgtgtgtggagctgggccaatcgggatggtcactttgctcgtggccaaagcaatgggagcagctcaagtagtggtgactgatctgtctgctacccgattgtccaaagccaaggagattggggctgatttagtcctccagatctccaaggagagccctcaggaaatcgccaggaaagtagaaggtcagctggggtgcaagccggaagtcaccatcgagtgcacgggggcagaggcctccatccaggcgggcatctacgccactcgctctggtgggaccctcgtgcttgtggggctgggctctgagatgaccaccgtacccctactgcatgcagccatccgggaggtggatatcaagggcgtgtttcgatactgcaacacgtggccagtggcgatttcgatgcttgcgtccaagtctgtgaatgtaaaacccctcgtcacccataggtttcctctggagaaagctctggaggcctttgaaacatttaaaaagggattggggttgaaaatcatgctcaagtgtgaccccagtgaccagaatccctgatgttaatgggctctgccctcatccccacagtcttgggatctcagggcacaatggctggacatgggtgggctctgatgcagaactttctcttttgaatgttaagaataactaatacaattcattgtgaacagaagtccttaagcagaggaattggtgtgccttaaagatacaatctgggatagtttgggggaacttgtagccagaatgccctgttcatgctgagcaaagttcagcaagtagagcagagtttggcaggcaggtgccaggaactccccttcttcctggagtgccttcattgaggaaggaaatctggcccttgggtttcctggttccactgctactgacccagaggggaatgagggctgagttatgaaaagataacttcatgaagacttaactggcccagaagctgattttcatgaaaatctgccactcagggtctgggatgaaggcttgtcagcacttccagtttagaacgcaatgtttctagagacatattggctgtttgttttgatgataaaaggagaataagaaaaggcatcactttcctggatccaggataatttttaaaccaatcaaatgaaaaaaacaaacaaacaaaaaaggaaatgtcatgtgaggttaaaccagtttgcattcccctaatgtggaaaaagtaagaggactactcagcactgtttgaagattgcctcttctacagcttctgagaattgtgttatttcacttgccaagtgaaggaccccctccccaacatgccccagcccacccctaagcatggtcccttgtcaccaggcaaccaggaaactgctacttgtggacctcaccagagaccaggagggtttggttagctcacaggacttcccccaccccagaagattagcatcccatactagactcatactcaactcaactaggctcatactcaattgatggttattagacaattccatttctttctggttattataaacagaaaatctttcctcttctcattaccagtaaaggctcttggtatctttctgttggaatgatttctatgaacttgtcttattttaatggtgggttttttttctggtaagatttagacctaaatcgcatcatgccaacttgtgactttgagactattcatcaagaatgaggatatagtagccatgacatagcttgagctatagcctttaattccttactttggctatgggtggagggtgagtttgaagaggttctgattttcttgtaacctgggaaagccatgaccttgtgcccgattctttcagattgctttgggtaataaatattggtggtggtatctga

SEQ ID NO: 53049 - DNA, 842 bp, Homo sapiens
cacgctagcgccgcccaggctggcacaaaggaggaagcctagtcccgcccctgcgtgcggcgcttctcccaggccccaccttccatccagtgccctggaccctcggctgggtagcgccaccagagcgaccaaacgtcccgcgccttccaggccgcactccagagccaaaagagctccatggcggcggcggccaagcccaacaacctttccctggtggtgcacggaccgggggacttgcgcctggagaactatcctatccctgaaccaggcccaaatgaggtcttgctgaggatgcattctgttggaatctgtggctcagatgtccactactgggagtatggtcgaattgggaattttattgtgaaaaagcccatggtgctgggacatgaagcttcgggaacagtcgaaaaagtgggatcatcggtaaagcacctaaaaccaggtgatcgtgttgccatcgagcctggtgctccccgagtctgtgccacgccccccgatgacgggaacctctgccggttctataagcacaatgcagccttttgttacaagcttcctgacaatgtcacctttgaggaaggcgccctgatcgagccactttctgtggggatccatgcctgcaggagaggcggagttaccctgggacacaaggtccttgtgtgtggagctgggccaatcgggatggtcactttgctcgtggccaaagcaatgggagcagctcaagtagtggtgactgactgtctgctccccgttggtccaaggccaggatattggggctgctttagtccttcagaatttccagggaaagcccttcggaaattgcgccggaaggtagattggcacct

SEQ ID NO: 53050 - DNA, 472 bp, Homo sapiens
gtgaccttctatggaaggaagccctgcagagaagcagcctgggaaatgttcacctctcttctcttcggtccccttccatggctccccactggtcagaccgacagaagtcagaaggagtcagggcctgtgatggggtccaggctggtcagcttccttgggcaggaacagggtgaagacagagtggatctgagaggggagtggaggagacccagccggccctccatcacagctggtctccactcgagcattccaggaatgtcaggtggatgggatctggcccggagctgacattttattcgggcaacctatgggagatggatttgccagtggtcgggagacaccacatcatccggccccagctctgactccgctcacgccttggaatgtctttagtcatttaaattcatttgcctggaactggcattgtttctccagtaagatggcaaataacaaacttcatttagtcttggct

SEQ ID NO: 53051 - DNA, 335 bp, Homo sapiens
ccggggtagggggccattgaattgggagtgctgattggttggctcagagataaaatcacagggagttgaagctgttcttttatgctgagtcagttcctgagtggaggccacagaactagttggcaggtccaggtggggtcattcggttgttagaaatggaaaaaccttatttattagggttctctatagggacagaactttatataaatataatatttatatttatatattatatatataatatttatatagttatataacatatattatatatatatatatatatatatatgtaaaggagaattttttaagtattaacttacatgatcacaagg

SEQ ID NO: 53052 - DNA, 260 bp, Homo sapiens
  misc_feature (144)..(144): n is a, c, g, or t
  misc_feature (162)..(162): n is a, c, g, or t
  misc_feature (228)..(228): n is a, c, g, or t
  misc_feature (235)..(235): n is a, c, g, or t
cacagaacccctaaaatcacactcgattgacagttgcaactgaaaagcacacccagtccaaagccgcaatggttgttatcacgctgcttccataaagtgagattcagcccccaaagatgggtctataagtttggatggcctttnctctttctccttttactngcatagcttttagaattggtgccacaattacagctttaactgggtgaagatagattgaagggtagntagatgntatataaaagacaggcctccttcct

SEQ ID NO: 53053 - DNA, 354 bp, Homo sapiens
tatctagtatattattctggaggtgaggcaagtatttaataatgatgttttgaaaagtaaagtaatcgcaaaagtaatcaatttaactctctccatttgaagtcttaatcttcagctatatggaaaattcagatattcagaaagatacttcttttctctgaggattccagagaataaaagtttacttgataataacaaataagttgatttttaggcaatcacatgtattaattccaaaataatttttttacattgaagatttagcctggagaaaagaagtttagaactcttttaataagtgaaaatatgcagaggaaacagagctgcagctaattcccacctgcattcagaaag

SEQ ID NO: 53054 - DNA, 306 bp, Homo sapiens
aacccttcagtttccttacaggctttcgagtgcacatgagaatgcacactggagagaaaccttataaatgtaaggattgtggcaacgccttcatttggcgtgcatccttacaataccatgtgaagaaagtgcacgctgaatagaaactataaatgtaaatatcgaaagtttttcaattttaacgattttcaaagttgatatgaaagttcatactggagggtagttgcatgaatgtaagtaatacaggaaagcctgatataacttaattcaggtagaatgctctagaaaattcatgccatgaaaaaa

SEQ ID NO: 53055 - DNA, 243 bp, Homo sapiens
agggaccagcagagactgttcacaaaatgaccccgaagaaaacgtcacacttcatgtattttcaaacccatgaagaatagttatgaatcaaagctgagtcttaaatctcatttcaattccaactttcctcctaccaaaggaaaggaggcatattgttaagttcaaaagacccaaacaagatatcaaaaagttgcctgtgagcaccaaaaaaaagatatttcatataatttatctgcaaatacc

SEQ ID NO: 53056 - DNA, 439 bp, Homo sapiens
aaaatgagtatagaatacatacagcaaagtgtatctagtaggctaatattaaatgcatagtgatacatttttgcataggtttgcacccatgggacccctactgggatcatggagaaggtgtctgattcactttatgagaaactgccaacaaactcaaagtgagatagtactttatccttactaggatggttacaattaaaaggacacggtcagtgttggaggggatgtggaaaaatcagaaccttcgcgcactgctggtgggaatgtgaaatggtttgcttgctttagaaaacagtctggcagtttcttttgggggtgatggttgcacaactctgtaaatttactaaaaaccattgaattatatactttaaatgagtgaattttgtggcatgtaacttatatctcattaaaggtgttaaaatcctgccaaaccattttc

SEQ ID NO: 53057 - DNA, 985 bp, Homo sapiens
gtactttgtgatggaactcccctgcctggagatggcaggattaaagttcctctttgtctgtctaccattgacaagagtgaaatcatggcacagaaagagttgggaagactcagatttgagctgcagagacgtgacttttcgagcaagttactgaacctgtctgagaatcattatctctgtgtgagcacgagagtttttgtgaaagtagaaacgctgtgtattaagtacctgaacatactcagtaacttgtaacaattataagtctttaaacaacctttctgccttataatgctttgggaatcaatttcaggatgatttttaggggaaaaaggaaattctaatttgtagcagaaccaactttggcatacctgggggaaatggtggtatagtaataatttgaaacatttttgagcattggtcactgtataattaaaaacaaaccgctgttgctgaaactattttgtctgttagtaaagtgactgattttagatagcatttcattagttctaagtgttcttttaaaaaagcctgcttctatttctggtaacatggaggattagaagtgcctactgataatagttcagctaaacgtgctacatgatatgttacacacacacttgtgtatactgtatcttaaattatatatacacatcttgaaacacatttaagtgtttttagtaaatagtttagctggtgggagagtaaagggatttttctgaggcctgcgtcagttagtgctgtagatccagtgtggtccttgaaagtatctgccggttcctggtggcatagacactgagttttgataggcagtgaacatggggcacagatataaaggctgaggccggggaagaggacataaaagacatgtggataatgtgagaactcccgaagagtggcagcatcctccccgtgggagctattaaaaagaattcttaaacacaggaccacactcacactggtctggagcaagaattcatactatttg

SEQ ID NO: 53058 - DNA, 782 bp, Homo sapiens
agcggtaacgagggtgggggaaccggcaggatgactttgagaaaaagcaaggcacagcatgggtttgcaggccaggcggacctgggtttgaatcctagtcctgctactcagttgctttgcagcaataggccagttactaaacttccttatgcttctgtctccccatctgtaaaatgggctaatgcccacctctcaggattaagtgagaggctgtacctagagtgcatggcaggtgggaggcatttgggaagtatgcgctgggagaccgggggtctctaaagatggagatatttgggcttgagccccttcctgccacctttcctcctatctctgcctctgctcgctgctccaaaccctgtttctttactcccaggtagctgacactgagaagctatcagagatacaggcaaaagattagttgggaaacttttctggaaaactagtctatcttctcttgagttcctgtctcaacatatatgtgcccccttgttccactgactgaacggataagccctcctgtgggtgggctttcttgtcatctggtccacctttctcttagagaggacccctgcctccctcacttcagtccgttcgcagcacagtggggagaaggatggctttgggatcaggcaaaatccaagcctggccacttagtcgttgaacgtcatttcacctctctaagcctcagtttccttatctgcaaaatggaccaattgtgactagataatgagagaagccatgtaacagtatagttccaattgccagtccatgaacgagtgctg

SEQ ID NO: 53059 - DNA, 538 bp, Homo sapiens
gtgactgggcggtgccggcgccggagacgatgccgtttccagttacaacacagggatcacaacaaacacaaccgccacagaagcactatggcattacttctcctatcagcttagcagcccccaaggagactgactgcgtacttacacagaaactaattgagacattgaaaccctttggggtttttgaagaggaagagaaactgcagcgcaggattttaattttgggaaaactaaatagtcccacatgtggtcatcagaaaataagccattcctcataccaatataggatcagctccttgacctctgaggggcaggagtgcttcctggtgtgtgtattagaatcccttcctgccttgtttcatggcagtgaaatgcctcttggtcctgtccaagtgtatctttcactgatttctgaatcatgttctagttgcttgaccctgccacatgggtccagtgttcatctgagcataactgtactaaatcctttttccatatcagtataataaaggagtgatgtgcaaaaaaaaaaaaaaaaaaa

SEQ ID NO: 53060 - DNA, 1255 bp, Homo sapiens
ggtgttctctgtttttgctacttgtgggttttactgtcttgcgttcgtcagtgtttagtgctgttctagatttatgttgcatcgttagtcaggcgcatgggctgtcagtgttgtcgttcgggctttatctcatcctttgtgtgcaggagcgacgagcgccaagaagcaggtgtagtgatgtatggttctatctttcatagcttattcctgtagctgatcaccattaggagtgttgtgatatgagtcggatgttggtctgtgtgcttgtttttttgaatatgagagtacagtgatttattatttgaggtctggttgtttgattagtgtgtagacagcgggagtgagtagttgtaatgttgtgaataaccgagatgctaaaagtgagctaatagcgtgttaagaatatagtctgggggttgctatcctttcgtgtggtcttgcatggctctgtgggtttacttcttccgggctcgtcaattctccagatttacatgtcatgctcgccggattacgggtggacaagccccgtggcatagcccatgaagggtctgagaaagtttgatcccgccagggctctgctggttcgcatgttcagcctgcccggcctctagggccggggtatctgtccgtccagtctcatgaagcttcaccttgtcgtagcctcccaaagccgttgagcactaggcagcgcagctagtggcagacgaagacagacggtcaggtcgtcggcacccattcggacgtcctcgggtatctctggtgttcgctctgctgcctcgtttttcgggagtcgccgaagaggcgtcgtccccggtcgctgcctcggctaccgctgctctcgtcggacatggctgggactcccgtacgagagcgcacagctggatggagagtgcacagctggggaaggcggaacgcgtcggcctcgtgccgaattcggcacgaggccattgtctatgaattggaataccagtcggcaggttcagctccatgatagcctcttcagagagaccctgccgactggtattcccattgtctatgaattggacaagaacttgaagcctatcaagcccatgcagtttctgggggatgaagagacggtgcgcaaagccatggaagctgtggctgcccagggcaaggccaagaagtgaaggccggcggggaggatactgtccccaggagcaccctccctgcccgtcttgtccctctgcctctgcagctacaactcaagatgtctacagatgtggtcagtgtgaca

SEQ ID NO: 53061 - DNA, 835 bp, Homo sapiens
tcacactgaccacatctgtagacatgaccagtggctcccattttcattttagccattttgtcgcctgcacccactcccttcatacaatctagtcagaatagcagttctagagcacaggttctcagtctaagctatggaaaagctccccttatccaacagagtttaaaagtagtgacttgggtttttgcgagtgctttgtttactaaggactttggggaggaaccatgctaagccatgaccagtgaggagaagcaacagagcctgtctgtccccatgagcggagtctgtcctctgctcttctgcagtcaggtcactgcctactgcctgggggctctagtcattccagtggaagacgaatgtaacctgcgtggtgatgtgacaactgtttcctccctgaccccagaggatctggctctaggttgggatcaatcctgaatttcgttatgtgttaatttacttttattaaaaaagtatagtatatataaataatacaaaacaataacccttctggggtttcttgtggcggttgaaatagtcccacatgtggtcatcagaaaataagccattcctcataccaatataggatcagctccttgacctctgaggggcaggagtgcttcctggtgtgtgtattagaatcccttcctgccttgtttcatggcagtgaaatgcctcttggtcctgtccaagtgtatctttcactgatttctgaatcatgttctagttgcttgaccctgccacatgggtccagtgttcatctgagcataactgtactaaatcctttttccatatcagtataataaaggagtgatgtgcaaaaaaaaaaaaaaaaaaa

SEQ ID NO: 53062 - DNA, 1162 bp, Homo sapiens
tcacactgaccacatctgtagacatgaccagtggctcccattttcattttagccattttgtcgcctgcacccactcccttcatacaatctagtcagaatagcagttctagagcacaggttctcagtctaagctatggaaaagctccccttatccaacagagtttaaaagtagtgacttgggtttttgcgagtgctttgtttactaaggactttggggaggaaccatgctaagccatgaccagtgaggagaagcaacagagcctgtctgtccccatgagcggagtctgtcctctgctcttctgcagtcaggtcactgcctactgcctgggggctctagtcattccagtggaagacgaatgtaacctgcgtggtgatgtgacaactgtttcctccctgaccccagaggatctggctctaggttgggatcaatcctgaatttcgttatgtgttaatttacttttattaaaaaagtatagtatatataaataatacaaaacaataacccttctggggtttcttgtggcggttgaaatagtcccacatgtggtcatcagaaaataagccattcctcataccaatataggatcagctccttgacctctgaggggcaggagtgcttcctggtgtgtgtattagaatcccttcctgccttgtttcatggcagtgaaatgcctcttggtcctgtccaagtgtatctttcactgatttctgaatcatgttctagttgcttgaccctgccacatgggtccagtgttcatctgagcataactgtactaaatcctttttccatatcagtataataaaggagtgatgtgcaaaaaaaaaaaaaaaaaaaaaaaacaaaaaaaaaaaacaaaaaaaaaaatttaacagaaaaacaacaacagatggaggaaaacaaaaaaatgcgctgggcgcgcccgcgcgccgcccccagaaaaatttcttaaacaccaacgtcgtgggggggggcgccggcccccaggttaagagaaacagtgtggcccaacggtgctgccccggagaaaacaccgcgcacaacatgggcgcgggggttctcccccccaaaagaaagagcgcgcggggcacagcgggtttctgaaaccccacgagggtccgcgggcagcagggggtcacacaggagaccacgagggagaaatag

SEQ ID NO: 53063 - DNA, 901 bp, Homo sapiens
cagtcggtgccgcatccccagcccgccgccatggccgcctacaaactggtgctgatccggcacggcgagagcgcatggaacctggagaaccgcttcagcggctggtacgacgccgacctgagcccggcgggccacgaggaggcgaagcgcggcgggcaggcgctacgagatgctggctatgagtttgacatctgcttcacctcagtgcagaagagagcgatccggaccctctggacagtgctagatgccattgatcagatgtggctgccagtggtgaggacttggcgcctcaatgagcggcactatgggggtctaaccggtctcaataaagcagaaactgctgcaaagcatggtgaggcccaggtgaagatctggaggcgctcctatgatgtcccaccacctccgatggagcccgaccatcctttctacagcaacatcagtaaggatcgcaggtatgcagacctcacagaagatcagctaccctcctgtgagagtctgaaggatactattgccagagctctgcccttctggaatgaagaaatagttccccagatcaaggaggggaaacgtgtactgattgcagcccatggcaacagctccggggcattgtcaagcatctggagggtctctctgaagaggctatcatggagctgaacctgccgactggtattcccattgtctatgaattggacaagaacttgaagcctatcaagcccatgcagtttctgggggatgaagagacggtgcgcaaagccatggaagctgtggctgcccagggcaaggccaagaagtgaaggccggcggggaggatactgtccccaggagcaccctccctgcccgtcttgtccctctgcctctgcagctacaactcaagatgtctacagatgtggtcagtgtgaca

SEQ ID NO: 53064 - DNA, 988 bp, Homo sapiens
cagtcggtgccgcatccccagcccgccgccatggccgcctacaaactggtgctgatccggcacggcgagagcgcatggaacctggagaaccgcttcagcggctggtacgacgccgacctgagcccggcgggccacgaggaggcgaagcgcggcgggcaggcgctacgagatgctggctatgagtttgacatctgcttcacctcagtgcagaagagagcgatccggaccctctggacagtgctagatgccattgatcagatgtggctgccagtggtgaggacttggcgcctcaatgagcggcactatgggggtctaaccggtctcaataaagcagaaactgctgcaaagcatggtgaggcccaggtgaagatctggaggcgctcctatgatgtcccaccacctccgatggagcccgaccatcctttctacagcaacatcagtaaggatcgcaggtatgcagacctcacagaagatcagctaccctcctgtgagagtctgaaggatactattgccagagctctgcccttctggaatgaagaaatagttccccagatcaaggaggggaaacgtgtactgattgcagcccatggcaacagctccggggcattgtcaagcatctggagggtctctctgaagaggctatcatggagctgaacctgccgactggtattcccattgtctatgaattggacaagaacttgaagcctatcaagcccatgcagtttctgggggatgaagagacggtgcgcaaagccatggaagctgtggctgccctggtgtgtgtattagaatcccttcctgccttgtttcatggcagtgaaatgcctcttggtcctgtccaagtgtatctttcactgatttctgaatcatgttctagttgcttgaccctgccacatgggtccagtgttcatctgagcataactgtactaaatcctttttccatatcagtataataaaggagtgatgtgcaaaaaaaaaaaaaaaaaaa

SEQ ID NO: 53065 - DNA, 507 bp, Homo sapiens
cccctgcccatacctccagattaccccttcttctgagggatcaaggtagtactgtaccttgctcctcaggggcataatcaccactacaacgtggcaccttgaacccaagctgctagggggtgcctcagagtcacaaatcttggcttcatgggaaacctacatctaatcctgccaaggagagcaaacttgcacctcaagacccaggtgccataacagtgcaaggccaagatgaaaggtttccacagcagagaacaagaaatgaattatctcattcaaggatgagaggagaacataatttatcttggatgaactactgtgctagagagctaagaaggaatgaagtgaagattttcaaacccctgagggagggctgtgcattgcctgaatgaagaaccaacttggaaaatgtatctctgagcaagggctggaatagaataacgttaggacagagaaaaaagttctgaggcagatcacccctgcactgtgagaggtactggtttctgaagt

SEQ ID NO: 53066 - DNA, 243 bp, Homo sapiens
aaaaaataagaaaaaaagagaaggaaacaaagtcataaacatattgctgttgcctcaggttgcatgtcatgtttgttcccaggcctctcgtgaccattctggctcaggctgtgaacagcctcagaggagtctgaaatcccaaaaggatagtgatatttaaagtcagtaatcctctaacagaatctctctcagagactatgccaagcctccataccatcagcattttctctctgtatatataca

SEQ ID NO: 53067 - DNA, 1108 bp, Homo sapiens
tacgcttgaatattgatgggaaaaaagctgccaacttataggtgctcaacaagcatttgttaaggtacagttttgaccttggagtttcatttcagtccccgttgtccccagcttggctatgtgaagggcaccctgaccctggactaaagagagacagccctgccttctgattcttaatggcatttggtctcatgcacttccaaggattgtgcctggtgacaccccccaaaaaagtatttgaattctccaaagacagactatagaccacaccgtttgtcccctaagttattaaccaatcatgtgaatataaaccaacaaatttctgatacttctgattctctcttaattgggatgatatttgaataaataacttccagtgtacattcagtgaaataggttcctaagtattgggcttacaatacacattcacagaattccccgggtcttaaacttttatattccaatcaatcctaacctttttttttaagctacactttaatatcagtttattgcttcttattaaaattaataataataataataataaaatttactctttgatcttactgttacataatatgctcactgaataataagtagaggatacagataagcaacaaagataataaaggtttttgaaatccaccagagatactatttcctgccaatgtctacatctatgtaaatatatatttgttgtatctttaaattttaaatttttcagtattttattgccatattcttacaaaagtcatttaaatattacatcttcattgtacacaaattagacaataaagatttaagaaaacatttgttgagcatctgtacctgacctagtagagatttccaaggccatatgctggtgcatatcttctcagcatttaagatatctaaaaccggctgggcgcggtggctcacgcctgtaatcccagcactttgggaggccgaggcgggcggatcacgaggtcaggagatcgagaccatcctggctaacacggtgaaaccccgtctctactaaaaatacaaaaaattagccgggcgtggtggcgggcgcctgtagtcccagctactcgggaggctgaggcaggagaatggcatgaacctggga

SEQ ID NO: 53068 - DNA, 188 bp, Homo sapiens
  misc_feature (7)..(7): n is a, c, g, or t
tgagganacccatcctgccacccacagcaccctgtggcctgttcaaggcagaaccacgacccttgactcccgggtggggaggtggccaaggatgctggagctgaatcagacgctgacagttcttcaggcatttctatttcacaatcgaattgaacacattggccaaataaagttgaaattttaccacc

SEQ ID NO: 53069 - DNA, 360 bp, Homo sapiens
gcggccgcctactactactactactgctcgaattcaagcttctaacgatgtacggggacagggtgtcccccatgcctggaagaggagctggtggctgccagccctggggcccggcacaggcctgggccttccccttccctcaagccagggctcctcctcctgtcgtgggctcattgtgaccactggcctctctacagcacggcctgtggcctgttcaaggcagaaccacgacccttgactcccgggtggggaggtggccaaggatgctggagctgaatcagacgctgacagttcttcaggcatttctatttcacaatcgaattgaacacattggccaaataaagttgaaattttaccacc

SEQ ID NO: 53070 - DNA, 205 bp, Homo sapiens
ctgacagttcttcaggcatttctatttcacaatcgaattgaacacatcctgtggcctgttcaaggcagaaccacgacccttgactcccgggtggggaggtggccaaggatgctggagctgaatcagacgctgacagttcttcaggcatttctatttcacaatcgaattgaacacattggccaaataaagttgaaattttaccacc

SEQ ID NO: 53071 - DNA, 209 bp, Homo sapiens
  misc_feature (7)..(7): n is a, c, g, or t
tgagganacccatcctgccacccacagcaccctgtggcctgttcaaggcagaaccacgacccttgactcccgggtggggaggtggccaaggatgctggagctgaatcagacgctgacagttcttcaggcatttctatttcacaatcgaattgaacacattggccaaataaagttgaaattttaccaccagtaaaaaaatttctttttgt

SEQ ID NO: 53072 - DNA, 935 bp, Homo sapiens
ggaacgcgtgggcggacgcgtgggtgtgcctggacttcatgctggggctgttgtccctgccgagatgtggaccctctgtagactccatggtgccaagctgggagacacacatacgccttccatgcccagtggaagggtccaaggctgagctgggattcccagggttcctgacacagtgggggctctgattcatcctgctataggcagaaatcccccaggcgtcactcttcctgggaagacccctgtgtagctcgtaaagaccagggttggctgctccagtggccggtggccattgttccgccgtggccggctagtccccggtgtgagcagtgtggggtgctgggggccggcagcctcagctgttgcagccaacctgcccgccccgccccttttcctgtatcccagggatctcgaggacctggaagaagcagaggagccagacatggaggaagacgatgatcagaaagctgtgaaagatgaactgtaatacgcaaagccagacccgggcgctgccgagacccctcgggggctgcacacccagcagcagcgcacgcctccgaagcctgcggcctcgcttgaaggagggcgtcgccggaaacccagggaacctctctgaagtgacacctcacccctacacaccgtccgttcacccccgtctcttccttctgcttttcggtttttggaaagggatccatctccaggcagcccaccctggtggggcttgtttcctgaaaccatgatgtactttttcatacatgagtctgtccagagtgcttgctaccgtgttcggagtctcgctgcctcaccaagacccttgcttcctgcttctgccagaactatcacttcttgtcaggactgagattccactgaagctgctggctttggttacagcaggtttcaggtttcgaagagagctgtctgaatctgtgctgctc

SEQ ID NO: 53073 - DNA, 977 bp, Homo sapiens
ttagtctaggtacgaggctgggttgcgcatgaatatacagctggcagagaggctgatgacatcgtgaactggctgaagaagcgcacgggcccggctgccaccaccctgcctgacggcgcagctgcagagtccttggtggagtccagcgaggtggctgtcatcggcttcttcaagacgtggagtcggactctgccaagcagcttcttcgccaggcagccagcaggcccatcgcatgcacactaccaactttgcgcgacccacctttcccaaccaaggtgcacgctgcttcctcccaaccactacacagacatcgcacccaaacgcatgcgcggctcaggtcccctcctttcttcaacgcaaacgcttcttgcacgtgcacacggcggcccgggccaacccaccccctttccgcacaagcggcgaagcagacggttccgaccccacacggggctaccgacagcccggttggccattgtggcaaccgttagtcgcacgtccggagacatcatctcacgccaacagcctccgaacgcacccgttggccccgccacaggtcattgagcttccaaagtcccgagccaaagggacatgaccaagacgccagagacagcggtgccggcgtggttaacccaacgcgccggctccgccagggcgcactcaagtcccaagatactcgcgcgacacagggccgtcacaacgcgcggattttcgcacaacagaaacttatccgcacgaaactcagcacacccagttccgcgaaaccgcgcaacgtttgaccccagctctgggccgcgcaatggggccgccaacaacccgcgttcatcggcacccccagcccgccaaaaacgggccaaacggccctcggacctacgcgcttccccacgcacgcggaacacccattcccagtatgcgcaaaccacaagcatgacccaccacccccacacaccccgcaccggaccacaccgcacccatcacca

SEQ ID NO: 53074 - DNA, 719 bp, Homo sapiens
actcctagaggatcccagatcccctttccatccggaggagctgacggcagagaggatcacagagttctgccaccgcttcctggagggcaaaatcaagccccacctgatgagccaggagctgccggaggactgggacaagcagcctgtcaaggtgcttgttgggaagaactttgaagacgtggcttttgatgagaaaaaaaacgtctttgtggagttctatgccccatggtgtggtcactgcaaacagttggctcccatttgggataaactgggagagacgtacaaggaccatgagaacatcgtcatcgccaagatggactcgactgccaacgaggtggaggccgtcaaagtgcacagcttccccacactcaagttctttcctgccagtgccgacaggacgacggtgcgccttccctccagacggggctggggcgggctctgggaagagcagtggtccccacgccagcctgggtgcctctctggaaggagcctggggctagtcaggtgggagaagagctgtgggagctccttcagaagcacccacctttgtttttcgagagagatgggatctcactatattgcctaggctgtttttgaactcccaatgtgctggattccgggtgtgagccaccggaccgggcctgctctgcctttctctagggaggaggagccaatgccaggagattggctctgggccgggaccagcccctgcactcatc

SEQ ID NO: 53075 - DNA, 352 bp, Homo sapiens
ggctgctgtgacttcccacgtccagggagacccgggcccaggggctgtgctcccagcagcaatgctcagtcagggccctctttctgtccacatttgatgaaggccggaacaactttgaaggggaggtcaccaaggagaacctgctggactttatcaaacacaaccagctgccccttgtcatcgagttcaccgagcagacagccccgaagatttttggaggtgaaatcaagactcacatcctgctgttcttgcccaagagtgtgtctgactatgacggcaaactgagcaacttcaaaacagcagccgagagcttcaagggcaagaggtgagctgctcttctgggtggctcgtg

SEQ ID NO: 53076 - DNA, 780 bp, Homo sapiens
  misc_feature (26)..(26): n is a, c, g, or t
aaggctaggtacgaggccgggtgttnagccaaccgaagcgccccgcctgatccgtgtccgacatgctgcgccgcgctctgctgtgcctggccgtggccgccctggtgcgcgccgacgcccccgaggaggaggaccacgtcctggtgctgcggaaaagcaacttcgcggaggcgctggcggcccacaagtacctgctggtggagttctatgccccttggtgtggccactgcaaggctctggcccctgagtatgccaaagccgctgggaagctgaaggcagaaggttccgagatcaggttggccaaggtggacgccacggaggagtctgacctggcccagcagtacggcgtgcgcggctatcccaccatcaagttcttcaggaatggagacacggcttcccccaaggaatatacagctggcagagaggctgatgacatcgtgaactggctgaagaagcgcacgggcccggctgccaccaccctgcctgacggcgcagctgcagagtccttggtggagtccagcgaggtggctgtcatcggcttcttcaaggacgtggagtcggactctgccaagcagtttttgcaggcagcagaggccatcgatgacataccatttgggatcacttccaacagtgacgtgttctccaaataccagctcgacaaagatggggttgtcctctttaagaagttggtgacggccgacacactttgaggcgaggtctccagggaaactggtggctatcaaaccaacagtgccctgctcagtacgagaaagccaaatt

SEQ ID NO: 53077 - DNA, 778 bp, Homo sapiens
  misc_feature (765)..(765): n is a, c, g, or t
tatggctagtgggctggggtttatcggccgaggcgctgtcccggggtgcagccaaccgaagcgccccgcctgatccgtgtccgacatgctgcgccgcgctctgctgtgcctggccgtggccgccctggtgcgcgccgacgcccccgaggaggaggaccacgtcctggtgctgcggaaaagcaacttcgcggaggcgctggcggcccacaagtacctgctggtggagttctatgccccttggtgtggccactgcaaggctctggcccctgagtatgccaaagccgctgggaagctgaaggcagaaggttccgagatcaggttggccaaggtggacgccacggaggagtctgacctggcccagcagtacggcgtgcgcggctatcccaccatcaagttcttcaggaatggagacacggcttcccccaaggaatatacagctggcagagaggctgatgacatcgtgaactggctgaagaagcgcacgggcccggctgccaccaccctgcctgacggcgcagctgcagagtccttggtggagtccagcgaggtggctgtcatcggcttcttcaaggacgtggagtcggactctgccaagcagtttttgcaggcagcagaggccatcgatgacataccatttgggatcacttccaacagtgacgtgttctccaaataccagctcgacaaagatggggttgtcctctttaagaagtgaaggccggaacaactttgaaggagaggggaggagaggggctttcaaaggggatngtgtagagcgacc

SEQ ID NO: 53078 - DNA, 2445 bp, Homo sapiens
aagcaggctggtcccggtccgagtgtatggatgccaaccgaagcgccccgcctgatccgtgtccgacatgctgcgccgcgctctgctgtgcctggccgtggccgccctggtgcgcgccgacgcccccgaggaggaggaccacgtcctggtgctgcggaaaagcaacttcgcggaggcgctggcggcccacaagtacctgctggtggagttctatgccccttggtgtggccactgcaaggctctggcccctgagtatgccaaagccgctgggaagctgaaggcagaaggttccgagatcaggttggccaaggtggacgccacggaggagtctgacctggcccagcagtacggcgtgcgcggctatcccaccatcaagttcttcaggaatggagacacggcttcccccaaggaatatacagctggcagagaggctgatgacatcgtgaactggctgaagaagcgcacgggcccggctgccaccaccctgcctgacggcgcagctgcagagtccttggtggagtccagcgaggtggctgtcatcggcttcttcaaggacgtggagtcggactctgccaagcagtttttgcaggcagcagaggccatcgatgacataccatttgggatcacttccaacagtgacgtgttctccaaataccagctcgacaaagatggggttgtcctctttaagaagtttgatgaaggccggaacaactttgaaggggaggtcaccaaggagaacctgctggactttatcaaacacaaccagctgccccttgtcatcgagttcaccgagcagacagccccgaagatttttggaggtgaaatcaagactcacatcctgctgttcttgcccaagagtgtgtctgactatgacggcaaactgagcaacttcaaaacagcagccgagagcttcaagggcaagatcctgttcatcttcatcgacagcgaccacaccgacaaccagcgcatcctcgagttctttggcctgaagaaggaagagtgcccggccgtgcgcctcatcaccctggaggaggagatgaccaagtacaagcccgaatcggaggagctgacggcagagaggatcacagagttctgccaccgcttcctggagggcaaaatcaagccccacctgatgagccaggagctgccggaggactgggacaagcagcctgtcaaggtgcttgttgggaagaactttgaagacgtggcttttgatgagaaaaaaaacgtctttgtggagttctatgccccatggtgtggtcactgcaaacagttggctcccatttgggataaactgggagagacgtacaaggaccatgagaacatcgtcatcgccaagatggactcgactgccaacgaggtggaggccgtcaaagtgcacagcttccccacactcaagttctttcctgccagtgccgacaggacggtcattgattacaacggggaacgcacgctggatggttttaagaaattcctggagagcggtggccaggatggggcaggggatgatgacgatctcgaggacctggaagaagcagaggagccagacatggaggaagacgatgatcagaaagctgtgaaagatgaactgtaatacgcaaagccagacccgggcgctgccgagacccctcgggggctgcacacccagcagcagcgcacgcctccgaagcctgcggcctcgcttgaaggagggcgtcgccggaaacccagggaacctctctgaagtgacacctcacccctacacaccgtccgttcacccccgtctcttccttctgcttttcggtttttggaaagggatccatctccaggcagcccaccctggtggggcttgtttcctgaaaccatgatgtactttttcatacatgagtctgtccagagtgcttgctaccgtgttcggagtctcgctgcctccctcccgcgggaggtttctcctctttttgaaaattccgtctgtgggatttttagacatttttcgacatcagggtatttgttccaccttggccaggcctcctcggagaagcttgtcccccgtgtgggagggacggagccggactggacatggtcactcagtaccgcctgcagtgtcgccatgactgatcatggctcttgcatttttgggtaaatggagacttccggatcctgtcagggtgtcccccatgcctggaagaggagctggtggctgccagccctggggcccggcacaggcctgggccttccccttccctcaagccagggctcctcctcctgtcgtgggctcattgtgaccactggcctctctacagcacggcctgtggcctgttcaaggcagaaccacgacccttgactcccgggtggggaggtggccaaggatgctggagctgaatcagacgctgacagttcttcaggcatttctatttcacaatcgaattgaacacattggccaaataaagttgaaattttaccacc

SEQ ID NO: 53079 - DNA, 2882 bp, Homo sapiens
  misc_feature (2585)..(2585): n is a, c, g, or t
aagcaggctggtcccggtccgagtgtatggatgccaaccgaagcgccccgcctgatccgtgtccgacatgctgcgccgcgctctgctgtgcctggccgtggccgccctggtgcgcgccgacgcccccgaggaggaggaccacgtcctggtgctgcggaaaagcaacttcgcggaggcgctggcggcccacaagtacctgctggtggagttctatgccccttggtgtggccactgcaaggctctggcccctgagtatgccaaagccgctgggaagctgaaggcagaaggttccgagatcaggttggccaaggtggacgccacggaggagtctgacctggcccagcagtacggcgtgcgcggctatcccaccatcaagttcttcaggaatggagacacggcttcccccaaggaatatacagctggcagagaggctgatgacatcgtgaactggctgaagaagcgcacgggcccggctgccaccaccctgcctgacggcgcagctgcagagtccttggtggagtccagcgaggtggctgtcatcggcttcttcaaggacgtggagtcggactctgccaagcagtttttgcaggcagcagaggccatcgatgacataccatttgggatcacttccaacagtgacgtgttctccaaataccagctcgacaaagatggggttgtcctctttaagaagtttgatgaaggccggaacaactttgaaggggaggtcaccaaggagaacctgctggactttatcaaacacaaccagctgccccttgtcatcgagttcaccgagcagacagccccgaagatttttggaggtgaaatcaagactcacatcctgctgttcttgcccaagagtgtgtctgactatgacggcaaactgagcaacttcaaaacagcagccgagagcttcaagggcaagatcctgttcatcttcatcgacagcgaccacaccgacaaccagcgcatcctcgagttctttggcctgaagaaggaagagtgcccggccgtgcgcctcatcaccctggaggaggagatgaccaagtacaagcccgaatcggaggagctgacggcagagaggatcacagagttctgccaccgcttcctggagggcaaaatcaagccccacctgatgagccaggagctgccggaggactgggacaagcagcctgtcaaggtgcttgttgggaagaactttgaagacgtggcttttgatgagaaaaaaaacgtctttgtggagttctatgccccatggtgtggtcactgcaaacagttggctcccatttgggataaactgggagagacgtacaaggaccatgagaacatcgtcatcgccaagatggactcgactgccaacgaggtggaggccgtcaaagtgcacagcttccccacactcaagttctttcctgccagtgccgacaggacggtcattgattacaacggggaacgcacgctggatggttttaagaaattcctggagagcggtggccaggatggggcaggggatgatgacgatctcgaggacctggaagaagcagaggagccagacatggaggaagacgatgatcagaaagctgtgaaagatgaactgtaatacgcaaagccagacccgggcgctgccgagacccctcgggggctgcacacccagcagcagcgcacgcctccgaagcctgcggcctcgcttgaaggagggcgtcgccggaaacccagggaacctctctgaagtgacacctcacccctacacaccgtccgttcacccccgtctcttccttctgcttttcggtttttggaaagggatccatctccaggcagcccaccctggtggggcttgtttcctgaaaccatgatgtactttttcatacatgagtctgtccagagtgcttgctaccgtgttcggagtctcgctgcctccctcccgcgggaggtttctcctctttttgaaaattccgtctgtgggatttttagacatttttcgacatcagggtatttgttccaccttggccaggcctcctcggagaagcttgtcccccgtgtgggagggacggagccggactggacatggtcactcagtaccgcctgcagtgtcgccatgactgatcatggctcttgcatttttgggtaaatggagacttccggatcctgtcagggtgtcccccatgcctggaagaggagctggtggctgccagccctggggcccggcacaggcctgggccttccccttccctcaagccagggctcctcctcctgtcgtgggctcattgtgaccactggcctctctacagcacggcctgtggcctgttcaaggcagaaccacgacccttgactcccgggtggggaggtggccaaggatgctggagctgaatcagacgctgacagttcttcaggcatttctatttcacaatcgaattgaacacattggccaaataaagttgaaattttaccaccaaaaaaaaaaaaaaaaaaaaaaaaaaaaaaaagggggggggggggaaaaaaaaccccgggggggcccattgccccccctttttttggaaaagggcgggccaaagagaggggggttaaaagcacaagaggcgcgcggggtnaacaacggggcgggggcaacacgccggcgcggtagtttggagagacccgctctgtgcgcggtgggccacattgtgggccgcccccagagatttacgagcaggaaaaaacgcggttaggtggaacgcggccatgctgtgctgtagtttgtctggatttataagcatcgctctcgtacagatacagcaagaaaccccgcacagaggatacgcaataagaagaagtacgtagtcaacggcaacgcgagaccgctgtcgaactaacgactggatacaagcactagtctaggcacgactgtg

SEQ ID NO: 53080 - DNA, 2888 bp, Homo sapiens
aagcaggctggtcccggtccgagtgtatggatgccaaccgaagcgccccgcctgatccgtgtccgacatgctgcgccgcgctctgctgtgcctggccgtggccgccctggtgcgcgccgacgcccccgaggaggaggaccacgtcctggtgctgcggaaaagcaacttcgcggaggcgctggcggcccacaagtacctgctggtggagttctatgccccttggtgtggccactgcaaggctctggcccctgagtatgccaaagccgctgggaagctgaaggcagaaggttccgagatcaggttggccaaggtggacgccacggaggagtctgacctggcccagcagtacggcgtgcgcggctatcccaccatcaagttcttcaggaatggagacacggcttcccccaaggaatatacagctggcagagaggctgatgacatcgtgaactggctgaagaagcgcacgggcccggctgccaccaccctgcctgacggcgcagctgcagagtccttggtggagtccagcgaggtggctgtcatcggcttcttcaaggacgtggagtcggactctgccaagcagtttttgcaggcagcagaggccatcgatgacataccatttgggatcacttccaacagtgacgtgttctccaaataccagctcgacaaagatggggttgtcctctttaagaagtttgatgaaggccggaacaactttgaaggggaggtcaccaaggagaacctgctggactttatcaaacacaaccagctgccccttgtcatcgagttcaccgagcagacagccccgaagatttttggaggtgaaatcaagactcacatcctgctgttcttgcccaagagtgtgtctgactatgacggcaaactgagcaacttcaaaacagcagccgagagcttcaagggcaagatcctgttcatcttcatcgacagcgaccacaccgacaaccagcgcatcctcgagttctttggcctgaagaaggaagagtgcccggccgtgcgcctcatcaccctggaggaggagatgaccaagtacaagcccgaatcggaggagctgacggcagagaggatcacagagttctgccaccgcttcctggagggcaaaatcaagccccacctgatgagccaggagctgccggaggactgggacaagcagcctgtcaaggtgcttgttgggaagaactttgaagacgtggcttttgatgagaaaaaaaacgtctttgtggagttctatgccccatggtgtggtcactgcaaacagttggctcccatttgggataaactgggagagacgtacaaggaccatgagaacatcgtcatcgccaagatggactcgactgccaacgaggtggaggccgtcaaagtgcacagcttccccacactcaagttctttcctgccagtgccgacaggacggtcattgattacaacggggaacgcacgctggatggttttaagaaattcctggagagcggtggccaggatggggcaggggatgatgacgatctcgaggacctggaagaagcagaggagccagacatggaggaagacgatgatcagaaagctgtgaaagatgaactgtaatacgcaaagccagacccgggcgctgccgagacccctcgggggctgcacacccagcagcagcgcacgcctccgaagcctgcggcctcgcttgaaggagggcgtcgccggaaacccagggaacctctctgaagtgacacctcacccctacacaccgtccgttcacccccgtctcttccttctgcttttcggtttttggaaagggatccatctccaggcagcccaccctggtggggcttgtttcctgaaaccatgatgtactttttcatacatgagtctgtccagagtgcttgctaccgtgttcggagtctcgctgcctccctcccgcgggaggtttctcctctttttgaaaattccgtctgtgggatttttagacatttttcgacatcagggtatttgttccaccttggccaggcctcctcggagaagcttgtcccccgtgtgggagggacggagccggactggacatggtcactcagtaccgcctgcagtgtcgccatgactgatcatggctcttgcatttttgggtaaatggagacttccggatcctgtcagggtgtcccccatgcctggaagaggagctggtggctgccagccctggggcccggcacaggcctgggccttccccttccctcaagccagggctcctcctcctgtcgtgggctcattgtgaccactggcctctctacagcacggcctgtggcctgttcaaggcagaaccacgacccttgactcccgggtggggaggtggccaaggatgctggagctgaatcagacgctgacagttcttcaggcatttctatttcacaatcgaattgaacacattggccaaataaagttgaaattttaccaccaaaaaaaaaaaaaaaaaaaaaaaaaaaaaaaaggggggggcgaaaaaaatccccccgggggcccaaggctgttccgcgggaatccccggcttttttgtggccaaatgggtggccccttaatggaggagccagggatttaataataagcgaaagggacacggtgcccgctgttttaaccacgtcggtggagttggggcacaagcccggctaccgctggcggcatctgtgtggtcagagaagggaccccttaccttcgcggtgggggggcggaccatcatggggcgacagaactcaccctaagagaagaatcaagaggcccagaggggcaattttacacctctttggagcggtctttaggggtgttaaccactacggggataaatgcctgcggctctgaaaacttttggcaacgggcagtatgcttgtcgacattcttttcgggt

SEQ ID NO: 53081 - DNA, 2859 bp, Homo sapiens
aagcaggctggtcccggtccgagtgtatggatgccaaccgaagcgccccgcctgatccgtgtccgacatgctgcgccgcgctctgctgtgcctggccgtggccgccctggtgcgcgccgacgcccccgaggaggaggaccacgtcctggtgctgcggaaaagcaacttcgcggaggcgctggcggcccacaagtacctgctggtggagttctatgccccttggtgtggccactgcaaggctctggcccctgagtatgccaaagccgctgggaagctgaaggcagaaggttccgagatcaggttggccaaggtggacgccacggaggagtctgacctggcccagcagtacggcgtgcgcggctatcccaccatcaagttcttcaggaatggagacacggcttcccccaaggaatatacagctggcagagaggctgatgacatcgtgaactggctgaagaagcgcacgggcccggctgccaccaccctgcctgacggcgcagctgcagagtccttggtggagtccagcgaggtggctgtcatcggcttcttcaaggacgtggagtcggactctgccaagcagtttttgcaggcagcagaggccatcgatgacataccatttgggatcacttccaacagtgacgtgttctccaaataccagctcgacaaagatggggttgtcctctttaagaagtttgatgaaggccggaacaactttgaaggggaggtcaccaaggagaacctgctggactttatcaaacacaaccagctgccccttgtcatcgagttcaccgagcagacagccccgaagatttttggaggtgaaatcaagactcacatcctgctgttcttgcccaagagtgtgtctgactatgacggcaaactgagcaacttcaaaacagcagccgagagcttcaagggcaagatcctgttcatcttcatcgacagcgaccacaccgacaaccagcgcatcctcgagttctttggcctgaagaaggaagagtgcccggccgtgcgcctcatcaccctggaggaggagatgaccaagtacaagcccgaatcggaggagctgacggcagagaggatcacagagttctgccaccgcttcctggagggcaaaatcaagccccacctgatgagccaggagctgccggaggactgggacaagcagcctgtcaaggtgcttgttgggaagaactttgaagacgtggcttttgatgagaaaaaaaacgtctttgtggagttctatgccccatggtgtggtcactgcaaacagttggctcccatttgggataaactgggagagacgtacaaggaccatgagaacatcgtcatcgccaagatggactcgactgccaacgaggtggaggccgtcaaagtgcacagcttccccacactcaagttctttcctgccagtgccgacaggacggtcattgattacaacggggaacgcacgctggatggttttaagaaattcctggagagcggtggccaggatggggcaggggatgatgacgatctcgaggacctggaagaagcagaggagccagacatggaggaagacgatgatcagaaagctgtgaaagatgaactgtaatacgcaaagccagacccgggcgctgccgagacccctcgggggctgcacacccagcagcagcgcacgcctccgaagcctgcggcctcgcttgaaggagggcgtcgccggaaacccagggaacctctctgaagtgacacctcacccctacacaccgtccgttcacccccgtctcttccttctgcttttcggtttttggaaagggatccatctccaggcagcccaccctggtggggcttgtttcctgaaaccatgatgtactttttcatacatgagtctgtccagagtgcttgctaccgtgttcggagtctcgctgcctccctcccgcgggaggtttctcctctttttgaaaattccgtctgtgggatttttagacatttttcgacatcagggtatttgttccaccttggccaggcctcctcggagaagcttgtcccccgtgtgggagggacggagccggactggacatggtcactcagtaccgcctgcagtgtcgccatgactgatcatggctcttgcatttttgggtaaatggagacttccggatcctgtcagggtgtcccccatgcctggaagaggagctggtggctgccagccctggggcccggcacaggcctgggccttccccttccctcaagccagggctcctcctcctgtcgtgggctcattgtgaccactggcctctctacagcacggcctgtggcctgttcaaggcagaaccacgacccttgactcccgggtggggaggtggccaaggatgctggagctgaatcagacgctgacagttcttcaggcatttctatttcacaatcgaattgaacacattggccaaataaagttgaaattttaccaccaaaaaaaaaaaaaaaaaaaaaaaaaaaaaaaaaaaaaaaaaaaaaaaaaaaaaaaaaaaaaaaaaaaaaaaaaaaaaaaaaaaaaaaaaaaaaaaaaaaaaaaaaagaagagagaggggggggggcgcgccgcggcgcccccccccgcggcggggggcccccagaaagcgagtgccgccgcacaaccggcactgttgtatagaaaagaagggggacgcgccgcgacacgaagaggaggggcggcgacataatcttacggagagcgggacgggggtggggccatcaacaaacacaacgccgcgagggagaggaggagacagaccagcgctcaggcgacaagccctggcgcgggggaggacaccaccactactctggggggggggtggaggcaccagcgggcacgacagctaagat

SEQ ID NO: 53082 - DNA, 2461 bp, Homo sapiens
  misc_feature (2417)..(2417): n is a, c, g, or t
  misc_feature (2423)..(2423): n is a, c, g, or t
  misc_feature (2433)..(2433): n is a, c, g, or t
aagcaggctggtcccggtccgagtgtatggatgccaaccgaagcgccccgcctgatccgtgtccgacatgctgcgccgcgctctgctgtgcctggccgtggccgccctggtgcgcgccgacgcccccgaggaggaggaccacgtcctggtgctgcggaaaagcaacttcgcggaggcgctggcggcccacaagtacctgctggtggagttctatgccccttggtgtggccactgcaaggctctggcccctgagtatgccaaagccgctgggaagctgaaggcagaaggttccgagatcaggttggccaaggtggacgccacggaggagtctgacctggcccagcagtacggcgtgcgcggctatcccaccatcaagttcttcaggaatggagacacggcttcccccaaggaatatacagctggcagagaggctgatgacatcgtgaactggctgaagaagcgcacgggcccggctgccaccaccctgcctgacggcgcagctgcagagtccttggtggagtccagcgaggtggctgtcatcggcttcttcaaggacgtggagtcggactctgccaagcagtttttgcaggcagcagaggccatcgatgacataccatttgggatcacttccaacagtgacgtgttctccaaataccagctcgacaaagatggggttgtcctctttaagaagtttgatgaaggccggaacaactttgaaggggaggtcaccaaggagaacctgctggactttatcaaacacaaccagctgccccttgtcatcgagttcaccgagcagacagccccgaagatttttggaggtgaaatcaagactcacatcctgctgttcttgcccaagagtgtgtctgactatgacggcaaactgagcaacttcaaaacagcagccgagagcttcaagggcaagatcctgttcatcttcatcgacagcgaccacaccgacaaccagcgcatcctcgagttctttggcctgaagaaggaagagtgcccggccgtgcgcctcatcaccctggaggaggagatgaccaagtacaagcccgaatcggaggagctgacggcagagaggatcacagagttctgccaccgcttcctggagggcaaaatcaagccccacctgatgagccaggagctgccggaggactgggacaagcagcctgtcaaggtgcttgttgggaagaactttgaagacgtggcttttgatgagaaaaaaaacgtctttgtggagttctatgccccatggtgtggtcactgcaaacagttggctcccatttgggataaactgggagagacgtacaaggaccatgagaacatcgtcatcgccaagatggactcgactgccaacgaggtggaggccgtcaaagtgcacagcttccccacactcaagttctttcctgccagtgccgacaggacggtcattgattacaacggggaacgcacgctggatggttttaagaaattcctggagagcggtggccaggatggggcaggggatgatgacgatctcgaggacctggaagaagcagaggagccagacatggaggaagacgatgatcagaaagctgtgaaagatgaactgtaatacgcaaagccagacccgggcgctgccgagacccctcgggggctgcacacccagcagcagcgcacgcctccgaagcctgcggcctcgcttgaaggagggcgtcgccggaaacccagggaacctctctgaagtgacacctcacccctacacaccgtccgttcacccccgtctcttccttctgcttttcggtttttggaaagggatccatctccaggcagcccaccctggtggggcttgtttcctgaaaccatgatgtactttttcatacatgagtctgtccagagtgcttgctaccgtgttcggagtctcgctgcctccctcccgcgggaggtttctcctctttttgaaaattccgtctgtgggatttttagacatttttcgacatcagggtatttgttccaccttggccaggcctcctcggagaagcttgtcccccgtgtgggagggacggagccggactggacatggtcactcagtaccgcctgcagtgtcgccatgactgatcatggctcttgcatttttgggtaaatggagacttccggatcctgtcagggtgtcccccatgcctggaagaggagctggtggctgccagccctggggcccggcacaggcctgggccttccccttccctcaagccagggctcctcctcctgtcgtgggctcattgtgaccactggcctctctacagcacggcctgtggcctgttcaaggcagaaccacgacccttgactcccgggtggggaggtggccaaggatgctggagctgaatcagacgctgacagttcttcaggcatttctatttcacaatcgaattgaacataanccacantgccaataantattcgggtctttgctggtctgtgtagg

SEQ ID NO: 53083 - DNA, 2452 bp, Homo sapiens
  misc_feature (2452)..(2452): n is a, c, g, or t
aagcaggctggtcccggtccgagtgtatggatgccaaccgaagcgccccgcctgatccgtgtccgacatgctgcgccgcgctctgctgtgcctggccgtggccgccctggtgcgcgccgacgcccccgaggaggaggaccacgtcctggtgctgcggaaaagcaacttcgcggaggcgctggcggcccacaagtacctgctggtggagttctatgccccttggtgtggccactgcaaggctctggcccctgagtatgccaaagccgctgggaagctgaaggcagaaggttccgagatcaggttggccaaggtggacgccacggaggagtctgacctggcccagcagtacggcgtgcgcggctatcccaccatcaagttcttcaggaatggagacacggcttcccccaaggaatatacagctggcagagaggctgatgacatcgtgaactggctgaagaagcgcacgggcccggctgccaccaccctgcctgacggcgcagctgcagagtccttggtggagtccagcgaggtggctgtcatcggcttcttcaaggacgtggagtcggactctgccaagcagtttttgcaggcagcagaggccatcgatgacataccatttgggatcacttccaacagtgacgtgttctccaaataccagctcgacaaagatggggttgtcctctttaagaagtttgatgaaggccggaacaactttgaaggggaggtcaccaaggagaacctgctggactttatcaaacacaaccagctgccccttgtcatcgagttcaccgagcagacagccccgaagatttttggaggtgaaatcaagactcacatcctgctgttcttgcccaagagtgtgtctgactatgacggcaaactgagcaacttcaaaacagcagccgagagcttcaagggcaagatcctgttcatcttcatcgacagcgaccacaccgacaaccagcgcatcctcgagttctttggcctgaagaaggaagagtgcccggccgtgcgcctcatcaccctggaggaggagatgaccaagtacaagcccgaatcggaggagctgacggcagagaggatcacagagttctgccaccgcttcctggagggcaaaatcaagccccacctgatgagccaggagctgccggaggactgggacaagcagcctgtcaaggtgcttgttgggaagaactttgaagacgtggcttttgatgagaaaaaaaacgtctttgtggagttctatgccccatggtgtggtcactgcaaacagttggctcccatttgggataaactgggagagacgtacaaggaccatgagaacatcgtcatcgccaagatggactcgactgccaacgaggtggaggccgtcaaagtgcacagcttccccacactcaagttctttcctgccagtgccgacaggacggtcattgattacaacggggaacgcacgctggatggttttaagaaattcctggagagcggtggccaggatggggcaggggatgatgacgatctcgaggacctggaagaagcagaggagccagacatggaggaagacgatgatcagaaagctgtgaaagatgaactgtaatacgcaaagccagacccgggcgctgccgagacccctcgggggctgcacacccagcagcagcgcacgcctccgaagcctgcggcctcgcttgaaggagggcgtcgccggaaacccagggaacctctctgaagtgacacctcacccctacacaccgtccgttcacccccgtctcttccttctgcttttcggtttttggaaagggatccatctccaggcagcccaccctggtggggcttgtttcctgaaaccatgatgtactttttcatacatgagtctgtccagagtgcttgctaccgtgttcggagtctcgctgcctccctcccgcgggaggtttctcctctttttgaaaattccgtctgtgggatttttagacatttttcgacatcagggtatttgttccaccttggccaggcctcctcggagaagcttgtcccccgtgtgggagggacggagccggactggacatggtcactcagtaccgcctgcagtgtcgccatgactgatcatggctcttgcatttttgggtaaatggagacttccggatcctgtcagggtgtcccccatgcctggaagaggagctggtggctgccagccctggggcccggcacaggcctgggccttccccttccctcaagccagggctcctcctcctgtcgtgggctcattgtgaccactggcctctctacagcacggcctgtggcctgttcaaggcagaaccacgacccttgactcccgggtggggaggtggccaaggatgctggagctgaatcagacgctgacagttcttcaggcatttctatttcacaatcgaattgaacactatcacgagggtactaactcgagtcgtatcatgtcatn

SEQ ID NO: 53084 - DNA, 2385 bp, Homo sapiens
aagcaggctggtcccggtccgagtgtatggatgccaaccgaagcgccccgcctgatccgtgtccgacatgctgcgccgcgctctgctgtgcctggccgtggccgccctggtgcgcgccgacgcccccgaggaggaggaccacgtcctggtgctgcggaaaagcaacttcgcggaggcgctggcggcccacaagtacctgctggtggagttctatgccccttggtgtggccactgcaaggctctggcccctgagtatgccaaagccgctgggaagctgaaggcagaaggttccgagatcaggttggccaaggtggacgccacggaggagtctgacctggcccagcagtacggcgtgcgcggctatcccaccatcaagttcttcaggaatggagacacggcttcccccaaggaatatacagctggcagagaggctgatgacatcgtgaactggctgaagaagcgcacgggcccggctgccaccaccctgcctgacggcgcagctgcagagtccttggtggagtccagcgaggtggctgtcatcggcttcttcaaggacgtggagtcggactctgccaagcagtttttgcaggcagcagaggccatcgatgacataccatttgggatcacttccaacagtgacgtgttctccaaataccagctcgacaaagatggggttgtcctctttaagaagtttgatgaaggccggaacaactttgaaggggaggtcaccaaggagaacctgctggactttatcaaacacaaccagctgccccttgtcatcgagttcaccgagcagagtgtgtctgactatgacggcaaactgagcaacttcaaaacagcagccgagagcttcaagggcaagatcctgttcatcttcatcgacagcgaccacaccgacaaccagcgcatcctcgagttctttggcctgaagaaggaagagtgcccggccgtgcgcctcatcaccctggaggaggagatgaccaagtacaagcccgaatcggaggagctgacggcagagaggatcacagagttctgccaccgcttcctggagggcaaaatcaagccccacctgatgagccaggagctgccggaggactgggacaagcagcctgtcaaggtgcttgttgggaagaactttgaagacgtggcttttgatgagaaaaaaaacgtctttgtggagttctatgccccatggtgtggtcactgcaaacagttggctcccatttgggataaactgggagagacgtacaaggaccatgagaacatcgtcatcgccaagatggactcgactgccaacgaggtggaggccgtcaaagtgcacagcttccccacactcaagttctttcctgccagtgccgacaggacggtcattgattacaacggggaacgcacgctggatggttttaagaaattcctggagagcggtggccaggatggggcaggggatgatgacgatctcgaggacctggaagaagcagaggagccagacatggaggaagacgatgatcagaaagctgtgaaagatgaactgtaatacgcaaagccagacccgggcgctgccgagacccctcgggggctgcacacccagcagcagcgcacgcctccgaagcctgcggcctcgcttgaaggagggcgtcgccggaaacccagggaacctctctgaagtgacacctcacccctacacaccgtccgttcacccccgtctcttccttctgcttttcggtttttggaaagggatccatctccaggcagcccaccctggtggggcttgtttcctgaaaccatgatgtactttttcatacatgagtctgtccagagtgcttgctaccgtgttcggagtctcgctgcctccctcccgcgggaggtttctcctctttttgaaaattccgtctgtgggatttttagacatttttcgacatcagggtatttgttccaccttggccaggcctcctcggagaagcttgtcccccgtgtgggagggacggagccggactggacatggtcactcagtaccgcctgcagtgtcgccatgactgatcatggctcttgcatttttgggtaaatggagacttccggatcctgtcagggtgtcccccatgcctggaagaggagctggtggctgccagccctggggcccggcacaggcctgggccttccccttccctcaagccagggctcctcctcctgtcgtgggctcattgtgaccactggcctctctacagcacggcctgtggcctgttcaaggcagaaccacgacccttgactcccgggtggggaggtggccaaggatgctggagctgaatcagacgctgacagttcttcaggcatttctatttcacaatcgaattgaacacattggccaaataaagttgaaattttaccacc

SEQ ID NO: 53085 - DNA, 1810 bp, Homo sapiens
gatctagaggatgctttaccaggacagatcgacaagatggggtgttctctttaagatttgatgaaggccggaacaactttgaaggggaggtcaccaaggagaacctgctggactttatcaaacacaaccagctgccccttgtcatcgagttcaccgagcagacagccccgaagatttttggaggtgaaatcaagactcacatcctgctgttcttgcccaagagtgtgtctgactatgacggcaaactgagcaacttcaaaacagcagccgagagcttcaagggcaagatcctgttcatcttcatcgacagcgaccacaccgacaaccagcgcatcctcgagttctttggcctgaagaaggaagagtgcccggccgtgcgcctcatcaccctggaggaggagatgaccaagtacaagcccgaatcggaggagctgacggcagagaggatcacagagttctgccaccgcttcctggagggcaaaatcaagccccacctgatgagccaggagctgccggaggactgggacaagcagcctgtcaaggtgcttgttgggaagaactttgaagacgtggcttttgatgagaaaaaaaacgtctttgtggagttctatgccccatggtgtggtcactgcaaacagttggctcccatttgggataaactgggagagacgtacaaggaccatgagaacatcgtcatcgccaagatggactcgactgccaacgaggtggaggccgtcaaagtgcacagcttccccacactcaagttctttcctgccagtgccgacaggacggtcattgattacaacggggaacgcacgctggatggttttaagaaattcctggagagcggtggccaggatggggcaggggatgatgacgatctcgaggacctggaagaagcagaggagccagacatggaggaagacgatgatcagaaagctgtgaaagatgaactgtaatacgcaaagccagacccgggcgctgccgagacccctcgggggctgcacacccagcagcagcgcacgcctccgaagcctgcggcctcgcttgaaggagggcgtcgccggaaacccagggaacctctctgaagtgacacctcacccctacacaccgtccgttcacccccgtctcttccttctgcttttcggtttttggaaagggatccatctccaggcagcccaccctggtggggcttgtttcctgaaaccatgatgtactttttcatacatgagtctgtccagagtgcttgctaccgtgttcggagtctcgctgcctccctcccgcgggaggtttctcctctttttgaaaattccgtctgtgggatttttagacatttttcgacatcagggtatttgttccaccttggccaggcctcctcggagaagcttgtcccccgtgtgggagggacggagccggactggacatggtcactcagtaccgcctgcagtgtcgccatgactgatcatggctcttgcatttttgggtaaatggagacttccggatcctgtcagggtgtcccccatgcctggaagaggagctggtggctgccagccctggggcccggcacaggcctgggccttccccttccctcaagccagggctcctcctcctgtcgtgggctcattgtgaccactggcctctctacagcacggcctgtggcctgttcaaggcagaaccacgacccttgactcccgggtggggaggtggccaaggatgctggagctgaatcagacgctgacagttcttcaggcatttctatttcacaatcgaattgaacacattggccaaataaagttgaaattttaccacc

SEQ ID NO: 53086 - DNA, 2572 bp, Homo sapiens
aagcaggctggtcccggtccgagtgtatggatgccaaccgaagcgccccgcctgatccgtgtccgacatgctgcgccgcgctctgctgtgcctggccgtggccgccctggtgcgcgccgacgcccccgaggaggaggaccacgtcctggtgctgcggaaaagcaacttcgcggaggcgctggcggcccacaagtacctgctggtggagttctatgccccttggtgtggccactgcaaggctctggcccctgagtatgccaaagccgctgggaagctgaaggcagaaggttccgagatcaggttggccaaggtggacgccacggaggagtctgacctggcccagcagtacggcgtgcgcggctatcccaccatcaagttcttcaggaatggagacacggcttcccccaaggaatatacagctggcagagaggctgatgacatcgtgaactggctgaagaagcgcacgggcccggctgccaccaccctgcctgacggcgcagctgcagagtccttggtggagtccagcgaggtggctgtcatcggcttcttcaaggacgtggagtcggactctgccaagcagtttttgcaggcagcagaggccatcgatgacataccatttgggatcacttccaacagtgacgtgttctccaaataccagctcgacaaagatggggttgtcctctttaagaagtttgatgaaggccggaacaactttgaaggggaggtcaccaaggagaacctgctggactttatcaaacacaaccagctgccccttgtcatcgagttcaccgagcagacagccccgaagatttttggaggtgaaatcaagactcacatcctgctgttcttgcccaagagtgtgtctgactatgacggcaaactgagcaacttcaaaacagcagccgagagcttcaagggcaagatcctgttcatcttcatcgacagcgaccacaccgacaaccagcgcatcctcgagttctttggcctgaagaaggaagagtgcccggccgtgcgcctcatcaccctggaggaggagatgaccaagtacaagcccgaatcggaggagctgacggcagagaggatcacagagttctgccaccgcttcctggagggcaaaatcaagccccacctgatgagccaggagctgccggaggactgggacaagcagcctgtcaaggtgcttgttgggaagaactttgaagacgtggcttttgatgagaaaaaaaacgtctttgtggagttctgtaagtgttgccctttcagctccccaggtccgtgcaccagggcacgcgcaaggtaggcagactcctggggaagcgtctgccagtggctttgtgtccaggacacaccctagaactgctttcttttcagatgccccatggtgtggtcactgcaaacagttggctcccatttgggataaactgggagagacgtacaaggaccatgagaacatcgtcatcgccaagatggactcgactgccaacgaggtggaggccgtcaaagtgcacagcttccccacactcaagttctttcctgccagtgccgacaggacggtcattgattacaacggggaacgcacgctggatggttttaagaaattcctggagagcggtggccaggatggggcaggggatgatgacgatctcgaggacctggaagaagcagaggagccagacatggaggaagacgatgatcagaaagctgtgaaagatgaactgtaatacgcaaagccagacccgggcgctgccgagacccctcgggggctgcacacccagcagcagcgcacgcctccgaagcctgcggcctcgcttgaaggagggcgtcgccggaaacccagggaacctctctgaagtgacacctcacccctacacaccgtccgttcacccccgtctcttccttctgcttttcggtttttggaaagggatccatctccaggcagcccaccctggtggggcttgtttcctgaaaccatgatgtactttttcatacatgagtctgtccagagtgcttgctaccgtgttcggagtctcgctgcctccctcccgcgggaggtttctcctctttttgaaaattccgtctgtgggatttttagacatttttcgacatcagggtatttgttccaccttggccaggcctcctcggagaagcttgtcccccgtgtgggagggacggagccggactggacatggtcactcagtaccgcctgcagtgtcgccatgactgatcatggctcttgcatttttgggtaaatggagacttccggatcctgtcagggtgtcccccatgcctggaagaggagctggtggctgccagccctggggcccggcacaggcctgggccttccccttccctcaagccagggctcctcctcctgtcgtgggctcattgtgaccactggcctctctacagcacggcctgtggcctgttcaaggcagaaccacgacccttgactcccgggtggggaggtggccaaggatgctggagctgaatcagacgctgacagttcttcaggcatttctatttcacaatcgaattgaacacattggccaaataaagttgaaattttaccacc

SEQ ID NO: 53087 - DNA, 2274 bp, Homo sapiens
aagcaggctggtcccggtccgagtgtatggatgccaaccgaagcgccccgcctgatccgtgtccgacatgctgcgccgcgctctgctgtgcctggccgtggccgccctggtgcgcgccgacgcccccgaggaggaggaccacgtcctggtgctgcggaaaagcaacttcgcggaggcgctggcggcccacaagtacctgctggtggagttctatgccccttggtgtggccactgcaaggctctggcccctgagtatgccaaagccgctgggaagctgaaggcagaaggttccgagatcaggttggccaaggtggacgccacggaggagtctgacctggcccagcagtacggcgtgcgcggctatcccaccatcaagttcttcaggaatggagacacggcttcccccaaggaatatacagctggcagagaggctgatgacatcgtgaactggctgaagaagcgcacgggcccggctgccaccaccctgcctgacggcgcagctgcagagtccttggtggagtccagcgaggtggctgtcatcggcttcttcaaggacgtggagtcggactctgccaagcagtttttgcaggcagcagaggccatcgatgacataccatttgggatcacttccaacagtgacgtgttctccaaataccagctcgacaaagatggggttgtcctctttaagaagtttgatgaaggccggaacaactttgaaggggaggtcaccaaggagaacctgctggactttatcaaacacaaccagctgccccttgtcatcgagttcaccgagcagacagccccgaagatttttggaggtgaaatcaagactcacatcctgctgttcttgcccaagagtgtgtctgactatgacggcaaactgagcaacttcaaaacagcagccgagagcttcaagggcaagatcctgttcatcttcatcgacagcgaccacaccgacaaccagcgcatcctcgagttctttggcctgaagaaggaagagtgcccggccgtgcgcctcatcaccctggaggaggagatgaccaagtacaagcccgaatcggaggagctgacggcagagaggatcacagagttctgccaccgcttcctggagggcaaaatcaagccccacctgatgagccaggagctgccggaggactgggacaagcagcctgtcaaggtgcttgttgggaagaactttgaagacgtggcttttgatgagaaaaaaaacgtctttgtggagttctatgccccatggtgtggtcactgcaaacagttggctcccatttgggataaactgggagagacgtacaaggaccatgagaacatcgtcatcgccaagatggactcgactgccaacgaggtggaggccgtcaaagtgcacagcttccccacactcaagttctttcctgccagtgccgacaggacggtcattgattacaacggggaacgcacgctggatggttttaagaaattcctggagagcggtggccaggatggggcaggggatgatgacgatctcgaggacctggaagaagcagaggagccagacatggaggaagacgatgatcagaaagctgtgaaagatgaactgtaatacgcaaagccagacccgggcgctgccgagacccctcgggggctgcacacccagcagcagcgcacgcctccgaagcctgcggcctcgcttgaaggagggcgtcgccggaaacccagggaacctctctgaagtgacacctcacccctacacaccgtccgttcacccccgtctcttccttctgcttttcggtttttggaaagggatccatctccaggcagcccaccctggtggggcttgtttcctgaaaccatgatgtactttttcatacatgagtctgtccagagtgcttgctaccgtgttcggagtctcgctgcctccctcccgcgggaggtttctcctctttttgaaaattccgtctgtgggatttttagacatttttcgacatcagggtatttgttccaccttggccaggcctcctcggagaagcttgtcccccgtgtgggagggacggagccggactggacatggtcactcagtaccgcctgcagtgtcgccatgactgatcatggctcttgcatttttgggtaaatggagacttccggatcctgtcagggtgtcccccatgcctggaagaggagctggtggctgccagccctggggcccggcacaggcctgggccttccccttccctcagatgcctgggcacctacttcacactccccggaatttccgccgatact

SEQ ID NO: 53088 - DNA, 2242 bp, Homo sapiens
aagcaggctggtcccggtccgagtgtatggatgccaaccgaagcgccccgcctgatccgtgtccgacatgctgcgccgcgctctgctgtgcctggccgtggccgccctggtgcgcgccgacgcccccgaggaggaggaccacgtcctggtgctgcggaaaagcaacttcgcggaggcgctggcggcccacaagtacctgctggtggagttctatgccccttggtgtggccactgcaaggctctggcccctgagtatgccaaagccgctgggaagctgaaggcagaaggttccgagatcaggttggccaaggtggacgccacggaggagtctgacctggcccagcagtacggcgtgcgcggctatcccaccatcaagttcttcaggaatggagacacggcttcccccaaggaatatacagctggcagagaggctgatgacatcgtgaactggctgaagaagcgcacgggcccggctgccaccaccctgcctgacggcgcagctgcagagtccttggtggagtccagcgaggtggctgtcatcggcttcttcaaggacgtggagtcggactctgccaagcagtttttgcaggcagcagaggccatcgatgacataccatttgggatcacttccaacagtgacgtgttctccaaataccagctcgacaaagatggggttgtcctctttaagaagtttgatgaaggccggaacaactttgaaggggaggtcaccaaggagaacctgctggactttatcaaacacaaccagctgccccttgtcatcgagttcaccgagcagacagccccgaagatttttggaggtgaaatcaagactcacatcctgctgttcttgcccaagagtgtgtctgactatgacggcaaactgagcaacttcaaaacagcagccgagagcttcaagggcaagatcctgttcatcttcatcgacagcgaccacaccgacaaccagcgcatcctcgagttctttggcctgaagaaggaagagtgcccggccgtgcgcctcatcaccctggaggaggagatgaccaagtacaagcccgaatcggaggagctgacggcagagaggatcacagagttctgccaccgcttcctggagggcaaaatcaagccccacctgatgagccaggagctgccggaggactgggacaagcagcctgtcaaggtgcttgttgggaagaactttgaagacgtggcttttgatgagaaaaaaaacgtctttgtggagttctatgccccatggtgtggtcactgcaaacagttggctcccatttgggataaactgggagagacgtacagatctcgaggacctggaagaagcagaggagccagacatggaggaagacgatgatcagaaagctgtgaaagatgaactgtaatacgcaaagccagacccgggcgctgccgagacccctcgggggctgcacacccagcagcagcgcacgcctccgaagcctgcggcctcgcttgaaggagggcgtcgccggaaacccagggaacctctctgaagtgacacctcacccctacacaccgtccgttcacccccgtctcttccttctgcttttcggtttttggaaagggatccatctccaggcagcccaccctggtggggcttgtttcctgaaaccatgatgtactttttcatacatgagtctgtccagagtgcttgctaccgtgttcggagtctcgctgcctccctcccgcgggaggtttctcctctttttgaaaattccgtctgtgggatttttagacatttttcgacatcagggtatttgttccaccttggccaggcctcctcggagaagcttgtcccccgtgtgggagggacggagccggactggacatggtcactcagtaccgcctgcagtgtcgccatgactgatcatggctcttgcatttttgggtaaatggagacttccggatcctgtcagggtgtcccccatgcctggaagaggagctggtggctgccagccctggggcccggcacaggcctgggccttccccttccctcaagccagggctcctcctcctgtcgtgggctcattgtgaccactggcctctctacagcacggcctgtggcctgttcaaggcagaaccacgacccttgactcccgggtggggaggtggccaaggatgctggagctgaatcagacgctgacagttcttcaggcatttctatttcacaatcgaattgaacacattggccaaataaagttgaaattttaccacc

SEQ ID NO: 53089 - DNA, 2734 bp, Homo sapiens
aagcaggctggtcccggtccgagtgtatggatgccaaccgaagcgccccgcctgatccgtgtccgacatgctgcgccgcgctctgctgtgcctggccgtggccgccctggtgcgcgccgacgcccccgaggaggaggaccacgtcctggtgctgcggaaaagcaacttcgcggaggcgctggcggcccacaagtacctgctggtggagttctatgccccttggtgtggccactgcaaggctctggcccctgagtatgccaaagccgctgggaagctgaaggcagaaggttccgagatcaggttggccaaggtggacgccacggaggagtctgacctggcccagcagtacggcgtgcgcggctatcccaccatcaagttcttcaggaatggagacacggcttcccccaaggaatatacagctggcagagaggctgatgacatcgtgaactggctgaagaagcgcacgggcccggctgccaccaccctgcctgacggcgcagctgcagagtccttggtggagtccagcgaggtggctgtcatcggcttcttcaaggacgtggagtcggactctgccaagcagtttttgcaggcagcagaggccatcgatgacataccatttgggatcacttccaacagtgacgtgttctccaaataccagctcgacaaagatggggttgtcctctttaagaagtttgatgaaggccggaacaactttgaaggggaggtcaccaaggagaacctgctggactttatcaaacacaaccagctgccccttgtcatcgagttcaccgagcagacagccccgaagatttttggaggtgaaatcaagactcacatcctgctgttcttgcccaagagtgtgtctgactatgacggcaaactgagcaacttcaaaacagcagccgagagcttcaagggcaagatcctgttcatcttcatcgacagcgaccacaccgacaaccagcgcatcctcgagttctttggcctgaagaaggaagagtgcccggccgtgcgcctcatcaccctggaggaggagatgaccaagtacaagcccgaatcggaggagctgacggcagagaggatcacagagttctgccaccgcttcctggagggcaaaatcaagccccacctgatgagccaggagctgccggaggactgggacaagcagcctgtcaaggtgcttgttgggaagaactttgaagacgtggcttttgatgagaaaaaaaacgtctttgtggagttctatgccccatggtgtggtcactgcaaacagttggctcccatttgggataaactgggagagacgtacaaggaccatgagaacatcgtcatcgccaagatggactcgactgccaacgaggtggaggccgtcaaagtgcacagcttccccacactcaagttctttcctgccagtgccgacaggacggtcattgattacaacggggaacgcacgctggatggttttaagaaattcctggagagcggtggccaggatggggcaggggatgatgacgatctcgaggacctggaagaagcagaggagccagacatggaggaagacgatgatcagaaagctgtgaaagatgaactgtaatacgcaaagccagacccgggcgctgccgagacccctcgggggctgcacacccagcagcagcgcacgcctccgaagcctgcggcctcgcttgaaggagggcgtcgccggaaacccagggaacctctctgaagtgacacctcacccctacacaccgtccgttcacccccgtctcttccttctgcttttcggtttttggaaagggatccatctccaggcagcccaccctggtggggcttgtttcctgaaaccatgatgtactttttcatacatgagtctgtccagagtgcttgctaccgtgttcggagtctcgctgcctccctcccgcgggaggtttctcctctttttgaaaattccgtctgtgggatttttagacatttttcgacatcagggtatttcagggtgtcccccatgcctggaagaggagctggtggctgccagccctggggcccggcacaggcctgggccttccccttccctcaagccagggctcctcctcctgtcgtgggctcattgtgaccactggcctctctacagcacggcctgtggcctgttcaaggcagaaccacgacccttgactcccgggtggggaggtggccaaggatgctggagctgaatcagacgctgacagttcttcaggcatttctatttcacaatcgaattgaacacattggccaaataaagttgaaattttaccaccaaaaaaaaaaaaaaaaaaaaaaaaaaaaaaaaggggggggcgaaaaaaatccccccgggggcccaaggctgttccgcgggaatccccggcttttttgtggccaaatgggtggccccttaatggaggagccagggatttaataataagcgaaagggacacggtgcccgctgttttaaccacgtcggtggagttggggcacaagcccggctaccgctggcggcatctgtgtggtcagagaagggaccccttaccttcgcggtgggggggcggaccatcatggggcgacagaactcaccctaagagaagaatcaagaggcccagaggggcaattttacacctctttggagcggtctttaggggtgttaaccactacggggataaatgcctgcggctctgaaaacttttggcaacgggcagtatgcttgtcgacattcttttcgggt

SEQ ID NO: 53090 - DNA, 2092 bp, Homo sapiens
aagcaggctggtcccggtccgagtgtatggatgccaaccgaagcgccccgcctgatccgtgtccgacatgctgcgccgcgctctgctgtgcctggccgtggccgccctggtgcgcgccgacgcccccgaggaggaggaccacgtcctggtgctgcggaaaagcaacttcgcggaggcgctggcggcccacaagtacctgctggtggagttctatgccccttggtgtggccactgcaaggctctggcccctgagtatgccaaagccgctgggaagctgaaggcagaaggttccgagatcaggttggccaaggtggacgccacggaggagtctgacctggcccagcagtacggcgtgcgcggctatcccaccatcaagttcttcaggaatggagacacggcttcccccaaggaatatacagctggcagagaggctgatgacatcgtgaactggctgaagaagcgcacgggcccggctgccaccaccctgcctgacggcgcagctgcagagtccttggtggagtccagcgaggtggctgtcatcggcttcttcaaggacgtggagtcggactctgccaagcagtttttgcaggcagcagaggccatcgatgacataccatttgggatcacttccaacagtgacgtgttctccaaataccagctcgacaaagatggggttgtcctctttaagaagtttgatgaaggccggaacaactttgaaggggaggtcaccaaggagaacctgctggactttatcaaacacaaccagctgccccttgtcatcgagttcaccgagcagacagccccgaagatttttggaggtgaaatcaagactcacatcctgctgttcttgcccaagagtgtgtctgactatgacggcaaactgagcaacttcaaaacagcagccgagagcttcaagggcaagatcctgttcatcttcatcgacagcgaccacaccgacaaccagcgcatcctcgagttctttggcctgaagaaggaagagtgcccggccgtgcgcctcatcaccctggaggaggagatgaccaagtacaagcccgaatcggaggagctgacggcagagaggatcacagagttctgccaccgcttcctggagggcaaaatcaagccccacctgatgagccaggagctgccggaggactgggacaagcagcctgtcaaggtgcttgttgggaagaactttgaagacgtggcttttgatgagaaaaaaaacgtctttgtggagttctatgccccatggtgtggtcactgcaaacagttggctcccatttgggataaactgggagagacgtacaaggaccatgagaacatcgtcatcgccaagatggactcgactgccaacgaggtggaggccgtcaaagtgcacagcttccccacactcaagttctttcctgccagtgccgacaggacggtcattgattacaacggggaacgcacgctggatggttttaagaaattcctggagagcggtggccaggatggggcaggggatgatgacgatctcgaggacctggaagaagcagaggagccagacatggaggaagacgatgatcagaaagctgtgaaagatgaactgtaatacgcaaagccagacccgggcgctgccgagacccctcgggggctgcacacccagcagcagcgcacgcctccgaagcctgcggcctcgcttgaaggagggcgtcgccggaaacccagggaacctctctgaagtgacacctcacccctacacaccgtccgttcacccccgtctcttccttctgcttttcggtttttggaaagggatccatctccaggcagcccaccctggtggggcttgtttcctgaaaccatgatgtactttttcatacatgagtctgtccagagtgcttgctaccgtgttcggagtctcgctgcctccctcccgcgggaggtttctcctctttttgaaaattccgtctgtgggatttttagacatttttcgacatcagggtatttccaaggatgctggagctgaatcagacgctgacagttcttcaggcatttctatttcacaatcgaattgaacacattggccaaataaagttgaaattttaccacc

SEQ ID NO: 53091 - DNA, 2556 bp, Homo sapiens
aagcaggctggtcccggtccgagtgtatggatgccaaccgaagcgccccgcctgatccgtgtccgacatgctgcgccgcgctctgctgtgcctggccgtggccgccctggtgcgcgccgacgcccccgaggaggaggaccacgtcctggtgctgcggaaaagcaacttcgcggaggcgctggcggcccacaaatgccccttggtgtggccactgcaaggctctggcccctgagtatgccaaagccgctgggaagctgaaggcagaaggttccgagatcaggttggccaaggtggacgccacggaggagtctgacctggcccagcagtacggcgtgcgcggctatcccaccatcaagttcttcaggaatggagacacggcttcccccaaggaatatacagctggcagagaggctgatgacatcgtgaactggctgaagaagcgcacgggcccggctgccaccaccctgcctgacggcgcagctgcagagtccttggtggagtccagcgaggtggctgtcatcggcttcttcaaggacgtggagtcggactctgccaagcagtttttgcaggcagcagaggccatcgatgacataccatttgggatcacttccaacagtgacgtgttctccaaataccagctcgacaaagatggggttgtcctctttaagaagtttgatgaaggccggaacaactttgaaggggaggtcaccaaggagaacctgctggactttatcaaacacaaccagctgccccttgtcatcgagttcaccgagcagacagccccgaagatttttggaggtgaaatcaagactcacatcctgctgttcttgcccaagagtgtgtctgactatgacggcaaactgagcaacttcaaaacagcagccgagagcttcaagggcaagatcctgttcatcttcatcgacagcgaccacaccgacaaccagcgcatcctcgagttctttggcctgaagaaggaagagtgcccggccgtgcgcctcatcaccctggaggaggagatgaccaagtacaagcccgaatcggaggagctgacggcagagaggatcacagagttctgccaccgcttcctggagggcaaaatcaagccccacctgatgagccaggagctgccggaggactgggacaagcagcctgtcaaggtgcttgttgggaagaactttgaagacgtggcttttgatgagaaaaaaaacgtctttgtggagttctgtaagtgttgccctttcagctccccaggtccgtgcaccagggcacgcgcaaggtaggcagactcctggggaagcgtctgccagtggctttgtgtccaggacacaccctagaactgctttcttttcagatgccccatggtgtggtcactgcaaacagttggctcccatttgggataaactgggagagacgtacaaggaccatgagaacatcgtcatcgccaagatggactcgactgccaacgaggtggaggccgtcaaagtgcacagcttccccacactcaagttctttcctgccagtgccgacaggacgacgggtcattgattacaacggggaacgcacgctggatggttttaagaaattcctggagagcggtggccaggatggggcaggggatgatgacgatctcgaggacctggaagaagcagaggagccagacatggaggaagacgatgatcagaaagctgtgaaagatgaactgtaatacgcaaagccagacccgggcgctgccgagacccctcgggggctgcacacccagcagcagcgcacgcctccgaagcctgcggcctcgcttgaaggagggcgtcgccggaaacccagggaacctctctgaagtgacacctcacccctacacaccgtccgttcacccccgtctcttccttctgcttttcggtttttggaaagggatccatctccaggcagcccaccctggtggggcttgtttcctgaaaccatgatgtactttttcatacatgagtctgtccagagtgcttgctaccgtgttcggagtctcgctgcctccctcccgcgggaggtttctcctctttttgaaaattccgtctgtgggatttttagacatttttcgacatcagggtatttgttccaccttggccaggcctcctcggagaagcttgtcccccgtgtgggagggacggagccggactggacatggtcactcagtaccgcctgcagtgtcgccatgactgatcatggctcttgcatttttgggtaaatggagacttccggatcctgtcagggtgtcccccatgcctggaagaggagctggtggctgccagccctggggcccggcacaggcctgggccttccccttccctcaagccagggctcctcctcctgtcgtgggctcattgtgaccactggcctctctacagcacggcctgtggcctgttcaaggcagaaccacgacccttgactcccgggtggggaggtggccaaggatgctggagctgaatcagacgctgacagttcttcaggcatttctatttcacaatcgaattgaacacattggccaaataaagttgaaattttaccacc

SEQ ID NO: 53092 - DNA, 1984 bp, Homo sapiens
aagcaggctggtcccggtccgagtgtatggatgccaaccgaagcgccccgcctgatccgtgtccgacatgctgcgccgcgctctgctgtgcctggccgtggccgccctggtgcgcgccgacgcccccgaggaggaggaccacgtcctggtgctgcggaaaagcaacttcgcggaggcgctggcggcccacaagtacctgctggtggagttctatgccccttggtgtggccactgcaaggctctggcccctgagtatgccaaagccgctgggaagctgaaggcagaaggttccgagatcaggttggccaaggtggacgccacggaggagtctgacctggcccagcagtacggcgtgcgcggctatcccaccatcaagttcttcaggaatggagacacggcttcccccaaggaatatacagctggcagagaggctgatgacatcgtgaactggctgaagaagcgcacgggcccggctgccaccaccctgcctgacggcgcagctgcagagtccttggtggagtccagcgaggtggctgtcatcggcttcttcaaggacgtggagtcggactctgccaagcagtttttgcaggcagcagaggccatcgatgacataccatttgggatcacttccaacagtgacgtgttctccaaataccagctcgacaaagatggggttgtcctctttaagaagtttgatgaaggccggaacaactttgaaggggaggtcaccaaggagaacctgctggactttatcaaacacaaccagctgccccttgtcatcgagttcaccgagcagacagccccgaagatttttggaggtgaaatcaagactcacatcctgctgttcttgcccaagagtgtgtctgactatgacggcaaactgagcaacttcaaaacagcagccgagagcttcaagggcaagatcctgttcatcttcatcgacagcgaccacaccgacaaccagcgcatcctcgagttctttggcctgaagaaggaagagtgcccggccgtgcgcctcatcaccctggaggaggagatgaccaagtacaagcccgaatcggaggagctgacggcagagaggatcacagagttctgccaccgcttcctggagggcaaaatcaagccccacctgatgagccaggagctgccggaggactgggacaagcagcctgtcaaggtgcttgttgggaagaactttgaagacgtggcttttgatgagaaaaaaaacgtctttgtggagttctatgccccatggtgtggtcactgcaaacagttggctcccatttgggataaactgggagagacgtacaaggaccatgagaacatcgtcatcgccaagatggactcgactgccaacgaggtggaggccgtcaaagtgcacagcttccccacactcaagttctttcctgccagtgccgacaggacggtcattgattacaacggggaacgcacgctggatggttttaagaaattcctggagagcggtggccaggatggggcaggggatgatgacgatctcgaggacctggaagaagcagaggagccagacatggaggaagcttgtcccccgtgtgggagggacggagccggactggacatggtcactcagtaccgcctgcagtgtcgccatgactgatcatggctcttgcatttttgggtaaatggagacttccggatcctgtcagggtgtcccccatgcctggaagaggagctggtggctgccagccctggggcccggcacaggcctgggccttccccttccctcaagccagggctcctcctcctgtcgtgggctcattgtgaccactggcctctctacagcacggcctgtggcctgttcaaggcagaaccacgacccttgactcccgggtggggaggtggccaaggatgctggagctgaatcagacgctgacagttcttcaggcatttctatttcacaatcgaattgaacacattggccaaataaagttgaaattttaccacc

SEQ ID NO: 53093 - DNA, 1758 bp, Homo sapiens
aagcaggctggtcccggtccgagtgtatggatgccaaccgaagcgccccgcctgatccgtgtccgacatgctgcgccgcgctctgctgtgcctggccgtggccgccctggtgcgcgccgacgcccccgaggaggaggaccacgtcctggtgctgcggaaaagcaacttcgcggaggcgctggcggcccacaagtacctgctggtggagttctatgccccttggtgtggccactgcaaggctctggcccctgagtatgccaaagccgctgggaagctgaaggcagaaggttccgagatcaggttggccaaggtggacgccacggaggagtctgacctggcccagcagtacggcgtgcgcggctatcccaccatcaagttcttcaggaatggagacacggcttcccccaaggaatatacagctggcagagaggctgatgacatcgtgaactggctgaagaagcgcacgggcccggctgccaccaccctgcctgacggcgcagctgcagagtccttggtggagtccagcgaggtggctgtcatcggcttcttcaaggacgtggagtcggactctgccaagcagtttttgcaggcagcagaggccatcgatgacataccatttgggatcacttccaacagtgacgtgttctccaaataccagctcgacaaagatggggttgtcctctttaagaagtttgatgaaggccggaacaactttgaaggggaggtcaccaaggagaacctgctggactttatcaaacacaaccagctgccccttgtcatcgagttcaccgagcagacagccccgaagatttttggaggtgaaatcaagactcacatcctgctgttcttgcccaagagtgtgtctgactatgacggcaaactgagcaacttcaaaacagcagccgagagcttcaagggcaagatcctgttcatcttcatcgacagcgaccacaccgacaaccagcgcatcctcgagttctttggcctgaagaaggaagagtgcccggccgtgcgcctcatcaccctggaggaggagatgaccaagtacaagcccgaatcggaggagctgacggcagagaggatcacagagttctgccaccgcttcctggagggcaaaatcaagagcccaccctggtggggcttgtttcctgaaaccatgatgtactttttcatacatgagtctgtccagagtgcttgctaccgtgttcggagtctcgctgcctccctcccgcgggaggtttctcctctttttgaaaattccgtctgtgggatttttagacatttttcgacatcagggtatttgttccaccttggccaggcctcctcggagaagcttgtcccccgtgtgggagggacggagccggactggacatggtcactcagtaccgcctgcagtgtcgccatgactgatcatggctcttgcatttttgggtaaatggagacttccggatcctgtcagggtgtcccccatgcctggaagaggagctggtggctgccagccctggggcccggcacaggcctgggccttccccttccctcaagccagggctcctcctcctgtcgtgggctcattgtgaccactggcctctctacagcacggcctgtggcctgttcaaggcagaaccacgacccttgactcccgggtggggaggtggccaaggatgctggagctgaatcagacgctgacagttcttcaggcatttctatttcacaatcgaattgaacacattggccaaataaagttgaaattttaccacc

SEQ ID NO: 53094 - DNA, 1652 bp, Homo sapiens
aagcaggctggtcccggtccgagtgtatggatgccaaccgaagcgccccgcctgatccgtgtccgacatgctgcgccgcgctctgctgtgcctggccgtggccgccctggtgcgcgccgacgcccccgaggaggaggaccacgtcctggtgctgcggaaaagcaacttcgcggaggcgctggcggcccacaagtacctgctggtggagttctatgccccttggtgtggccactgcaaggctctggcccctgagtatgccaaagccgctgggaagctgaaggcagaaggttccgagatcaggttggccaaggtggacgccacggaggagtctgacctggcccagcagtacggcgtgcgcggctatcccaccatcaagttcttcaggaatggagacacggcttcccccaaggaatatacagctggcagagaggctgatgacatcgtgaactggctgaagaagcgcacgggcccggctgccaccaccctgcctgacggcgcagctgcagagtccttggtggagtccagcgaggtggctgtcatcggcttcttcaaggacgtggagtcggactctgccaagcagtttttgcaggcagcagaggccatcgatgacataccatttgggatcacttccaacagtgacgtgttctccaaataccagctcgacaaagatggggttgtcctctttaagaagtttgatgaaggccggaacaactttgaaggggaggtcaccaaggagaacctgctggactttatcaaacacaaccagctgccccttgtcatcgagttcaccgagcagacagccccgaagatttttggaggtgaaatcaagactcacatcctgctgttcttgcccaagagtgtgtctgactatgacggcaaactgagcaacttcaaaacagcagccgagagcttcaagggcaagatcctgttcatcttcatcgacagcgaccacaccgacaaccagcgcatcctcgagttctttggcctgaagaaggaagagtgcccggccgtgcgcctcatcaccctggaggaggagatgaccaagtacaagcccgaatcggaggagctgacggcagagaggatcacagagttctgccaccgcttcctggagggcaaaatcaagccccacctgatgagccaggagctgccggaggactgggacaagcagcctgtcaaggtgcttgttgggaagaactttgaagacgtggcttttgatgagaaaaaaaacgtctttgtggagttctatgccccatggtgtggtcactgcaaacagttggctcccatttgggataaactgggagagacgtacaaggaccatgagaacatcgtcatcgccaagatggactcgactgccaacgaggtggaggccgtcaaagtgcacagcttccccacactcaagttctttcctgccagtgccgacaggacggtcattgattacaacggggaacgcacgctggatggttttaagaaattcctggagagcggtggccaggatggggcaggggatgatgacatcccgaacggacctgggacataacgccgaggagcacagactggatggaatcacccatgacccaacgtcgggatacagtgagccggctatacacaaggccacacggcgcgagcaaacccgggggggacccacacagcgc

SEQ ID NO: 53095 - DNA, 1745 bp, Homo sapiens
aagcaggctggtcccggtccgagtgtatggatgccaaccgaagcgccccgcctgatccgtgtccgacatgctgcgccgcgctctgctgtgcctggccgtggccgccctggtgcgcgccgacgcccccgaggaggaggaccacgtcctggtgctgcggaaaagcaacttcgcggaggcgctggcggcccacaagtacctgctggtggagttctatgccccttggtgtggccactgcaaggctctggcccctgagtatgccaaagccgctgggaagctgaaggcagaaggttccgagatcaggttggccaaggtggacgccacggaggagtctgacctggcccagcagtacggcgtgcgcggctatcccaccatcaagttcttcaggaatggagacacggcttcccccaaggaatatacagctggcagagaggctgatgacatcgtgaactggctgaagaagcgcacgggcccggctgccaccaccctgcctgacggcgcagctgcagagtccttggtggagtccagcgaggtggctgtcatcggcttcttcaaggacgtggagtcggactctgccaagcagtttttgcaggcagcagaggccatcgatgacataccatttgggatcacttccaacagtgacgtgttctccaaataccagctcgacaaagatggggttgtcctctttaagaagtttgatgaaggccggaacaactttgaaggggaggtcaccaaggagaacctgctggactttatcaaacacaaccagctgccccttgtcatcgagttcaccgagcagacagccccgaagatttttggaggtgaaatcaagactcacatcctgctgttcttgcccaagagtgtgtctgactatgacggcaaactgagcaacttcaaaacagcagccgagagcttcaagggcaagatcctgttcatcttcatcgacagcgaccacaccgacaaccagcgcatcctcgagttctttggcctgaagaaggaagagtgcccggccgtgcgcctcatcaccctggaggaggagatgaccaagtacaagcccgaatcggaggagctgacggcagagaggatcacagagttctgccaccgcttcctggagggcaaaatcaagccccacctgatgagccaggagctgccggaggactgggacaagcagcctgtcaaggtgcttgttgggaagaactttgaagacgtggcttttgatgagaaaaaaaacgtctttgtggagttctatgccccatggtgtggtcactgcaaacagttggctcccatttgggataaactgggagagacgtacaaggaccatgagaacatcgtcatcgccaagatggactcgactgccaacgaggtggaggccgtcaaagtgcacagcttccccacactcaagttctttcctgccagtgccgacaggacgacggtgcgccttccctccagacggggctggggcgggctctgggaagagcagtggtccccacgccagcctgggtgcctctctggaaggagcctggggctagtcaggtgggagaagagctgtgggagctccttcagaagcacccacctttgtttttcgagagagatgggatctcactatattgcctaggctgtttttgaactcccaatgtgctggattccgggtgtgagccaccggaccgggcctgctctgcctttctctagggaggaggagccaatgccaggagattggctctgggccgggaccagcccctgcactcatc

SEQ ID NO: 53096 - DNA, 1473 bp, Homo sapiens
aagcaggctggtcccggtccgagtgtatggatgccaaccgaagcgccccgcctgatccgtgtccgacatgctgcgccgcgctctgctgtgcctggccgtggccgccctggtgcgcgccgacgcccccgaggaggaggaccacgtcctggtgctgcggaaaagcaacttcgcggaggcgctggcggcccacaagtacctgctggtggagttctatgccccttggtgtggccactgcaaggctctggcccctgagtatgccaaagccgctgggaagctgaaggcagaaggttccgagatcaggttggccaaggtggacgccacggaggagtctgacctggcccagcagtacggcgtgcgcggctatcccaccatcaagttcttcaggaatggagacacggcttcccccaaggaatatacagctggcagagaggctgatgacatcgtgaactggctgaagaagcgcacgggcccggctgccaccaccctgcctgacggcgcagctgcagagtccttggtggagtccagcgaggtggctgtcatcggcttcttcaaggacgtggagtcggactctgccaagcagtttttgcaggcagcagaggccatcgatgacataccatttgggatcacttccaacagtgacgtgttctccaaataccagctcgacaaagatggggttgtcctctttaagaagtttgatgaaggccggaacaactttgaaggggaggtcaccaaggagaacctgctggactttatcaaacacaaccagctgccccttgtcatcgagttcaccgagcagacagccccgaagatttttggaggtgaaatcaagactcacatcctgctgttcttgcccaagagtgtgtctgactatgacggcaaactgagcaacttcaaaacagcagccgagagcttcaagggcaagatcctgttcatcttcatcgacagcgaccacaccgacaaccagcgcatcctcgagttctttggcctgaagaaggaagagtgcccggccgtgcgcctcatcaccctggaggaggagatgaccaagtacaagcccgaatcggaggagctgacggcagagaggatcacagagttctgccaccgcttcctggagggcaaaatcaagccccacctgatgagccaggagctgccggaggactgggacaagcagcctgtcaaggtgcttgttgggaagaactttgaagacgtggcttttgatgagaaaaaaaacgtctttgtggagttctatgccccatggtgtggtcactgcaaacagttggctcccatttgggataaactgggagagacgtacaaggaccatgagaacatcgtcatcgccaagatggactcgactgccaacgaggtggaggccgtcaaagtgcacagcttccccacactcaagttctttcctgccagtgccgacaggacgacggcattgattacaacggggaacgcacgctgtggaaagggggatct

SEQ ID NO: 53097 - DNA, 1332 bp, Homo sapiens
aagcaggctggtcccggtccgagtgtatggatgccaaccgaagcgccccgcctgatccgtgtccgacatgctgcgccgcgctctgctgtgcctggccgtggccgccctggtgcgcgccgacgcccccgaggaggaggaccacgtcctggtgctgcggaaaagcaacttcgcggaggcgctggcggcccacaagtacctgctggtggagttctatgccccttggtgtggccactgcaaggctctggcccctgagtatgccaaagccgctgggaagctgaaggcagaaggttccgagatcaggttggccaaggtggacgccacggaggagtctgacctggcccagcagtacggcgtgcgcggctatcccaccatcaagttcttcaggaatggagacacggcttcccccaaggaatatacagctggcagagaggctgatgacatcgtgaactggctgaagaagcgcacgggcccggctgccaccaccctgcctgacggcgcagctgcagagtccttggtggagtccagcgaggtggctgtcatcggcttcttcaaggacgtggagtcggactctgccaagcagtttttgcaggcagcagaggccatcgatgacataccatttgggatcacttccaacagtgacgtgttctccaaataccagctcgacaaagatggggttgtcctctttaagaagtttgatgaaggccggaacaactttgaaggggaggtcaccaaggagaacctgctggactttatcaaacacaaccagctgccccttgtcatcgagttcaccgagcagacagccccgaagatttttggaggtgaaatcaagactcacatcctgctgttcttgcccaagagtgtgtctgactatgacggcaaactgagcaacttcaaaacagcagccgagagcttcaagggcaagatcctgttcatcttcatcgacagcgaccacaccgacaaccagcgcatcctcgagttctttggcctgaagaaggaagagtgcccggccgtgcgcctcatcaccctggaggaggagatgaccaagtacaagcccgaatcggaggagctgacggcagagaggatcacagagttctgccaccgcttcctggagggcaaaatcaagccccacctgatgagccaggagctgccggaggactgggacaagcagcctgtcaaggtgcttgttgggaagaactttgaagacgtggcttttgatgagaaaaaaaacgtctttgtggagttctcactattcctcttccacttgcagatctcaccatgtttattgttgtttccggtcatccacttatgtgcagtcctgagttcgcactgaga

SEQ ID NO: 53098 - DNA, 1198 bp, Homo sapiens
aagcaggctggtcccggtccgagtgtatggatgccaaccgaagcgccccgcctgatccgtgtccgacatgctgcgccgcgctctgctgtgcctggccgtggccgccctggtgcgcgccgacgcccccgaggaggaggaccacgtcctggtgctgcggaaaagcaacttcgcggaggcgctggcggcccacaagtacctgctggtggagttctatgccccttggtgtggccactgcaaggctctggcccctgagtatgccaaagccgctgggaagctgaaggcagaaggttccgagatcaggttggccaaggtggacgccacggaggagtctgacctggcccagcagtacggcgtgcgcggctatcccaccatcaagttcttcaggaatggagacacggcttcccccaaggaatatacagctggcagagaggctgatgacatcgtgaactggctgaagaagcgcacgggcccggctgccaccaccctgcctgacggcgcagctgcagagtccttggtggagtccagcgaggtggctgtcatcggcttcttcaaggacgtggagtcggactctgccaagcagtttttgcaggcagcagaggccatcgatgacataccatttgggatcacttccaacagtgacgtgttctccaaataccagctcgacaaagatggggttgtcctctttaagaagtttgatgaaggccggaacaactttgaaggggaggtcaccaaggagaacctgctggactttatcaaacacaaccagctgccccttgtcatcgagttcaccgagcagacagccccgaagatttttggaggtgaaatcaagactcacatcctgctgttcttgcccaagagtgtgtctgactatgacggcaaactgagcaacttcaaaacagcagccgagagcttcaagggcaagatcctgttcatcttcatcgacagcgaccacaccgacaaccagcgcatcctcgagttctagccagggctcctcctcctgtcgtgggctcattgtgaccactggcctctctacagcacggcctgtggcctgttcaaggcagaaccacgacccttgactcccgggtggggaggtggccaaggatgctggagctgaatcagacgctgacagttcttcaggcatttctatttcacaatcgaattgaacacattggccaaataaagttgaaattttaccacc

SEQ ID NO: 53099 - DNA, 992 bp, Homo sapiens
  misc_feature (925)..(925): n is a, c, g, or t
  misc_feature (927)..(927): n is a, c, g, or t
  misc_feature (930)..(930): n is a, c, g, or t
aagcaggctggtcccggtccgagtgtatggatgccaaccgaagcgccccgcctgatccgtgtccgacatgctgcgccgcgctctgctgtgcctggccgtggccgccctggtgcgcgccgacgcccccgaggaggaggaccacgtcctggtgctgcggaaaagcaacttcgcggaggcgctggcggcccacaagtacctgctggtggagttctatgccccttggtgtggccactgcaaggctctggcccctgagtatgccaaagccgctgggaagctgaaggcagaaggttccgagatcaggttggccaaggtggacgccacggaggagtctgacctggcccagcagtacggcgtgcgcggctatcccaccatcaagttcttcaggaatggagacacggcttcccccaaggaatatacagctggcagagaggctgatgacatcgtgaactggctgaagaagcgcacgggcccggctgccaccaccctgcctgacggcgcagctgcagagtccttggtggagtccagcgaggtggctgtcatcggcttcttcaaggacgtggagtcggactctgccaagcagtttttgcaggcagcagaggccatcgatgacataccatttgggatcacttccaacagtgacgtgttctccaaataccagctcgacaaagatggggttgtcctctttaagaagtttgatgaaggccggaacaactttgaaggggaggtcaccaaggagaacctgctggactttatcaaacacaaccagctgccccttgtcatcgagttcaccgagcagacagccccgaagatttttggaggtgaaatcaagactcacatcctgctgttcttgcccaagagtgtgtctgactatgacggcaaactgagcaacttcaaaacagcagccgagagcttcaagggcaagggnanttnagggagatctgtcactcatcgaaggcccccgaacgggtcccagtctggctaaagaaatgcgg

SEQ ID NO: 53100 - DNA, 969 bp, Homo sapiens
aagcaggctggtcccggtccgagtgtatggatgccaaccgaagcgccccgcctgatccgtgtccgacatgctgcgccgcgctctgctgtgcctggccgtggccgccctggtgcgcgccgacgcccccgaggaggaggaccacgtcctggtgctgcggaaaagcaacttcgcggaggcgctggcggcccacaagtacctgctggtggagttctatgccccttggtgtggccactgcaaggctctggcccctgagtatgccaaagccgctgggaagctgaaggcagaaggttccgagatcaggttggccaaggtggacgccacggaggagtctgacctggcccagcagtacggcgtgcgcggctatcccaccatcaagttcttcaggaatggagacacggcttcccccaaggaatatacagctggcagagaggctgatgacatcgtgaactggctgaagaagcgcacgggcccggctgccaccaccctgcctgacggcgcagctgcagagtccttggtggagtccagcgaggtggctgtcatcggcttcttcaaggacgtggagtcggactctgccaagcagtttttgcaggcagcagaggccatcgatgacataccatttgggatcacttccaacagtgacgtgttctccaaataccagctcgacaaagatggggttgtcctctttaagaagtttgatgaaggccggaacaactttgaaggggaggtcaccaaggagaacctgctggactttatcaaacacaaccagctgccccttgtcatcgagttcaccgagcagacagccccgaagatttttggaggtgaaatcaagactcacatcctgctgttcttgcccaagagtgtgtctgactatgacggcaaactgagcaacttcaaaacagcagccgagagcttcaagggcaagcatcctgttcatcttcatcgactgcttggattaaaggaggccgagca

SEQ ID NO: 53101 - DNA, 831 bp, Homo sapiens
aagcaggctggtcccggtccgagtgtatggatgccaaccgaagcgccccgcctgatccgtgtccgacatgctgcgccgcgctctgctgtgcctggccgtggccgccctggtgcgcgccgacgcccccgaggaggaggaccacgtcctggtgctgcggaaaagcaacttcgcggaggcgctggcggcccacaagtacctgctggtggagttctatgccccttggtgtggccactgcaaggctctggcccctgagtatgccaaagccgctgggaagctgaaggcagaaggttccgagatcaggttggccaaggtggacgccacggaggagtctgacctggcccagcagtacggcgtgcgcggctatcccaccatcaagttcttcaggaatggagacacggcttcccccaaggaatatacagctggcagagaggctgatgacatcgtgaactggctgaagaagcgcacgggcccggctgccaccaccctgcctgacggcgcagctgcagagtccttggtggagtccagcgaggtggctgtcatcggcttcttcaaggacgtggagtcggactctgccaagcagtttttgcaggcagcagaggccatcgatgacataccatttgggatcacttccaacagtgacgtgttctccaaataccagctcgacaaagatggggttgtcctctttaagaagtttgatgaaggccggaacaactttgaaggggaggtcaccaaggatgctggagctgaatcagacgctgacagttcttcaggcatttctatttcacaatcgaattgaacacattggccaaataaagttgaaattttaccacc

SEQ ID NO: 53102 - DNA, 760 bp, Homo sapiens
  misc_feature (747)..(747): n is a, c, g, or t
aagcaggctggtcccggtccgagtgtatggatgccaaccgaagcgccccgcctgatccgtgtccgacatgctgcgccgcgctctgctgtgcctggccgtggccgccctggtgcgcgccgacgcccccgaggaggaggaccacgtcctggtgctgcggaaaagcaacttcgcggaggcgctggcggcccacaagtacctgctggtggagttctatgccccttggtgtggccactgcaaggctctggcccctgagtatgccaaagccgctgggaagctgaaggcagaaggttccgagatcaggttggccaaggtggacgccacggaggagtctgacctggcccagcagtacggcgtgcgcggctatcccaccatcaagttcttcaggaatggagacacggcttcccccaaggaatatacagctggcagagaggctgatgacatcgtgaactggctgaagaagcgcacgggcccggctgccaccaccctgcctgacggcgcagctgcagagtccttggtggagtccagcgaggtggctgtcatcggcttcttcaaggacgtggagtcggactctgccaagcagtttttgcaggcagcagaggccatcgatgacataccatttgggatcacttccaacagtgacgtgttctccaaataccagctcgacaaagatggggttgtcctctttaagaagtgaaggccggaacaactttgaaggagaggggaggagaggggctttcaaaggggatngtgtagagcgacc

SEQ ID NO: 53103 - DNA, 978 bp, Homo sapiens
aagcaggctggtcccggtccgagtgtatggatgccaaccgaagcgccccgcctgatccgtgtccgacatgctgcgccgcgctctgctgtgcctggccgtggccgccctggtgcgcgccgacgcccccgaggaggaggaccacgtcctggtgctgcggaaaagcaacttcgcggaggcgctggcggcccacaagtacctgctggtggagttctatgccccttggtgtggccactgcaaggctctggcccctgagtatgccaaagccgctgggaagctgaaggcagaaggttccgagatcaggttggccaaggtggacgccacggaggagtctgacctggcccagcagtacggcgtgcgcggctatcccaccatcaagttcttcaggaatggagacacggcttcccccaaggaatatacaggtgtggctgtggcactgcccttgaactgtctttagagagggactggcctgccgacttggaagggcaggggcagctgtctgagcggtggggaggccgggttccagaggcttggagggatcccgttcctcaggccgggttctctgtccacttgtgccctgagggtcttgtgaggagttttcatcctggaagaaccttcgaatggagaacctgtcttgtctggtgccatcctgggggcggctggctgaggtctgtttggagactgaccagcgaggagagggagactggtgcctttctggccacatgggctgtttgtgctgccccctgttcctaggagcagcagcatggctgtagctctcggggtgacacctgctagctgtcgtgtgtagcgtgccagctgccgcgtcacgtgcttgcgtgatttctcctcgcatcctctctgtgaggcgggcttttcccagacaaagggctgaggcttagagcagctgagtaacagcatcgagcctgtcggtagcagacctcgaatccagcggggaacctcagagacgaccagcagcagcaa

SEQ ID NO: 53104 - DNA, 2564 bp, Homo sapiens
aagcaggctggtcccggtccgagtgtatggatgccaaccgaagcgccccgcctgatccgtgtccgacatgctgcgccgcgctctgctgtgcctggccgtggccgccctggtgcgcgccgacgcccccgaggaggaggaccacgtcctggtgctgcggaaaagcaacttcgcggaggcgctggcggcccacaagtacctgctggtggagttctatgccccttggtgtggccactgcaaggctctggcccctgagtatgccaaagccgctgggaagctgaaggcagaaggttccgagatcaggttggccaaggtggacgccacggaggagtctgacctggcccagcagtacggcgtgcgcggctatcccaccatcaagttcttcaggaatggagacacggcttcccccaaggaatatacagctggcagagaggctgatgacatcgtgaactggctgaagaagcgcacgggcccggctgccaccaccctgcctgacggcgcagctgcagagtccttggtggagtccagcgaggtggctgtcatcggcttcttcaaggacgtggagtcggactctgccaagcagtttttgcaggcagcagaggccatcgatgacataccatttgggatcacttccaacagtgacgtgttctccaaataccagctcgacaaagatggggttgtcctctttaagaagtttgatgaaggccggaacaactttgaaggggaggtcaccaaggagaacctgctggactttatcaaacacaaccagctgccccttgtcatcgagttcaccgagcagacagccccgaagatttttggaggtgaaatcaagactcacatcctgctgttcttgcccaagagtgtgtctgactatgacggcaaactgagcaacttcaaaacagcagccgagagcttcaagggcaagatcctgttcatcttcatcgacagcgaccacaccgacaaccagcgcatcctcgagttctttggcctgaagaaggaagagtgcccggccgtgcgcctcatcaccctggaggaggagatgaccaagtacaagcccgaatcggaggagctgacggcagagaggatcacagagttctgccaccgcttcctggagggcaaaatcaagccccacctgatgagccaggagctgccggaggactgggacaagcagcctgtcaaggtgcttgttgggaagaactttgaagacgtggcttttgatgagaaaaaaaacgtctttgtggagttctatgccccatggtgtggtcactgcaaacagttggctcccatttgggataaactgggagagacgtacaaggaccatgagaacatcgtcatcgccaagatggactcgactgccaacgaggtggaggccgtcaaagtgcacagcttccccacactcaagttctttcctgccagtgccgacaggacggtcattgattacaacggggaacgcacgctggatggttttaagaaattcctggagagcggtggccaggatggggcaggggatgatgacgatctcgaggacctggaagaagcagaggagccagacatggaggaagacgatgatcagaaagctgtgaaagatgaactgtaatacgcaaagccagacccgggcgctgccgagacccctcgggggctgcacacccagcagcagcgcacgcctccgaagcctgcggcctcgcttgaaggagggcgtcgccggaaacccagggaacctctctgaagtgacacctcacccctacacaccgtccgttcacccccgtctcttccttctgcttttcggtttttggaaagggatccatctccaggcagcccaccctggtggggcttgtttcctgaaaccatgatgtactttttcatacatgagtctgtccagagtgcttgctaccgtgttcggagtctcgctgcctccctcccgcgggaggtttctcctctttttgaaaattccgtctgtgggatttttagacatttttcgacatcagggtatttgttccaccttggccaggcctcctcggagaagcttgtcccccgtgtgggagggacggagccggactggacatggtcactcagtaccgcctgcagtgtcgccatgactgatcatggctcttgcatttttgggtaaatggagacttccggatcctgtcagggtgtcccccatgcctggaagaggagctggtggctgccagccctggggcccggcacaggcctgggccttccccttccctcaagccagggctcctcctcctgtcgtgggctcattgtgaccactggcctctctacagcacggcctgtggcctgttcaaggcagaaccacgacccttgactcccgggtggggaggtggccaaggatgctggagctgaatcagacgctgacagttcttcaggcatttctatttcacaatcgaattgaacacattggccaaataaagttgaaattttaccaccaaaaaaacacacaaaaaaaaatccgggggctctattccggggggggacaaaggggtacgggatggccctggccaaactgttcctgaccctttttgtccagtggaatctggggcccttag

SEQ ID NO: 53105 - DNA, 2311 bp, Homo sapiens
aagcaggctggtcccggtccgagtgtatggatgccaaccgaagcgccccgcctgatccgtgtccgacatgctgcgccgcgctctgctgtgcctggccgtggccgccctggtgcgcgccgacgcccccgaggaggaggaccacgtcctggtgctgcggaaaagcaacttcgcggaggcgctggcggcccacaagtacctgctggtggagttctatgccccttggtgtggccactgcaaggctctggcccctgagtatgccaaagccgctgggaagctgaaggcagaaggttccgagatcaggttggccaaggtggacgccacggaggagtctgacctggcccagcagtacggcgtgcgcggctatcccaccatcaagttcttcaggaatggagacacggcttcccccaaggaatatacaggacgtggagtcggactctgccaagcagtttttgcaggcagcagaggccatcgatgacataccatttgggatcacttccaacagtgacgtgttctccaaataccagctcgacaaagatggggttgtcctctttaagaagtttgatgaaggccggaacaactttgaaggggaggtcaccaaggagaacctgctggactttatcaaacacaaccagctgccccttgtcatcgagttcaccgagcagacagccccgaagatttttggaggtgaaatcaagactcacatcctgctgttcttgcccaagagtgtgtctgactatgacggcaaactgagcaacttcaaaacagcagccgagagcttcaagggcaagatcctgttcatcttcatcgacagcgaccacaccgacaaccagcgcatcctcgagttctttggcctgaagaaggaagagtgcccggccgtgcgcctcatcaccctggaggaggagatgaccaagtacaagcccgaatcggaggagctgacggcagagaggatcacagagttctgccaccgcttcctggagggcaaaatcaagccccacctgatgagccaggagctgccggaggactgggacaagcagcctgtcaaggtgcttgttgggaagaactttgaagacgtggcttttgatgagaaaaaaaacgtctttgtggagttctatgccccatggtgtggtcactgcaaacagttggctcccatttgggataaactgggagagacgtacaaggaccatgagaacatcgtcatcgccaagatggactcgactgccaacgaggtggaggccgtcaaagtgcacagcttccccacactcaagttctttcctgccagtgccgacaggacggtcattgattacaacggggaacgcacgctggatggttttaagaaattcctggagagcggtggccaggatggggcaggggatgatgacgatctcgaggacctggaagaagcagaggagccagacatggaggaagacgatgatcagaaagctgtgaaagatgaactgtaatacgcaaagccagacccgggcgctgccgagacccctcgggggctgcacacccagcagcagcgcacgcctccgaagcctgcggcctcgcttgaaggagggcgtcgccggaaacccagggaacctctctgaagtgacacctcacccctacacaccgtccgttcacccccgtctcttccttctgcttttcggtttttggaaagggatccatctccaggcagcccaccctggtggggcttgtttcctgaaaccatgatgtactttttcatacatgagtctgtccagagtgcttgctaccgtgttcggagtctcgctgcctccctcccgcgggaggtttctcctctttttgaaaattccgtctgtgggatttttagacatttttcgacatcagggtatttgttccaccttggccaggcctcctcggagaagcttgtcccccgtgtgggagggacggagccggactggacatggtcactcagtaccgcctgcagtgtcgccatgactgatcatggctcttgcatttttgggtaaatggagacttccggatcctgtcagggtgtcccccatgcctggaagaggagctggtggctgccagccctggggcccggcacaggcctgggccttccccttccctcaagccagggctcctcctcctgtcgtgggctcattgtgaccactggcctctctacagcacggcctgtggcctgttcaaggcagaaccacgacccttgactcccgggtggggaggtggccaaggatgctggagctgaatcagacgctgacagttcttcaggcatttctatttcacaatcgaattgaacacattggccaaataaagttgaaattttaccacc

SEQ ID NO: 53106 - DNA, 2425 bp, Homo sapiens
  misc_feature (2405)..(2405): n is a, c, g, or t
aagcaggctggtcccggtccgagtgtatggatgccaaccgaagcgccccgcctgatccgtgtccgacatgctgcgccgcgctctgctgtgcctggccgtggccgccctggtgcgcgccgacgcccccgaggaggaggaccacgtcctggtgctgcggaaaagcaacttcgcggaggcgctggcggcccacaagtacctgctggtggagttctatgccccttggtgtggccactgcaaggctctggcccctgagtatgccaaagccgctgggaagctgaaggcagaaggttccgagatcaggttggccaaggtggacgccacggaggagtctgacctggcccagcagtacggcgtgcgcggctatcccaccatcaagttcttcaggaatggagacacggcttcccccaaggaatatacagctggcagagaggctgatgacatcgtgaactggctgaagaagcgcacgggcccggctgccaccaccctgcctgacggcgcagctgcagagtccttggtggagtccagcgaggtggctgtcatcggcttcttcaaggacgtggagtcggactctgccaagcagtttttgcaggcagcagaggccatcgatgacataccatttgggatcacttccaacagtgacgtgttctccaaataccagctcgacaaagatggggttgtcctctttaagaagtttgatgaaggccggaacaactttgaaggggaggtcaccaaggagaacctgctggactttatcaaacacaaccagctgccccttgtcatcgagttcaccgagcagacagccccgaagatttttggaggtgaaatcaagactcacatcctgctgttcttgcccaagagtgtgtctgactatgacggcaaactgagcaacttcaaaacagcagccgagagcttcaagggcaagatcctgttcatcttcatcgacagcgaccacaccgacaaccagcgcatcctcgagttctttggcctgaagaaggaagagtgcccggccgtgcgcctcatcaccctggaggaggagatgaccaagtacaagcccgaatcggaggagctgacggcagagaggatcacagagttctgccaccgcttcctggagggcaaaatcaagccccacctgatgagccaggagctgccggaggactgggacaagcagcctgtcaaggtgcttgttgggaagaactttgaagacgtggcttttgatgagaaaaaaaacgtctttgtggagttctatgccccatggtgtggtcactgcaaacagttggctcccatttgggataaactgggagagacgtacaaggaccatgagaacatcgtcatcgccaagatggactcgactgccaacgaggtggaggccgtcaaagtgcacagcttccccacactcaagttctttcctgccagtgccgacaggacggtcattgattacaacggggaacgcacgctggatggttttaagaaattcctggagagcggtggccaggatggggcaggggatgatgacgatctcgaggacctggaagaagcagaggagccagacatggaggaagacgatgatcagaaagctgtgaaagatgaactgtaatacgcaaagccagacccgggcgctgccgagacccctcgggggctgcacacccagcagcagcgcacgcctccgaagcctgcggcctcgcttgaaggagggcgtcgccggaaacccagggaacctctctgaagtgacacctcacccctacacaccgtccgttcacccccgtctcttccttctgcttttcggtttttggaaagggatccatctccaggcagcccaccctggtggggcttgtttcctgaaaccatgatgtactttttcatacatgagtctgtccagagtgcttgctaccgtgttcggagtctcgctgcctccctcccgcgggaggtttctcctctttttgaaaattccgtctgtgggatttttagacatttttcgacatcagggtatttgttccaccttggccaggcctcctcggagaagcttgtcccccgtgtgggagggacggagccggactggacatggtcactcagtaccgcctgcagtgtcgccatgactgatcatggctcttgcatttttgggtaaatggagacttccggatcctgtcagggtgtcccccatgcctggaagaggagctggtggctgccagccctggggcccggcacaggcctgggccttccccttccctcaagccagggctcctcctcctgtcgtgggctcattgtgaccactggcctctctacagcacggcctgtggcctgttcaaggcagaaccacgacccttgactcccgggtggggaggtggccaaggatgctggagctgaatcagacgctgacagttcttcaggcagcaatgtgctattgaaanctaaaaggggatctctagag

SEQ ID NO: 53107 - DNA, 2173 bp, Homo sapiens
aagcaggctggtcccggtccgagtgtatggatgccaaccgaagcgccccgcctgatccgtgtccgacatgctgcgccgcgctctgctgtgcctggccgtggccgccctggtgcgcgccgacgcccccgaggaggaggaccacgtcctggtgctgcggaaaagcaacttcgcggaggcgctggcggcccacaagtacctgctggtggagttctatgccccttggtgtggccactgcaaggctctggcccctgagtatgccaaagccgctgggaagctgaaggcagaaggttccgagatcaggttggccaaggtggacgccacggaggagtctgacctggcccagcagtacggcgtgcgcggctatcccaccatcaagttcttcaggaatggagacacggcttcccccaaggaatatacagtttgatgaaggccggaacaactttgaaggggaggtcaccaaggagaacctgctggactttatcaaacacaaccagctgccccttgtcatcgagttcaccgagcagacagccccgaagatttttggaggtgaaatcaagactcacatcctgctgttcttgcccaagagtgtgtctgactatgacggcaaactgagcaacttcaaaacagcagccgagagcttcaagggcaagatcctgttcatcttcatcgacagcgaccacaccgacaaccagcgcatcctcgagttctttggcctgaagaaggaagagtgcccggccgtgcgcctcatcaccctggaggaggagatgaccaagtacaagcccgaatcggaggagctgacggcagagaggatcacagagttctgccaccgcttcctggagggcaaaatcaagccccacctgatgagccaggagctgccggaggactgggacaagcagcctgtcaaggtgcttgttgggaagaactttgaagacgtggcttttgatgagaaaaaaaacgtctttgtggagttctatgccccatggtgtggtcactgcaaacagttggctcccatttgggataaactgggagagacgtacaaggaccatgagaacatcgtcatcgccaagatggactcgactgccaacgaggtggaggccgtcaaagtgcacagcttccccacactcaagttctttcctgccagtgccgacaggacggtcattgattacaacggggaacgcacgctggatggttttaagaaattcctggagagcggtggccaggatggggcaggggatgatgacgatctcgaggacctggaagaagcagaggagccagacatggaggaagacgatgatcagaaagctgtgaaagatgaactgtaatacgcaaagccagacccgggcgctgccgagacccctcgggggctgcacacccagcagcagcgcacgcctccgaagcctgcggcctcgcttgaaggagggcgtcgccggaaacccagggaacctctctgaagtgacacctcacccctacacaccgtccgttcacccccgtctcttccttctgcttttcggtttttggaaagggatccatctccaggcagcccaccctggtggggcttgtttcctgaaaccatgatgtactttttcatacatgagtctgtccagagtgcttgctaccgtgttcggagtctcgctgcctccctcccgcgggaggtttctcctctttttgaaaattccgtctgtgggatttttagacatttttcgacatcagggtatttgttccaccttggccaggcctcctcggagaagcttgtcccccgtgtgggagggacggagccggactggacatggtcactcagtaccgcctgcagtgtcgccatgactgatcatggctcttgcatttttgggtaaatggagacttccggatcctgtcagggtgtcccccatgcctggaagaggagctggtggctgccagccctggggcccggcacaggcctgggccttccccttccctcaagccagggctcctcctcctgtcgtgggctcattgtgaccactggcctctctacagcacggcctgtggcctgttcaaggcagaaccacgacccttgactcccgggtggggaggtggccaaggatgctggagctgaatcagacgctgacagttcttcaggcatttctatttcacaatcgaattgaacacattggccaaataaagttgaaattttaccacc

SEQ ID NO: 53108 - DNA, 2329 bp, Homo sapiens
aagcaggctggtcccggtccgagtgtatggatgccaaccgaagcgccccgcctgatccgtgtccgacatgctgcgccgcgctctgctgtgcctggccgtggccgccctggtgcgcgccgacgcccccgaggaggaggaccacgtcctggtgctgcggaaaagcaacttcgcggaggcgctggcggcccacaagtacctgctggtggagttctatgccccttggtgtggccactgcaaggctctggcccctgagtatgccaaagccgctgggaagctgaaggcagaaggttccgagatcaggttggccaaggtggacgccacggaggagtctgacctggcccagcagtacggcgtgcgcggctatcccaccatcaagttcttcaggaatggagacacggcttcccccaaggaatatacagctggcagagaggctgatgacatcgtgaactggctgaagaagcgcacgggcccggctgccaccaccctgcctgacggcgcagctgcagagtccttggtggagtccagcgaggtggctgtcatcggcttcttcaaggacgtggagtcggactctgccaagcagtttttgcaggcagcagaggccatcgatgacataccatttgggatcacttccaacagtgacgtgttctccaaataccagctcgacaaagatggggttgtcctctttaagaagtttgatgaaggccggaacaactttgaaggggaggtcaccaaggagaacctgctggactttatcaaacacaaccagctgccccttgtcatcgagttcaccgagcagacagccccgaagatttttggaggtgaaatcaagactcacatcctgctgttcttgcccaagagtgtgtctgactatgacggcaaactgagcaacttcaaaacagcagccgagagcttcaagggcaagatcctgttcatcttcatcgacagcgaccacaccgacaaccagcgcatcctcgagttctttggcctgaagaaggaagagtgcccggccgtgcgcctcatcaccctggaggaggagatgaccaagtacaagcccgaatcggaggagctgacggcagagaggatcacagagttctgccaccgcttcctggagggcaaaatcaagccccacctgatgagccaggagctgccggaggactgggacaagcagcctgtcaaggtgcttgttgggaagaactttgaagacgtggcttttgatgagaaaaaaaacgtctttgtggagttctatgccccatggtgtggtcactgcaaacagttggctcccatttgggataaactgggagagacgtacaaggaccatgagaacatcgtcatcgccaagatggactcgactgccaacgaggtggaggccgtcaaagtgcacagcttccccacactcaagttctttcctgccagtgccgacaggacggtcattgattacaacggggaacgcacgctggatggttttaagaaattcctggagagcggtggccaggatggggcaggggatgatgacgatctcgaggacctggaagaagcagaggagccagacatggaggaagacgatgatcagaaagctgtgaaagatgaactgtaatacgcaaagccagacccgggcgctgccgagacccctcgggggctgcacacccagcagcagcgcacgcctccgaagcctgcggcctcgcttgaaggagggcgtcgccggaaacccagggaacctctctgaagtgacacctcacccctacacaccgtccgttcacccccgtctcttccttctgcttttcggtttttggaaagggatccatctccaggcagcccaccctggtggggcttgtttcctgaaaccatgatgtactttttcatacatgagtctgtccagagtgcttgctaccgtgttcggagtctcgctgcctccctcccgcgggaggtttctcctctttttgaaaattccgtctgtgggatttttagacatttttcgacatcagggtatttgttccaccttggccaggcctcctcggagaagcttgtcccccgtgtgggagggacggagccggactggacatggtcactcagtaccgcctgcagtgtcgccatgactgatcatggctcttgcatttttgggtaaatggagacttccggatcctgtcagggtgtcccccatgcctggaagaggagctggtggctgccagccctggggcccggcacaggcctgggccttccccttccctcaagccagggctcctcctcctgtcgtgggctcattgtgaccactggcctctctacagcacgggccccagtacggcgccaaggccgctacggacgctccaacgag

SEQ ID NO: 53109 - DNA, 2361 bp, Homo sapiens
aagcaggctggtcccggtccgagtgtatggatgccaaccgaagcgccccgcctgatccgtgtccgacatgctgcgccgcgctctgctgtgcctggccgtggccgccctggtgcgcgccgacgcccccgaggaggaggaccacgtcctggtgctgcggaaaagcaacttcgcggaggcgctggcggcccacaagtacctgctggtggagttctatgccccttggtgtggccactgcaaggctctggcccctgagtatgccaaagccgctgggaagctgaaggcagaaggttccgagatcaggttggccaaggtggacgccacggaggagtctgacctggcccagcagtacggcgtgcgcggctatcccaccatcaagttcttcaggaatggagacacggcttcccccaaggaatatacagctggcagagaggctgatgacatcgtgaactggctgaagaagcgcacgggcccggctgccaccaccctgcctgacggcgcagctgcagagtccttggtggagtccagcgaggtggctgtcatcggcttcttcaaggacgtggagtcggactctgccaagcagtttttgcaggcagcagaggccatcgatgacataccatttgggatcacttccaacagtgacgtgttctccaaataccagctcgacaaagatggggttgtcctctttaagaagtttgatgaaggccggaacaactttgaaggggaggtcaccaaggagaacctgctggactttatcaaacacaaccagctgccccttgtcatcgagttcaccgagcagacagccccgaagatttttggaggtgaaatcaagactcacatcctgctgttcttgcccaagagtgtgtctgactatgacggcaaactgagcaacttcaaaacagcagccgagagcttcaagggcaagatcctgttcatcttcatcgacagcgaccacaccgacaaccagcgcatcctcgagttctttggcctgaagaaggaagagtgcccggccgtgcgcctcatcaccctggaggaggagatgaccaagtacaagcccgaatcggaggagctgacggcagagaggatcacagagttctgccaccgcttcctggagggcaaaatcaagccccacctgatgagccaggagctgccggaggactgggacaagcagcctgtcaaggtgcttgttgggaagaactttgaagacgtggcttttgatgagaaaaaaaacgtctttgtggagttctatgccccatggtgtggtcactgcaaacagttggctcccatttgggataaactgggagagacgtacaaggaccatgagaacatcgtcatcgccaagatggactcgactgccaacgaggtggaggccgtcaaagtgcacagcttccccacactcaagttctttcctgccagtgccgacaggacggtcattgattacaacggggaacgcacgctggatggttttaagaaattcctggagagcggtggccaggatggggcaggggatgatgacgatctcgaggacctggaagaagcagaggagccagacatggaggaagacgatgatcagaaagctgtgaaagatgaactgtaatacgcaaagccagacccgggcgctgccgagacccctcgggggctgcacacccagcagcagcgcacgcctccgaagcctgcggcctcgcttgaaggagggcgtcgccggaaacccagggaacctctctgaagtgacacctcacccctacacaccgtccgttcacccccgtctcttccttctgcttttcggtttttggaaagggatccatctccaggcagcccaccctggtggggcttgtttcctgaaaccatgatgtactttttcatacatgagtctgtccagagtgcttgctaccgtgttcggagtctcgctgcctccctcccgcgggaggtttctcctctttttgaaaattccgtctgtgggatttttagacatttttcgacatcagggtatttgttccaccttggccaggcctcctcggagaagcttgtcccccgtgtgggagggacggagccggactggacatggtcactcagtaccgcctgcagtgtcgccatgactgatcatggctcttgcatttttgggtaaatggagacttccggatcctgtagccagggctcctcctcctgtcgtgggctcattgtgaccactggcctctctacagcacggcctgtggcctgttcaaggcagaaccacgacccttgactcccgggtggggaggtggccaaggatgctggagctgaatcagacgctgacagttcttcaggcatttctatttcacaatcgaattgaacacattggccaaataaagttgaaattttaccacc

SEQ ID NO: 53110 - DNA, 2291 bp, Homo sapiens
aagcaggctggtcccggtccgagtgtatggatgccaaccgaagcgccccgcctgatccgtgtccgacatgctgcgccgcgctctgctgtgcctggccgtggccgccctggtgcgcgccgacgcccccgaggaggaggaccacgtcctggtgctgcggaaaagcaacttcgcggaggcgctggcggcccacaagtacctgctggtggagttctatgccccttggtgtggccactgcaaggctctggcccctgagtatgccaaagccgctgggaagctgaaggcagaaggttccgagatcaggttggccaaggtggacgccacggaggagtctgacctggcccagcagtacggcgtgcgcggctatcccaccatcaagttcttcaggaatggagacacggcttcccccaaggaatatacagctggcagagaggctgatgacatcgtgaactggctgaagaagcgcacgggcccggctgccaccaccctgcctgacggcgcagctgcagagtccttggtggagtccagcgaggtggctgtcatcggcttcttcaaggacgtggagtcggactctgccaagcagtttttgcaggcagcagaggccatcgatgacataccatttgggatcacttccaacagtgacgtgttctccaaataccagctcgacaaagatggggttgtcctctttaagaagtttgatgaaggccggaacaactttgaaggggaggtcaccaaggagaacctgctggactttatcaaacacaaccagctgccccttgtcatcgagttcaccgagcagacagccccgaagatttttggaggtgaaatcaagactcacatcctgctgttcttgcccaagagtgtgtctgactatgacggcaaactgagcaacttcaaaacagcagccgagagcttcaagggcaagatcctgttcatcttcatcgacagcgaccacaccgacaaccagcgcatcctcgagttctttggcctgaagaaggaagagtgcccggccgtgcgcctcatcaccctggaggaggagatgaccaagtacaagcccgaatcggaggagctgacggcagagaggatcacagagttctgccaccgcttcctggagggcaaaatcaagccccacctgatgagccaggagctgccggaggactgggacaagcagcctgtcaaggtgcttgttgggaagaactttgaagacgtggcttttgatgagaaaaaaaacgtctttgtggagttctatgccccatggtgtggtcactgcaaacagttggctcccatttgggataaactgggagagacgtacaaggaccatgagaacatcgtcatcgccaagatggactcgactgccaacgaggtggaggccgtcaaagtgcacagcttccccacactcaagttctttcctgccagtgccgacaggacggtcattgattacaacggggaacgcacgctggatggttttaagaaattcctggagagcggtggccaggatggggcaggggatgatgacgatctcgaggacctggaagaagcagaggagccagacatggaggaagacgatgatcagaaagctgtgaaagatgaactgtaatacgcaaagccagacccgggcgctgccgagacccctcgggggctgcacacccagcagcagcgcacgcctccgaagcctgcggcctcgcttgaaggagggcgtcgccggaaacccagggaacctctctgaagtgacacctcacccctacacaccgtccgttcacccccgtctcttccttctgcttttcggtttttggaaagggatccatctccaggcagcccaccctggtggggcttgtttcctgaaaccatgatgtactttttcatacatgagtctgtccagagtgcttgctaccgtgttcggagtctcgctgcctccctcccgcgggaggtttctcctctttttgaaaattccgtctgtgggatttttagacatttttcgacatcagggtatttcagggtgtcccccatgcctggaagaggagctggtggctgccagccctggggcccggcacaggcctgggccttccccttccctcaagccagggctcctcctcctgtcgtgggctcattgtgaccactggcctctctacagcacggcctgtggcctgttcaaggcagaaccacgacccttgactcccgggtggggaggtggccaaggatgctggagctgaatcagacgctgacagttcttcaggcatttctatttcacaatcgaattgaacacattggccaaataaagttgaaattttaccacc

SEQ ID NO: 53111 - DNA, 2147 bp, Homo sapiens
aagcaggctggtcccggtccgagtgtatggatgccaaccgaagcgccccgcctgatccgtgtccgacatgctgcgccgcgctctgctgtgcctggccgtggccgccctggtgcgcgccgacgcccccgaggaggaggaccacgtcctggtgctgcggaaaagcaacttcgcggaggcgctggcggcccacaagtacctgctggtggagttctatgccccttggtgtggccactgcaaggctctggcccctgagtatgccaaagccgctgggaagctgaaggcagaaggttccgagatcaggttggccaaggtggacgccacggaggagtctgacctggcccagcagtacggcgtgcgcggctatcccaccatcaagttcttcaggaatggagacacggcttcccccaaggaatatacagctggcagagaggctgatgacatcgtgaactggctgaagaagcgcacgggcccggctgccaccaccctgcctgacggcgcagctgcagagtccttggtggagtccagcgaggtggctgtcatcggcttcttcaaggacgtggagtcggactctgccaagcagtttttgcaggcagcagaggccatcgatgacataccatttgggatcacttccaacagtgacgtgttctccaaataccagctcgacaaagatggggttgtcctctttaagaagtttgatgaaggccggaacaactttgaaggggaggtcaccaaggagaacctgctggactttatcaaacacaaccagctgccccttgtcatcgagttcaccgagcagacagccccgaagatttttggaggtgaaatcaagactcacatcctgctgttcttgcccaagagtgtgtctgactatgacggcaaactgagcaacttcaaaacagcagccgagagcttcaagggcaagatcctgttcatcttcatcgacagcgaccacaccgacaaccagcgcatcctcgagttctttggcctgaagaaggaagagtgcccggccgtgcgcctcatcaccctggaggaggagatgaccaagtacaagcccgaatcggaggagctgacggcagagaggatcacagagttctgccaccgcttcctggagggcaaaatcaagccccacctgatgagccaggagctgccggaggactgggacaagcagcctgtcaaggtgcttgttgggaagaactttgaagacgtggcttttgatgagaaaaaaaacgtctttgtggagttctatgccccatggtgtggtcactgcaaacagttggctcccatttgggataaactgggagagacgtacaaggaccatgagaacatcgtcatcgccaagatggactcgactgccaacgaggtggaggccgtcaaagtgcacagcttccccacactcaagttctttcctgccagtgccgacaggacggtcattgattacaacggggaacgcacgctggatggttttaagaaattcctggagagcggtggccaggatggggcaggggatgatgacgatctcgaggacctggaagaagcagaggagccagacatggaggaagacgatgatcagaaagctgtgaaagatgaactgtaatacgcaaagccagacccgggcgctgccgagacccctcgggggctgcacacccagcagcagcgcacgcctccgaagcctgcggcctcgcttgaaggagggcgtcgccggaaacccagggaacctctctgaagtgacacctcacccctacacaccgtccgttcacccccgtctcttccttctgcttttcggtttttggaaagggatccatctccaggcagcccaccctggtggggcttgtttcctgaaaccatgatgtactttttcatacatgagtctgtccagagtgcttgctaccgtgttcggagtctcgctgcctccctcccgcgggaggtttctcctctttttgaaaattccgtctgtgggatttttagacatttttcgacatcagggtatttcctgtggcctgttcaaggcagaaccacgacccttgactcccgggtggggaggtggccaaggatgctggagctgaatcagacgctgacagttcttcaggcatttctatttcacaatcgaattgaacacattggccaaataaagttgaaattttaccacc

SEQ ID NO: 53112 - DNA, 1901 bp, Homo sapiens
aagcaggctggtcccggtccgagtgtatggatgccaaccgaagcgccccgcctgatccgtgtccgacatgctgcgccgcgctctgctgtgcctggccgtggccgccctggtgcgcgccgacgcccccgaggaggaggaccacgtcctggtgctgcggaaaagcaacttcgcggaggcgctggcggcccacaagtacctgctggtggagttctatgccccttggtgtggccactgcaaggctctggcccctgagtatgccaaagccgctgggaagctgaaggcagaaggttccgagatcaggttggccaaggtggacgccacggaggagtctgacctggcccagcagtacggcgtgcgcggctatcccaccatcaagttcttcaggaatggagacacggcttcccccaaggaatatacagctggcagagaggctgatgacatcgtgaactggctgaagaagcgcacgggcccggctgccaccaccctgcctgacggcgcagctgcagagtccttggtggagtccagcgaggtggctgtcatcggcttcttcaaggacgtggagtcggactctgccaagcagtttttgcaggcagcagaggccatcgatgacataccatttgggatcacttccaacagtgacgtgttctccaaataccagctcgacaaagatggggttgtcctctttaagaagtttgatgaaggccggaacaactttgaaggggaggtcaccaaggagaacctgctggactttatcaaacacaaccagctgccccttgtcatcgagttcaccgagcagacagccccgaagatttttggaggtgaaatcaagactcacatcctgctgttcttgcccaagagtgtgtctgactatgacggcaaactgagcaacttcaaaacagcagccgagagcttcaagggcaagatcctgttcatcttcatcgacagcgaccacaccgacaaccagcgcatcctcgagttctttggcctgaagaaggaagagtgcccggccgtgcgcctcatcaccctggaggaggagatgaccaagtacaagcccgaatcggaggagctgacggcagagaggatcacagagttctgccaccgcttcctggagggcaaaatcaagccccacctgatgagccaggagctgccggaggactgggacaagcagcctgtcaaggtgcttgttgggaagaactttgaagacgtggcttttgatgagaaaaaaaacgtctttgtggagttctatgccccatggtgtggtcactgcaaacagttggctcccatttgggataaactgggagagacgtacaaggaccatgagaacatcgtcatcgccaagatggactcgactgccaacgaggtggaggccgtcaaagtgcacagcttccccacactcaagttctttcctgccagtgccgacaggacggtcattgattacaacggggaacgcacgctggatggttttaagaaattcctggagagcggtggccaggatggggcaggggatgatgacgatctcgaggacctggaagaagcagaggagccagacatggaggaagacgatgatcagaaagctgtgaaagatgaactgtaatacgcaaagccagacccgggcgctgccgagacccctcgggggctgcacacccagcagcagcgcacgcctccgaagcctgcggcctcgcttgaaggagggcgtcgccggaaacccagggaacctctctgaagtgacacctcacccctacacaccgtccgttcacccccgtctcttccttctgcttttcggtttttggaaagggatccatctccaggcagcccaccctggtggggcttgtttcctgaaaccatgatgtactttttcatacatgagtctgtattaactgcttggggatcctctaaatcgc

SEQ ID NO: 53113 - DNA, 1952 bp, Homo sapiens
aagcaggctggtcccggtccgagtgtatggatgccaaccgaagcgccccgcctgatccgtgtccgacatgctgcgccgcgctctgctgtgcctggccgtggccgccctggtgcgcgccgacgcccccgaggaggaggaccacgtcctggtgctgcggaaaagcaacttcgcggaggcgctggcggcccacaagtacctgctggtggagttctatgccccttggtgtggccactgcaaggctctggcccctgagtatgccaaagccgctgggaagctgaaggcagaaggttccgagatcaggttggccaaggtggacgccacggaggagtctgacctggcccagcagtacggcgtgcgcggctatcccaccatcaagttcttcaggaatggagacacggcttcccccaaggaatatacagctggcagagaggctgatgacatcgtgaactggctgaagaagcgcacgggcccggctgccaccaccctgcctgacggcgcagctgcagagtccttggtggagtccagcgaggtggctgtcatcggcttcttcaaggacgtggagtcggactctgccaagcagtttttgcaggcagcagaggccatcgatgacataccatttgggatcacttccaacagtgacgtgttctccaaataccagctcgacaaagatggggttgtcctctttaagaagtttgatgaaggccggaacaactttgaaggggaggtcaccaaggagaacctgctggactttatcaaacacaaccagctgccccttgtcatcgagttcaccgagcagacagccccgaagatttttggaggtgaaatcaagactcacatcctgctgttcttgcccaagagtgtgtctgactatgacggcaaactgagcaacttcaaaacagcagccgagagcttcaagggcaagatcctgttcatcttcatcgacagcgaccacaccgacaaccagcgcatcctcgagttctttggcctgaagaaggaagagtgcccggccgtgcgcctcatcaccctggaggaggagatgaccaagtacaagcccgaatcggaggagctgacggcagagaggatcacagagttctgccaccgcttcctggagggcaaaatcaagccccacctgatgagccaggagctgccggaggactgggacaagcagcctgtcaaggtgcttgttgggaagaactttgaagacgtggcttttgatgagaaaaaaaacgtctttgtggagttctatgccccatggtgtggtcactgcaaacagttggctcccatttgggataaactgggagagacgtacaaggaccatgagaacatcgtcatcgccaagatggactcgactgccaacgaggtggaggccgtcaaagtgcacagcttccccacactcaagttctttcctgccagtgccgacaggacggtcattgattacaacggggaacgcacgctggatggttttaagaaattcctggagagcggtggccaggatggggcaggggatgatgacgatctcgaggacctggaagaagcagaggagccagacatggaggaagctggacatggtcactcagtaccgcctgcagtgtcgccatgactgatcatggctcttgcatttttgggtaaatggagacttccggatcctgtcagggtgtcccccatgcctggaagaggagctggtggctgccagccctggggcccggcacaggcctgggccttccccttccctcaagccagggctcctcctcctgtcgtgggctcattgtgaccactggcctctctacagcacggcctgtggcctgttcaaggcagaaccacgacccttgactcccgggtggggaggtggccaaggatgctggagctgaatcagacgctgacagttcttcaggcatttctatttcacaatcgaattgaacacattggccaaataaagttgaaattttaccacc

SEQ ID NO: 53114 - DNA, 1717 bp, Homo sapiens
aagcaggctggtcccggtccgagtgtatggatgccaaccgaagcgccccgcctgatccgtgtccgacatgctgcgccgcgctctgctgtgcctggccgtggccgccctggtgcgcgccgacgcccccgaggaggaggaccacgtcctggtgctgcggaaaagcaacttcgcggaggcgctggcggcccacaagtacctgctggtggagttctatgccccttggtgtggccactgcaaggctctggcccctgagtatgccaaagccgctgggaagctgaaggcagaaggttccgagatcaggttggccaaggtggacgccacggaggagtctgacctggcccagcagtacggcgtgcgcggctatcccaccatcaagttcttcaggaatggagacacggcttcccccaaggaatatacagctggcagagaggctgatgacatcgtgaactggctgaagaagcgcacgggcccggctgccaccaccctgcctgacggcgcagctgcagagtccttggtggagtccagcgaggtggctgtcatcggcttcttcaaggacgtggagtcggactctgccaagcagtttttgcaggcagcagaggccatcgatgacataccatttgggatcacttccaacagtgacgtgttctccaaataccagctcgacaaagatggggttgtcctctttaagaagtttgatgaaggccggaacaactttgaaggggaggtcaccaaggagaacctgctggactttatcaaacacaaccagctgccccttgtcatcgagttcaccgagcagacagccccgaagatttttggaggtgaaatcaagactcacatcctgctgttcttgcccaagagtgtgtctgactatgacggcaaactgagcaacttcaaaacagcagccgagagcttcaagggcaagatcctgttcatcttcatcgacagcgaccacaccgacaaccagcgcatcctcgagttctttggcctgaagaaggaagagtgcccggccgtgcgcctcatcaccctggaggaggagatgaccaagtacaagcccgaatcggaggagctgacggcagagaggatcacagagttctgccaccgcttcctggagggcaaaatcaagccccacctgatgagccaggagctgccggaggactgggacaagcagcctgtcaaggtgcttgttgggaagaactttgaagacgtggcttttgatgagaaaaaaaacgtctttgtggagttctatgccccatggtgtggtcactgcaaacagttggctcccatttgggataaactgggagagacgtacaaggaccatgagaacatcgtcatcgccaagatggactcgactgccaacgaggtggaggccgtcaaagtgcacagcttccccacactcaagttctttcctgccagtgccgacaggacggtcattgattacaacggggaacgcacgctggatggttttaagaaattcctggagagcggtggccaggatggggcaggggatgatgacgatctcgaggacctggaagaagcagaggagccagacatggaggaagcctgtggcctgttcaaggcagaaccacgacccttgactcccgggtggggaggtggccaaggatgctggagctgaatcagacgctgacagttcttcaggcatttctatttcacaatcgaattgaacacattggccaaataaagttgaaattttaccacc

SEQ ID NO: 53115 - DNA, 1490 bp, Homo sapiens
aagcaggctggtcccggtccgagtgtatggatgccaaccgaagcgccccgcctgatccgtgtccgacatgctgcgccgcgctctgctgtgcctggccgtggccgccctggtgcgcgccgacgcccccgaggaggaggaccacgtcctggtgctgcggaaaagcaacttcgcggaggcgctggcggcccacaagtacctgctggtggagttctatgccccttggtgtggccactgcaaggctctggcccctgagtatgccaaagccgctgggaagctgaaggcagaaggttccgagatcaggttggccaaggtggacgccacggaggagtctgacctggcccagcagtacggcgtgcgcggctatcccaccatcaagttcttcaggaatggagacacggcttcccccaaggaatatacagctggcagagaggctgatgacatcgtgaactggctgaagaagcgcacgggcccggctgccaccaccctgcctgacggcgcagctgcagagtccttggtggagtccagcgaggtggctgtcatcggcttcttcaaggacgtggagtcggactctgccaagcagtttttgcaggcagcagaggccatcgatgacataccatttgggatcacttccaacagtgacgtgttctccaaataccagctcgacaaagatggggttgtcctctttaagaagtttgatgaaggccggaacaactttgaaggggaggtcaccaaggagaacctgctggactttatcaaacacaaccagctgccccttgtcatcgagttcaccgagcagacagccccgaagatttttggaggtgaaatcaagactcacatcctgctgttcttgcccaagagtgtgtctgactatgacggcaaactgagcaacttcaaaacagcagccgagagcttcaagggcaagatcctgttcatcttcatcgacagcgaccacaccgacaaccagcgcatcctcgagttctttggcctgaagaaggaagagtgcccggccgtgcgcctcatcaccctggaggaggagatgaccaagtacaagcccgaatcggaggagctgacggcagagaggatcacagagttctgccaccgcttcctggagggcaaaatcaagccccacctgatgagccaggagctgccggaggactgggacaagcagcctgtcaaggtgcttgttgggaagaactttgaagacgtggcttttgatgagaaaaaaaacgtctttgtggagttctatgccccatggtgtggtcactgcaaacagttggctcccatttgggataaactgggagagacgtacaaggaccatgagaacatcgtcatcgccaagatggactcgactgccaacgaggtggaggccgtcaaagtgcacagcttccccacactcaagttctttcctgccagtgccgacaggacgtgaatagcgaggtgccgatgaatagcgaggtgccgatgaatagcgaggtgccgatgaatagcga

SEQ ID NO: 53116 - DNA, 1460 bp, Homo sapiens
aagcaggctggtcccggtccgagtgtatggatgccaaccgaagcgccccgcctgatccgtgtccgacatgctgcgccgcgctctgctgtgcctggccgtggccgccctggtgcgcgccgacgcccccgaggaggaggaccacgtcctggtgctgcggaaaagcaacttcgcggaggcgctggcggcccacaagtacctgctggtggagttctatgccccttggtgtggccactgcaaggctctggcccctgagtatgccaaagccgctgggaagctgaaggcagaaggttccgagatcaggttggccaaggtggacgccacggaggagtctgacctggcccagcagtacggcgtgcgcggctatcccaccatcaagttcttcaggaatggagacacggcttcccccaaggaatatacagctggcagagaggctgatgacatcgtgaactggctgaagaagcgcacgggcccggctgccaccaccctgcctgacggcgcagctgcagagtccttggtggagtccagcgaggtggctgtcatcggcttcttcaaggacgtggagtcggactctgccaagcagtttttgcaggcagcagaggccatcgatgacataccatttgggatcacttccaacagtgacgtgttctccaaataccagctcgacaaagatggggttgtcctctttaagaagtttgatgaaggccggaacaactttgaaggggaggtcaccaaggagaacctgctggactttatcaaacacaaccagctgccccttgtcatcgagttcaccgagcagacagccccgaagatttttggaggtgaaatcaagactcacatcctgctgttcttgcccaagagtgtgtctgactatgacggcaaactgagcaacttcaaaacagcagccgagagcttcaagggcaagatcctgttcatcttcatcgacagcgaccacaccgacaaccagcgcatcctcgagttctttggcctgaagaaggaagagtgcccggccgtgcgcctcatcaccctggaggaggagatgaccaagtacaagcccgaatcggaggagctgacggcagagaggatcacagagttctgccaccgcttcctggagggcaaaatcaagccccacctgatgagccaggagctgccggaggactgggacaagcagcctgtcaaggtgcttgttgggaagaactttgaagacgtggcttttgatgagaaaaaaaacgtctttgtggagttctatgccccatggtgtggtcactgcaaacagttggctcccatttgggataaactgggagagacgtacaaggaccatgagaacatcgtcatcgccaagatggactcgactgccaacgaggtggaggccgtcaaagtgcacagcttccccacactcaagttctttcctgccagtgccgacaggacgagaatggaaggggccacagtcataagtagagaag

SEQ ID NO: 53117 - DNA, 1321 bp, Homo sapiens
aagcaggctggtcccggtccgagtgtatggatgccaaccgaagcgccccgcctgatccgtgtccgacatgctgcgccgcgctctgctgtgcctggccgtggccgccctggtgcgcgccgacgcccccgaggaggaggaccacgtcctggtgctgcggaaaagcaacttcgcggaggcgctggcggcccacaagtacctgctggtggagttctatgccccttggtgtggccactgcaaggctctggcccctgagtatgccaaagccgctgggaagctgaaggcagaaggttccgagatcaggttggccaaggtggacgccacggaggagtctgacctggcccagcagtacggcgtgcgcggctatcccaccatcaagttcttcaggaatggagacacggcttcccccaaggaatatacagctggcagagaggctgatgacatcgtgaactggctgaagaagcgcacgggcccggctgccaccaccctgcctgacggcgcagctgcagagtccttggtggagtccagcgaggtggctgtcatcggcttcttcaaggacgtggagtcggactctgccaagcagtttttgcaggcagcagaggccatcgatgacataccatttgggatcacttccaacagtgacgtgttctccaaataccagctcgacaaagatggggttgtcctctttaagaagtttgatgaaggccggaacaactttgaaggggaggtcaccaaggagaacctgctggactttatcaaacacaaccagctgccccttgtcatcgagttcaccgagcagacagccccgaagatttttggaggtgaaatcaagactcacatcctgctgttcttgcccaagagtgtgtctgactatgacggcaaactgagcaacttcaaaacagcagccgagagcttcaagggcaagatcctgttcatcttcatcgacagcgaccacaccgacaaccagcgcatcctcgagttctttggcctgaagaaggaagagtgcccggccgtgcgcctcatcaccctggaggaggagatgaccaagtacaagcccgaatccagccctggggcccggcacaggcctgggccttccccttccctcaagccagggctcctcctcctgtcgtgggctcattgtgaccactggcctctctacagcacggcctgtggcctgttcaaggcagaaccacgacccttgactcccgggtggggaggtggccaaggatgctggagctgaatcagacgctgacagttcttcaggcatttctatttcacaatcgaattgaacacattggccaaataaagttgaaattttaccacc

SEQ ID NO: 53118 - DNA, 1178 bp, Homo sapiens
aagcaggctggtcccggtccgagtgtatggatgccaaccgaagcgccccgcctgatccgtgtccgacatgctgcgccgcgctctgctgtgcctggccgtggccgccctggtgcgcgccgacgcccccgaggaggaggaccacgtcctggtgctgcggaaaagcaacttcgcggaggcgctggcggcccacaagtacctgctggtggagttctatgccccttggtgtggccactgcaaggctctggcccctgagtatgccaaagccgctgggaagctgaaggcagaaggttccgagatcaggttggccaaggtggacgccacggaggagtctgacctggcccagcagtacggcgtgcgcggctatcccaccatcaagttcttcaggaatggagacacggcttcccccaaggaatatacagctggcagagaggctgatgacatcgtgaactggctgaagaagcgcacgggcccggctgccaccaccctgcctgacggcgcagctgcagagtccttggtggagtccagcgaggtggctgtcatcggcttcttcaaggacgtggagtcggactctgccaagcagtttttgcaggcagcagaggccatcgatgacataccatttgggatcacttccaacagtgacgtgttctccaaataccagctcgacaaagatggggttgtcctctttaagaagtttgatgaaggccggaacaactttgaaggggaggtcaccaaggagaacctgctggactttatcaaacacaaccagctgccccttgtcatcgagttcaccgagcagacagccccgaagatttttggaggtgaaatcaagactcacatcctgctgttcttgcccaagagtgtgtctgactatgacggcaaactgagcaacttcaaaacagcagccgagagcttcaagggcaagacctgtcatcttcatcgacaggaccacccgagagcaggcctccgagttctggcgaaaggaaagccggcggggcccatcctggggagggatgcagtcacagcgatcgaaggcgagaaaggcaagtcgcccgctggggaaaacccacgagcgggcggaggacccgtggggggaaaaaacagacggaaaagagagggacagagggagacgccgaagaacaaacacaacaagggagccccgaggggcgcgcgcacgcgga

SEQ ID NO: 53119 - DNA, 1147 bp, Homo sapiens
aagcaggctggtcccggtccgagtgtatggatgccaaccgaagcgccccgcctgatccgtgtccgacatgctgcgccgcgctctgctgtgcctggccgtggccgccctggtgcgcgccgacgcccccgaggaggaggaccacgtcctggtgctgcggaaaagcaacttcgcggaggcgctggcggcccacaagtacctgctggtggagttctatgccccttggtgtggccactgcaaggctctggcccctgagtatgccaaagccgctgggaagctgaaggcagaaggttccgagatcaggttggccaaggtggacgccacggaggagtctgacctggcccagcagtacggcgtgcgcggctatcccaccatcaagttcttcaggaatggagacacggcttcccccaaggaatatacagctggcagagaggctgatgacatcgtgaactggctgaagaagcgcacgggcccggctgccaccaccctgcctgacggcgcagctgcagagtccttggtggagtccagcgaggtggctgtcatcggcttcttcaaggacgtggagtcggactctgccaagcagtttttgcaggcagcagaggccatcgatgacataccatttgggatcacttccaacagtgacgtgttctccaaataccagctcgacaaagatggggttgtcctctttaagaaggttccaccttggccaggcctcctcggagaagcttgtcccccgtgtgggagggacggagccggactggacatggtcactcagtaccgcctgcagtgtcgccatgactgatcatggctcttgcatttttgggtaaatggagacttccggatcctgtcagggtgtcccccatgcctggaagaggagctggtggctgccagccctggggcccggcacaggcctgggccttccccttccctcaagccagggctcctcctcctgtcgtgggctcattgtgaccactggcctctctacagcacggcctgtggcctgttcaaggcagaaccacgacccttgactcccgggtggggaggtggccaaggatgctggagctgaatcagacgctgacagttcttcaggcatttctatttcacaatcgaattgaacacattggccaaataaagttgaaattttaccacc

SEQ ID NO: 53120 - DNA, 761 bp, Homo sapiens
aagcaggctggtcccggtccgagtgtatggatgccaaccgaagcgccccgcctgatccgtgtccgacatgctgcgccgcgctctgctgtgcctggccgtggccgccctggtgcgcgccgacgcccccgaggaggaggaccacgtcctggtgctgcggaaaagcaacttcgcggaggcgctggcggcccacaagtacctgctggtggagttctatgccccttggtgtggccactgcaaggctctggcccctgagtatgccaaagccgctgggaagctgaaggcagaaggttccgagatcaggttggccaaggtggacgccacggaggagtctgacctggcccagcagtacggcgtgcgcggctatcccaccatcaagttcttcaggaatggagacacggcttcccccaaggaatatacagctggcagagaggctgatgacatcgtgaactggctgaagaagcgcacgggcccggctgccaccaccctgcctgacggcgcagctgcagagtccttggtggagtccagcgaggtggctgtcatcggcttcttcaaggacgtggagtcggactctgccaagcagtttttgcaggcagcagaggccatcgatgacataccatttgggatcacttccaacagtgacgtgttctccaaataccagctcgacaaagatggggttgtcctctttaagaagtttgatgaaggccggaacaactttgaaggggaggtcaaagccgcttcgcagtaagaagccgcttcgcagt

SEQ ID NO: 53121 - DNA, 3805 bp, Homo sapiens
ttccctccctagtagccttcacccccctcaatgcctcccaccccaaaagatctgctgggcccacgttccagcgcaacgcggtggaagacggccctcatgtgccagtgcggaccctcgcgcccctccagcctgcagccagccggccgctcctccagcgcgcaggcgcaggacggaaaaaaaaaacacaaaaaaacaacaaaaaaaaaacccaaaaaaacacaaaccacagctcccagcagccctcgcgccgtccgcgcgcagccgcagagcagaggctgccgggaacgcgggcccagaggcggggcgagcgcgcgcggggcggaagtcggccaccttcctccgtcccggccgttagcccagccaagcccagccaagcccagccaagccccgccgatcgcgggcaccggagccagccccgcagcggagggaccacagagcaccagcctgcatggaacttccttcctcactcagcttcccacgttgccagctgggacaggggagatggagtaattttgctgtggaaagacttcacgtcttgccgaatgaaagtaagcaaagatactgctagagtcgggaatctagagtcgggaattcattaagccaagggagtaagaatggccacagagtagtgaaatactgtttcttctggaaaagtcagcctccagcgcctgcagcttccggaactaagatgtgactgggcttgcggaggcgctgactcctctcctccctccctggctgtgcaggtcccgcctgtctgtcacgctgatgcccgtgcagctgtctgagcacccggaatggaatgagtctatgcactccctccggatcagtgtggggggccttcctgtgctggcgtccatgaccaaggccgcggacccccgcttccgcccccgctggaaggtgatcctgacgttctttgtgggtgctgccatcctctggctgctctgctcccaccgcccggcccccggcaggccccccacccacaatgcacacaactggaggctcggccaggcgcccgccaactggtacaatgacacctaacccctgtctcccccacaaaggacaccggctgggattcggtatcgaatcgcagttatcgcagacctggacacagagtcaagggcccaagaggaaaacacctggttcagttacctgaaaaagggctacctgaccctgtcagacagtggggacaaggtggccgtggaatgggacaaagaccatggggtcctggagtcccacctggcggagaaggggagaggcatggagctatccgacctgattgttttcaatgggaaactctactccgtggatgaccggacgggggtcgtctaccagatcgaaggcagcaaagccgtgccctgggtgattctgtccgacggcgacggcaccgtggagaaaggcttcaaggccgaatggctggcagtgaaggacgagcgtctgtacgtgggcggcctgggcaaggagtggacgaccactacgggtgatgtggtgaacgagaacccggagtgggtgaaggtggtgggctacaagggcagcgtggaccacgagaactgggtgtccaactacaacgccctgcgggctgctgccggcatccagccgccaggctacctcatccatgagtctgcctgctggagtgacacgctgcagcgctggttcttcctgccgcgccgcgccagccaggagcgctacagcgagaaggacgacgagcgcaagggcgccaacctgctgctgagcgcctcccctgacttcggcgacatcgctgtgagccacgtcggggcggtggtccccactcacggcttctcgtccttcaagttcatccccaacaccgacgaccagatcattgtggccctcaaatccgaggaggacagcggcagagtcgcctcctacatcatggccttcacgctggacgggcgcttcctgttgccggagaccaagatcggaagcgtgaaatacgaaggcatcgagttcatttaactcaaaacggaaacactgagcaaggccatcaggactcagcttttataaaaacaagaggagtgcacttttgttttgttttgttctttttggaactgtgcctgggttggaggtctggacagggagcccagtcccgggccccatagtggtgcgggcactggacccccgggccccacggaggccgcggtctgaactgctttccatgctgccatctggtggtgatttcggtcacttcaggcattgactcaaggcctgcctaactggctgggtcgtttcttccatccgacctcgtttcttttctttcctatgttcttttgttcagtgaatatccctagagctcctaccatatgtcaggccctatgcctcaccctgagaacgcagtgagcatgaggtggacctgtttgctgggaaccccaggtcacccccttttcttcctactctgtgcctggagcatcatgtccacccctgcagatccttggaaaagaaaatgtttatgttgcagggtattgcatggtcacgagtgagggcaggcccctggggacacatctgcccacagctgcacaggccagggcgcaggcacatctgttggttctcaggcctcagataaaaccatctccgcatcatatggccagtgaccgctttctcccttcaagaaaattctgtggctgtgcagtactttgaagttttaattattaacctgctttaattaaagcagtttcctttcttataaagtggaatcaccaaatcttatcacacagagcacagtcctgtagttacccagcccgctccagcagtgcgggagattgtaaggaagcggtggcggctggtgaagcaagtctcacatgtcggcgttcttggccaatggatacaaagataaagaaaatgttgcctttttctaggaactgtcagaaatcctcatgcctttcaagacttctgtgaatgacttgaattttttattccctgcctagggtctgtgaacgaggcctgtctcttccctggggtttctttccatggcctttatttctcctcttccagtgggagttttgcaggctcttctctgtggaaacttcacgagcgttggctgggcctcggcttcgctggagtgtactccagggtgaaggcagagtgggatttgagacccaggttaggcacgacccaggctgagaagggacgtttccatcattcacagtgccctccccacagcactacctcaccccgacccccaccctcactcctaccccaccccgcgatcgtcaggggtgccacggtgggccggagggtgccggctctggctgtccctgtgccggtccctcacaaacctctccccctttgaaactcaagcacagctgcgaggagggcagcgaggagggacccctctctcatggttgtctctttcccccgctatgtcataggtagtggaggaagcgaaggaagtgaacgctgaatgtgacgcatttctgaagagctcagctgtcaccgggcatagcctggaagccccaagtctgttctgactttgcctggctgtctccttgacccgcctcctagatcattgtccttgatgtccaggctgggtcatttaaaatagagatgcaatcaggaaggttgggggacttgggactgtggctgaattgagaccttgctgatgtattcatgtcagcacctgagtcacagcccaggtgcccggaagcagcctcttcgcataggcagtgatttgcgattactttaaagctcaccttttttcttcccctctctgttcgctgctgtcagcataatgattgtgttccttccctatgggatccatctgttttgtaaacaataaagcgtctgagggagtgta

SEQ ID NO: 53122 - DNA, 3610 bp, Homo sapiens
ttccctccctagtagccttcacccccctcaatgcctcccaccccaaaagatctgctgggcccacgttccagcgcaacgcggtggaagacggccctcatgtgccagtgcggaccctcgcgcccctccagcctgcagccagccggccgctcctccagcgcgcaggcgcaggacggaaaaaaaaaacacaaaaaaacaacaaaaaaaaaacccaaaaaaacacaaaccacagctcccagcagccctcgcgccgtccgcgcgcagccgcagagcagaggctgccgggaacgcgggcccagaggcggggcgagcgcgcgcggggcggaagtcggccaccttcctccgtcccggccgttagcccagccaagcccagccaagcccagccaagccccgccgatcgcgggcaccggagccagccccgcagcggagggaccacagagcaccagcctgcatggaacttccttcctcactcagcttcccacgttgccagctgggacaggggagatggagtaattttgctgtggaaagacttcacgtcttgccgaatgaaagtcccgcctgtctgtcacgctgatgcccgtgcagctgtctgagcacccggaatggaatgagtctatgcactccctccggatcagtgtggggggccttcctgtgctggcgtccatgaccaaggccgcggacccccgcttccgcccccgctggaaggtgatcctgacgttctttgtgggtgctgccatcctctggctgctctgctcccaccgcccggcccccggcaggccccccacccacaatgcacacaactggaggctcggccaggcgcccgccaactggtacaatgacacctaacccctgtctcccccacaaaggacaccggctgggattcggtatcgaatcgcagttatcgcagacctggacacagagtcaagggcccaagaggaaaacacctggttcagttacctgaaaaagggctacctgaccctgtcagacagtggggacaaggtggccgtggaatgggacaaagaccatggggtcctggagtcccacctggcggagaaggggagaggcatggagctatccgacctgattgttttcaatgggaaactctactccgtggatgaccggacgggggtcgtctaccagatcgaaggcagcaaagccgtgccctgggtgattctgtccgacggcgacggcaccgtggagaaaggcttcaaggccgaatggctggcagtgaaggacgagcgtctgtacgtgggcggcctgggcaaggagtggacgaccactacgggtgatgtggtgaacgagaacccggagtgggtgaaggtggtgggctacaagggcagcgtggaccacgagaactgggtgtccaactacaacgccctgcgggctgctgccggcatccagccgccaggctacctcatccatgagtctgcctgctggagtgacacgctgcagcgctggttcttcctgccgcgccgcgccagccaggagcgctacagcgagaaggacgacgagcgcaagggcgccaacctgctgctgagcgcctcccctgacttcggcgacatcgctgtgagccacgtcggggcggtggtccccactcacggcttctcgtccttcaagttcatccccaacaccgacgaccagatcattgtggccctcaaatccgaggaggacagcggcagagtcgcctcctacatcatggccttcacgctggacgggcgcttcctgttgccggagaccaagatcggaagcgtgaaatacgaaggcatcgagttcatttaactcaaaacggaaacactgagcaaggccatcaggactcagcttttataaaaacaagaggagtgcacttttgttttgttttgttctttttggaactgtgcctgggttggaggtctggacagggagcccagtcccgggccccatagtggtgcgggcactggacccccgggccccacggaggccgcggtctgaactgctttccatgctgccatctggtggtgatttcggtcacttcaggcattgactcaaggcctgcctaactggctgggtcgtttcttccatccgacctcgtttcttttctttcctatgttcttttgttcagtgaatatccctagagctcctaccatatgtcaggccctatgcctcaccctgagaacgcagtgagcatgaggtggacctgtttgctgggaaccccaggtcacccccttttcttcctactctgtgcctggagcatcatgtccacccctgcagatccttggaaaagaaaatgtttatgttgcagggtattgcatggtcacgagtgagggcaggcccctggggacacatctgcccacagctgcacaggccagggcgcaggcacatctgttggttctcaggcctcagataaaaccatctccgcatcatatggccagtgaccgctttctcccttcaagaaaattctgtggctgtgcagtactttgaagttttaattattaacctgctttaattaaagcagtttcctttcttataaagtggaatcaccaaatcttatcacacagagcacagtcctgtagttacccagcccgctccagcagtgcgggagattgtaaggaagcggtggcggctggtgaagcaagtctcacatgtcggcgttcttggccaatggatacaaagataaagaaaatgttgcctttttctaggaactgtcagaaatcctcatgcctttcaagacttctgtgaatgacttgaattttttattccctgcctagggtctgtgaacgaggcctgtctcttccctggggtttctttccatggcctttatttctcctcttccagtgggagttttgcaggctcttctctgtggaaacttcacgagcgttggctgggcctcggcttcgctggagtgtactccagggtgaaggcagagtgggatttgagacccaggttaggcacgacccaggctgagaagggacgtttccatcattcacagtgccctccccacagcactacctcaccccgacccccaccctcactcctaccccaccccgcgatcgtcaggggtgccacggtgggccggagggtgccggctctggctgtccctgtgccggtccctcacaaacctctccccctttgaaactcaagcacagctgcgaggagggcagcgaggagggacccctctctcatggttgtctctttcccccgctatgtcataggtagtggaggaagcgaaggaagtgaacgctgaatgtgacgcatttctgaagagctcagctgtcaccgggcatagcctggaagccccaagtctgttctgactttgcctggctgtctccttgacccgcctcctagatcattgtccttgatgtccaggctgggtcatttaaaatagagatgcaatcaggaaggttgggggacttgggactgtggctgaattgagaccttgctgatgtattcatgtcagcacctgagtcacagcccaggtgcccggaagcagcctcttcgcataggcagtgatttgcgattactttaaagctcaccttttttcttcccctctctgttcgctgctgtcagcataatgattgtgttccttccctatgggatccatctgttttgtaaacaataaagcgtctgagggagtgta

SEQ ID NO: 53123 - DNA, 3749 bp, Homo sapiens
ttccctccctagtagccttcacccccctcaatgcctcccaccccaaaagatctgctgggcccacgttccagcgcaacgcggtggaagacggccctcatgtgccagtgcggaccctcgcgcccctccagcctgcagccagccggccgctcctccagcgcgcaggcgcaggacggaaaaaaaaaacacaaaaaaacaacaaaaaaaaaacccaaaaaaacacaaaccacagctcccagcagccctcgcgccgtccgcgcgcagccgcagagcagaggctgccgggaacgcgggcccagaggcggggcgagcgcgcgcggggcggaagtcggccaccttcctccgtcccggccgttagcccagccaagcccagccaagcccagccaagccccgccgatcgcgggcaccggagccagccccgcagcgggagcctaacccagaggaagtggagactcctttactgcacatctgtctgctccaggccaggcactgttctaggagccaggatacagaggtggagacagaaacaaacaaaccgataactgtatacaatactctaacgtcagagggaccacagagcaccagcctgcatggaacttccttcctcactcagcttcccacgttgccagctgggacaggggagatggagtaattttgctgtggaaagacttcacgtcttgccgaatgaaagtcccgcctgtctgtcacgctgatgcccgtgcagctgtctgagcacccggaatggaatgagtctatgcactccctccggatcagtgtggggggccttcctgtgctggcgtccatgaccaaggccgcggacccccgcttccgcccccgctggaaggtgatcctgacgttctttgtgggtgctgccatcctctggctgctctgctcccaccgcccggcccccggcaggccccccacccacaatgcacacaactggaggctcggccaggcgcccgccaactggtacaatgacacctaacccctgtctcccccacaaaggacaccggctgggattcggtatcgaatcgcagttatcgcagacctggacacagagtcaagggcccaagaggaaaacacctggttcagttacctgaaaaagggctacctgaccctgtcagacagtggggacaaggtggccgtggaatgggacaaagaccatggggtcctggagtcccacctggcggagaaggggagaggcatggagctatccgacctgattgttttcaatgggaaactctactccgtggatgaccggacgggggtcgtctaccagatcgaaggcagcaaagccgtgccctgggtgattctgtccgacggcgacggcaccgtggagaaaggcttcaaggccgaatggctggcagtgaaggacgagcgtctgtacgtgggcggcctgggcaaggagtggacgaccactacgggtgatgtggtgaacgagaacccggagtgggtgaaggtggtgggctacaagggcagcgtggaccacgagaactgggtgtccaactacaacgccctgcgggctgctgccggcatccagccgccaggctacctcatccatgagtctgcctgctggagtgacacgctgcagcgctggttcttcctgccgcgccgcgccagccaggagcgctacagcgagaaggacgacgagcgcaagggcgccaacctgctgctgagcgcctcccctgacttcggcgacatcgctgtgagccacgtcggggcggtggtccccactcacggcttctcgtccttcaagttcatccccaacaccgacgaccagatcattgtggccctcaaatccgaggaggacagcggcagagtcgcctcctacatcatggccttcacgctggacgggcgcttcctgttgccggagaccaagatcggaagcgtgaaatacgaaggcatcgagttcatttaactcaaaacggaaacactgagcaaggccatcaggactcagcttttataaaaacaagaggagtgcacttttgttttgttttgttctttttggaactgtgcctgggttggaggtctggacagggagcccagtcccgggccccatagtggtgcgggcactggacccccgggccccacggaggccgcggtctgaactgctttccatgctgccatctggtggtgatttcggtcacttcaggcattgactcaaggcctgcctaactggctgggtcgtttcttccatccgacctcgtttcttttctttcctatgttcttttgttcagtgaatatccctagagctcctaccatatgtcaggccctatgcctcaccctgagaacgcagtgagcatgaggtggacctgtttgctgggaaccccaggtcacccccttttcttcctactctgtgcctggagcatcatgtccacccctgcagatccttggaaaagaaaatgtttatgttgcagggtattgcatggtcacgagtgagggcaggcccctggggacacatctgcccacagctgcacaggccagggcgcaggcacatctgttggttctcaggcctcagataaaaccatctccgcatcatatggccagtgaccgctttctcccttcaagaaaattctgtggctgtgcagtactttgaagttttaattattaacctgctttaattaaagcagtttcctttcttataaagtggaatcaccaaatcttatcacacagagcacagtcctgtagttacccagcccgctccagcagtgcgggagattgtaaggaagcggtggcggctggtgaagcaagtctcacatgtcggcgttcttggccaatggatacaaagataaagaaaatgttgcctttttctaggaactgtcagaaatcctcatgcctttcaagacttctgtgaatgacttgaattttttattccctgcctagggtctgtgaacgaggcctgtctcttccctggggtttctttccatggcctttatttctcctcttccagtgggagttttgcaggctcttctctgtggaaacttcacgagcgttggctgggcctcggcttcgctggagtgtactccagggtgaaggcagagtgggatttgagacccaggttaggcacgacccaggctgagaagggacgtttccatcattcacagtgccctccccacagcactacctcaccccgacccccaccctcactcctaccccaccccgcgatcgtcaggggtgccacggtgggccggagggtgccggctctggctgtccctgtgccggtccctcacaaacctctccccctttgaaactcaagcacagctgcgaggagggcagcgaggagggacccctctctcatggttgtctctttcccccgctatgtcataggtagtggaggaagcgaaggaagtgaacgctgaatgtgacgcatttctgaagagctcagctgtcaccgggcatagcctggaagccccaagtctgttctgactttgcctggctgtctccttgacccgcctcctagatcattgtccttgatgtccaggctgggtcatttaaaatagagatgcaatcaggaaggttgggggacttgggactgtggctgaattgagaccttgctgatgtattcatgtcagcacctgagtcacagcccaggtgcccggaagcagcctcttcgcataggcagtgatttgcgattactttaaagctcaccttttttcttcccctctctgttcgctgctgtcagcataatgattgtgttccttccctatgggatccatctgttttgtaaacaataaagcgtctgagggagtgta

SEQ ID NO: 53124 - DNA, 3486 bp, Homo sapiens
ttccctccctagtagccttcacccccctcaatgcctcccaccccaaaagatctgctgggcccacgttccagcgcaacgcggtggaagacggccctcatgtgccagtgcggaccctcgcgcccctccagcctgcagccagccggccgctcctccagcgcgcaggcgcaggacggaaaaaaaaaacacaaaaaaacaacaaaaaaaaaacccaaaaaaacacaaaccacagctcccagcagccctcgcgccgtccgcgcgcagccgcagagcagaggctgccgggaacgcgggcccagaggcggggcgagcgcgcgcggggcggaagtcggccaccttcctccgtcccggccgttagcccagccaagcccagccaagcccagccaagccccgccgatcgcgggcaccggagccagccccgcagcgggtcccgcctgtctgtcacgctgatgcccgtgcagctgtctgagcacccggaatggaatgagtctatgcactccctccggatcagtgtggggggccttcctgtgctggcgtccatgaccaaggccgcggacccccgcttccgcccccgctggaaggtgatcctgacgttctttgtgggtgctgccatcctctggctgctctgctcccaccgcccggcccccggcaggccccccacccacaatgcacacaactggaggctcggccaggcgcccgccaactggtacaatgacacctaacccctgtctcccccacaaaggacaccggctgggattcggtatcgaatcgcagttatcgcagacctggacacagagtcaagggcccaagaggaaaacacctggttcagttacctgaaaaagggctacctgaccctgtcagacagtggggacaaggtggccgtggaatgggacaaagaccatggggtcctggagtcccacctggcggagaaggggagaggcatggagctatccgacctgattgttttcaatgggaaactctactccgtggatgaccggacgggggtcgtctaccagatcgaaggcagcaaagccgtgccctgggtgattctgtccgacggcgacggcaccgtggagaaaggcttcaaggccgaatggctggcagtgaaggacgagcgtctgtacgtgggcggcctgggcaaggagtggacgaccactacgggtgatgtggtgaacgagaacccggagtgggtgaaggtggtgggctacaagggcagcgtggaccacgagaactgggtgtccaactacaacgccctgcgggctgctgccggcatccagccgccaggctacctcatccatgagtctgcctgctggagtgacacgctgcagcgctggttcttcctgccgcgccgcgccagccaggagcgctacagcgagaaggacgacgagcgcaagggcgccaacctgctgctgagcgcctcccctgacttcggcgacatcgctgtgagccacgtcggggcggtggtccccactcacggcttctcgtccttcaagttcatccccaacaccgacgaccagatcattgtggccctcaaatccgaggaggacagcggcagagtcgcctcctacatcatggccttcacgctggacgggcgcttcctgttgccggagaccaagatcggaagcgtgaaatacgaaggcatcgagttcatttaactcaaaacggaaacactgagcaaggccatcaggactcagcttttataaaaacaagaggagtgcacttttgttttgttttgttctttttggaactgtgcctgggttggaggtctggacagggagcccagtcccgggccccatagtggtgcgggcactggacccccgggccccacggaggccgcggtctgaactgctttccatgctgccatctggtggtgatttcggtcacttcaggcattgactcaaggcctgcctaactggctgggtcgtttcttccatccgacctcgtttcttttctttcctatgttcttttgttcagtgaatatccctagagctcctaccatatgtcaggccctatgcctcaccctgagaacgcagtgagcatgaggtggacctgtttgctgggaaccccaggtcacccccttttcttcctactctgtgcctggagcatcatgtccacccctgcagatccttggaaaagaaaatgtttatgttgcagggtattgcatggtcacgagtgagggcaggcccctggggacacatctgcccacagctgcacaggccagggcgcaggcacatctgttggttctcaggcctcagataaaaccatctccgcatcatatggccagtgaccgctttctcccttcaagaaaattctgtggctgtgcagtactttgaagttttaattattaacctgctttaattaaagcagtttcctttcttataaagtggaatcaccaaatcttatcacacagagcacagtcctgtagttacccagcccgctccagcagtgcgggagattgtaaggaagcggtggcggctggtgaagcaagtctcacatgtcggcgttcttggccaatggatacaaagataaagaaaatgttgcctttttctaggaactgtcagaaatcctcatgcctttcaagacttctgtgaatgacttgaattttttattccctgcctagggtctgtgaacgaggcctgtctcttccctggggtttctttccatggcctttatttctcctcttccagtgggagttttgcaggctcttctctgtggaaacttcacgagcgttggctgggcctcggcttcgctggagtgtactccagggtgaaggcagagtgggatttgagacccaggttaggcacgacccaggctgagaagggacgtttccatcattcacagtgccctccccacagcactacctcaccccgacccccaccctcactcctaccccaccccgcgatcgtcaggggtgccacggtgggccggagggtgccggctctggctgtccctgtgccggtccctcacaaacctctccccctttgaaactcaagcacagctgcgaggagggcagcgaggagggacccctctctcatggttgtctctttcccccgctatgtcataggtagtggaggaagcgaaggaagtgaacgctgaatgtgacgcatttctgaagagctcagctgtcaccgggcatagcctggaagccccaagtctgttctgactttgcctggctgtctccttgacccgcctcctagatcattgtccttgatgtccaggctgggtcatttaaaatagagatgcaatcaggaaggttgggggacttgggactgtggctgaattgagaccttgctgatgtattcatgtcagcacctgagtcacagcccaggtgcccggaagcagcctcttcgcataggcagtgatttgcgattactttaaagctcaccttttttcttcccctctctgttcgctgctgtcagcataatgattgtgttccttccctatgggatccatctgttttgtaaacaataaagcgtctgagggagtgta

SEQ ID NO: 53125 - DNA, 2641 bp, Homo sapiens
cagtgagtcatagtagagcccggttttaatcggccgaggtgggacaaagaccatggggtcctggagtcccacctggcggagaaggggagaggcatggagctatccgacctgattgttttcaatgggaaactctactccgtggatgaccggacgggggtcgtctaccagatcgaaggcagcaaagccgtgccctgggtgattctgtccgacggcgacggcaccgtggagaaaggcttcaaggccgaatggctggcagtgaaggacgagcgtctgtacgtgggcggcctgggcaaggagtggacgaccactacgggtgatgtggtgaacgagaacccggagtgggtgaaggtggtgggctacaagggcagcgtggaccacgagaactgggtgtccaactacaacgccctgcgggctgctgccggcatccagccgccaggctacctcatccatgagtctgcctgctggagtgacacgctgcagcgctggttcttcctgccgcgccgcgccagccaggagcgctacagcgagaaggacgacgagcgcaagggcgccaacctgctgctgagcgcctcccctgacttcggcgacatcgctgtgagccacgtcggggcggtggtccccactcacggcttctcgtccttcaagttcatccccaacaccgacgaccagatcattgtggccctcaaatccgaggaggacagcggcagagtcgcctcctacatcatggccttcacgctggacgggcgcttcctgttgccggagaccaagatcggaagcgtgaaatacgaaggcatcgagttcatttaactcaaaacggaaacactgagcaaggccatcaggactcagcttttataaaaacaagaggagtgcacttttgttttgttttgttctttttggaactgtgcctgggttggaggtctggacagggagcccagtcccgggccccatagtggtgcgggcactggacccccgggccccacggaggccgcggtctgaactgctttccatgctgccatctggtggtgatttcggtcacttcaggcattgactcaaggcctgcctaactggctgggtcgtttcttccatccgacctcgtttcttttctttcctatgttcttttgttcagtgaatatccctagagctcctaccatatgtcaggccctatgcctcaccctgagaacgcagtgagcatgaggtggacctgtttgctgggaaccccaggtcacccccttttcttcctactctgtgcctggagcatcatgtccacccctgcagatccttggaaaagaaaatgtttatgttgcagggtattgcatggtcacgagtgagggcaggcccctggggacacatctgcccacagctgcacaggccagggcgcaggcacatctgttggttctcaggcctcagataaaaccatctccgcatcatatggccagtgaccgctttctcccttcaagaaaattctgtggctgtgcagtactttgaagttttaattattaacctgctttaattaaagcagtttcctttcttataaagtggaatcaccaaatcttatcacacagagcacagtcctgtagttacccagcccgctccagcagtgcgggagattgtaaggaagcggtggcggctggtgaagcaagtctcacatgtcggcgttcttggccaatggatacaaagataaagaaaatgttgcctttttctaggaactgtcagaaatcctcatgcctttcaagacttctgtgaatgacttgaattttttattccctgcctagggtctgtgaacgaggcctgtctcttccctggggtttctttccatggcctttatttctcctcttccagtgggagttttgcaggctcttctctgtggaaacttcacgagcgttggctgggcctcggcttcgctggagtgtactccagggtgaaggcagagtgggatttgagacccaggttaggcacgacccaggctgagaagggacgtttccatcattcacagtgccctccccacagcactacctcaccccgacccccaccctcactcctaccccaccccgcgatcgtcaggggtgccacggtgggccggagggtgccggctctggctgtccctgtgccggtccctcacaaacctctccccctttgaaactcaagcacagctgcgaggagggcagcgaggagggacccctctctcatggttgtctctttcccccgctatgtcataggtagtggaggaagcgaaggaagtgaacgctgaatgtgacgcatttctgaagagctcagctgtcaccgggcatagcctggaagccccaagtctgttctgactttgcctggctgtctccttgacccgcctcctagatcattgtccttgatgtccaggctgggtcatttaaaatagagatgcaatcaggaaggttgggggacttgggactgtggctgaattgagaccttgctgatgtattcatgtcagcacctgagtcacagcccaggtgcccggaagcagcctcttcgcataggcagtgatttgcgattactttaaagctcaccttttttcttcccctctctgttcgctgctgtcagcataatgattgtgttccttccctatgggatccatctgttttgtaaacaataaagcgtctgagggagtgta

SEQ ID NO: 53126 - DNA, 1914 bp, Homo sapiens
  misc_feature (37)..(37): n is a, c, g, or t
acgcgggaggacgaaccacggctaggtacgaggctgnggtgatcggaagcgtgaaatacgaaggcatcgagttcatttaactcaaaacggaaacactgagcaaggccatcaggactcagcttttataaaaacaagaggagtgcacttttgttttgttttgttctttttggaactgtgcctgggttggaggtctggacagggagcccagtcccgggccccatagtggtgcgggcactggacccccgggccccacggaggccgcggtctgaactgctttccatgctgccatctggtggtgatttcggtcacttcaggcattgactcaaggcctgcctaactggctgggtcgtttcttccatccgacctcgtttcttttctttcctatgttcttttgttcagtgaatatccctagagctcctaccatatgtcaggccctatgcctcaccctgagaacgcagtgagcatgaggtggacctgtttgctgggaaccccaggtcacccccttttcttcctactctgtgcctggagcatcatgtccacccctgcagatccttggaaaagaaaatgtttatgttgcagggtattgcatggtcacgagtgagggcaggcccctggggacacatctgcccacagctgcacaggccagggcgcaggcacatctgttggttctcaggcctcagataaaaccatctccgcatcatatggccagtgaccgctttctcccttcaagaaaattctgtggctgtgcagtactttgaagttttaattattaacctgctttaattaaagcagtttcctttcttataaagtggaatcaccaaatcttatcacacagagcacagtcctgtagttacccagcccgctccagcagtgcgggagattgtaaggaagcggtggcggctggtgaagcaagtctcacatgtcggcgttcttggccaatggatacaaagataaagaaaatgttgcctttttctaggaactgtcagaaatcctcatgcctttcaagacttctgtgaatgacttgaattttttattccctgcctagggtctgtgaacgaggcctgtctcttccctggggtttctttccatggcctttatttctcctcttccagtgggagttttgcaggctcttctctgtggaaacttcacgagcgttggctgggcctcggcttcgctggagtgtactccagggtgaaggcagagtgggatttgagacccaggttaggcacgacccaggctgagaagggacgtttccatcattcacagtgccctccccacagcactacctcaccccgacccccaccctcactcctaccccaccccgcgatcgtcaggggtgccacggtgggccggagggtgccggctctggctgtccctgtgccggtccctcacaaacctctccccctttgaaactcaagcacagctgcgaggagggcagcgaggagggacccctctctcatggttgtctctttcccccgctatgtcataggtagtggaggaagcgaaggaagtgaacgctgaatgtgacgcatttctgaagagctcagctgtcaccgggcatagcctggaagccccaagtctgttctgactttgcctggctgtctccttgacccgcctcctagatcattgtccttgatgtccaggctgggtcatttaaaatagagatgcaatcaggaaggttgggggacttgggactgtggctgaattgagaccttgctgatgtattcatgtcagcacctgagtcacagcccaggtgcccggaagcagcctcttcgcataggcagtgatttgcgattactttaaagctcaccttttttcttcccctctctgttcgctgctgtcagcataatgattgtgttccttccctatgggatccatctgttttgtaaacaataaagcgtctgagggagtgta

SEQ ID NO: 53127 - DNA, 1999 bp, Homo sapiens
tacccctcggttaatcggcacgaggagatcattgtggccctcaaatccgaggaggacagcggcagagtcgcctcctacatcatggccttcacgctggacgggcgcttcctgttgccggagaccaagatcggaagcgtgaaatacgaaggcatcgagttcatttaactcaaaacggaaacactgagcaaggccatcaggactcagcttttataaaaacaagaggagtgcacttttgttttgttttgttctttttggaactgtgcctgggttggaggtctggacagggagcccagtcccgggccccatagtggtgcgggcactggacccccgggccccacggaggccgcggtctgaactgctttccatgctgccatctggtggtgatttcggtcacttcaggcattgactcaaggcctgcctaactggctgggtcgtttcttccatccgacctcgtttcttttctttcctatgttcttttgttcagtgaatatccctagagctcctaccatatgtcaggccctatgcctcaccctgagaacgcagtgagcatgaggtggacctgtttgctgggaaccccaggtcacccccttttcttcctactctgtgcctggagcatcatgtccacccctgcagatccttggaaaagaaaatgtttatgttgcagggtattgcatggtcacgagtgagggcaggcccctggggacacatctgcccacagctgcacaggccagggcgcaggcacatctgttggttctcaggcctcagataaaaccatctccgcatcatatggccagtgaccgctttctcccttcaagaaaattctgtggctgtgcagtactttgaagttttaattattaacctgctttaattaaagcagtttcctttcttataaagtggaatcaccaaatcttatcacacagagcacagtcctgtagttacccagcccgctccagcagtgcgggagattgtaaggaagcggtggcggctggtgaagcaagtctcacatgtcggcgttcttggccaatggatacaaagataaagaaaatgttgcctttttctaggaactgtcagaaatcctcatgcctttcaagacttctgtgaatgacttgaattttttattccctgcctagggtctgtgaacgaggcctgtctcttccctggggtttctttccatggcctttatttctcctcttccagtgggagttttgcaggctcttctctgtggaaacttcacgagcgttggctgggcctcggcttcgctggagtgtactccagggtgaaggcagagtgggatttgagacccaggttaggcacgacccaggctgagaagggacgtttccatcattcacagtgccctccccacagcactacctcaccccgacccccaccctcactcctaccccaccccgcgatcgtcaggggtgccacggtgggccggagggtgccggctctggctgtccctgtgccggtccctcacaaacctctccccctttgaaactcaagcacagctgcgaggagggcagcgaggagggacccctctctcatggttgtctctttcccccgctatgtcataggtagtggaggaagcgaaggaagtgaacgctgaatgtgacgcatttctgaagagctcagctgtcaccgggcatagcctggaagccccaagtctgttctgactttgcctggctgtctccttgacccgcctcctagatcattgtccttgatgtccaggctgggtcatttaaaatagagatgcaatcaggaaggttgggggacttgggactgtggctgaattgagaccttgctgatgtattcatgtcagcacctgagtcacagcccaggtgcccggaagcagcctcttcgcataggcagtgatttgcgattactttaaagctcaccttttttcttcccctctctgttcgctgctgtcagcataatgattgtgttccttccctatgggatccatctgttttgtaaacaataaagcgtctgagggagtgta

SEQ ID NO: 53128 - DNA, 1880 bp, Homo sapiens
  misc_feature (18)..(18): n is a, c, g, or t
ccaggctggtacggcccngggatgtatggatatcgagttcatttaactcaaaacggaaacactgagcaaggccatcaggactcagcttttataaaaacaagaggagtgcacttttgttttgttttgttctttttggaactgtgcctgggttggaggtctggacagggagcccagtcccgggccccatagtggtgcgggcactggacccccgggccccacggaggccgcggtctgaactgctttccatgctgccatctggtggtgatttcggtcacttcaggcattgactcaaggcctgcctaactggctgggtcgtttcttccatccgacctcgtttcttttctttcctatgttcttttgttcagtgaatatccctagagctcctaccatatgtcaggccctatgcctcaccctgagaacgcagtgagcatgaggtggacctgtttgctgggaaccccaggtcacccccttttcttcctactctgtgcctggagcatcatgtccacccctgcagatccttggaaaagaaaatgtttatgttgcagggtattgcatggtcacgagtgagggcaggcccctggggacacatctgcccacagctgcacaggccagggcgcaggcacatctgttggttctcaggcctcagataaaaccatctccgcatcatatggccagtgaccgctttctcccttcaagaaaattctgtggctgtgcagtactttgaagttttaattattaacctgctttaattaaagcagtttcctttcttataaagtggaatcaccaaatcttatcacacagagcacagtcctgtagttacccagcccgctccagcagtgcgggagattgtaaggaagcggtggcggctggtgaagcaagtctcacatgtcggcgttcttggccaatggatacaaagataaagaaaatgttgcctttttctaggaactgtcagaaatcctcatgcctttcaagacttctgtgaatgacttgaattttttattccctgcctagggtctgtgaacgaggcctgtctcttccctggggtttctttccatggcctttatttctcctcttccagtgggagttttgcaggctcttctctgtggaaacttcacgagcgttggctgggcctcggcttcgctggagtgtactccagggtgaaggcagagtgggatttgagacccaggttaggcacgacccaggctgagaagggacgtttccatcattcacagtgccctccccacagcactacctcaccccgacccccaccctcactcctaccccaccccgcgatcgtcaggggtgccacggtgggccggagggtgccggctctggctgtccctgtgccggtccctcacaaacctctccccctttgaaactcaagcacagctgcgaggagggcagcgaggagggacccctctctcatggttgtctctttcccccgctatgtcataggtagtggaggaagcgaaggaagtgaacgctgaatgtgacgcatttctgaagagctcagctgtcaccgggcatagcctggaagccccaagtctgttctgactttgcctggctgtctccttgacccgcctcctagatcattgtccttgatgtccaggctgggtcatttaaaatagagatgcaatcaggaaggttgggggacttgggactgtggctgaattgagaccttgctgatgtattcatgtcagcacctgagtcacagcccaggtgcccggaagcagcctcttcgcataggcagtgatttgcgattactttaaagctcaccttttttcttcccctctctgttcgctgctgtcagcataatgattgtgttccttccctatgggatccatctgttttgtaaacaataaagcgtctgagggagtgta

SEQ ID NO: 53129 - DNA, 1704 bp, Homo sapiens
tacgaggcgggtgttaattcggcagaggggccccgggccccacggaggccgcggtctgaactgctttccatgctgccatctggtggtgatttcggtcacttcaggcattgactcaaggcctgcctaactggctgggtcgtttcttccatccgacctcgtttcttttctttcctatgttcttttgttcagtgaatatccctagagctcctaccatatgtcaggccctatgcctcaccctgagaacgcagtgagcatgaggtggacctgtttgctgggaaccccaggtcacccccttttcttcctactctgtgcctggagcatcatgtccacccctgcagatccttggaaaagaaaatgtttatgttgcagggtattgcatggtcacgagtgagggcaggcccctggggacacatctgcccacagctgcacaggccagggcgcaggcacatctgttggttctcaggcctcagataaaaccatctccgcatcatatggccagtgaccgctttctcccttcaagaaaattctgtggctgtgcagtactttgaagttttaattattaacctgctttaattaaagcagtttcctttcttataaagtggaatcaccaaatcttatcacacagagcacagtcctgtagttacccagcccgctccagcagtgcgggagattgtaaggaagcggtggcggctggtgaagcaagtctcacatgtcggcgttcttggccaatggatacaaagataaagaaaatgttgcctttttctaggaactgtcagaaatcctcatgcctttcaagacttctgtgaatgacttgaattttttattccctgcctagggtctgtgaacgaggcctgtctcttccctggggtttctttccatggcctttatttctcctcttccagtgggagttttgcaggctcttctctgtggaaacttcacgagcgttggctgggcctcggcttcgctggagtgtactccagggtgaaggcagagtgggatttgagacccaggttaggcacgacccaggctgagaagggacgtttccatcattcacagtgccctccccacagcactacctcaccccgacccccaccctcactcctaccccaccccgcgatcgtcaggggtgccacggtgggccggagggtgccggctctggctgtccctgtgccggtccctcacaaacctctccccctttgaaactcaagcacagctgcgaggagggcagcgaggagggacccctctctcatggttgtctctttcccccgctatgtcataggtagtggaggaagcgaaggaagtgaacgctgaatgtgacgcatttctgaagagctcagctgtcaccgggcatagcctggaagccccaagtctgttctgactttgcctggctgtctccttgacccgcctcctagatcattgtccttgatgtccaggctgggtcatttaaaatagagatgcaatcaggaaggttgggggacttgggactgtggctgaattgagaccttgctgatgtattcatgtcagcacctgagtcacagcccaggtgcccggaagcagcctcttcgcataggcagtgatttgcgattactttaaagctcaccttttttcttcccctctctgttcgctgctgtcagcataatgattgtgttccttccctatgggatccatctgttttgtaaacaataaagcgtctgagggagtgta

SEQ ID NO: 53130 - DNA, 4347 bp, Homo sapiens
ttccctccctagtagccttcacccccctcaatgcctcccaccccaaaagatctgctgggcccacgttccagcgcaacgcggtggaagacggccctcatgtgccagtgcggaccctcgcgcccctccagcctgcagccagccggccgctcctccagcgcgcaggcgcaggacggaaaaaaaaaacacaaaaaaacaacaaaaaaaaaacccaaaaaaacacaaaccacagctcccagcagccctcgcgccgtccgcgcgcagccgcagagcagaggctgccgggaacgcgggcccagaggcggggcgagcgcgcgcggggcggaagtcggccaccttcctccgtcccggccgttagcccagccaagcccagccaagcccagccaagccccgccgatcgcgggcaccggagccagccccgcagcggagggaccacagagcaccagcctgcatggaacttccttcctcactcagcttcccacgttgccagctgggacaggggagatggagtaattttgctgtggaaagacttcacgtcttgccgaatgaaagtaagcaaagatactgctagagtcgggaatctagagtcgggaattcattaagccaagggagtaagaatggccacagagtagtgaaatactgtttcttctggaaaagtcagcctccagcgcctgcagcttccggaactaagatgtgactgggcttgcggaggcgctgactcctctcctccctccctggctgtgcaggtcccgcctgtctgtcacgctgatgcccgtgcagctgtctgagcacccggaatggaatgagtctatgcactccctccggatcagtgtggggggccttcctgtgctggcgtccatgaccaaggccgcggacccccgcttccgcccccgctggaaggtgatcctgacgttctttgtgggtgctgccatcctctggctgctctgctcccaccgcccggcccccggcaggccccccacccacaatgcacacaactggaggctcggccaggcgcccgccaactggtacaatgacacctaacccctgtctcccccacaaaggacaccggctgggattcggtatcgaatcgcagttatcgcagacctggacacagagtcaagggcccaagaggaaaacacctggttcagttacctgaaaaagggctacctgaccctgtcagacagtggggacaaggtggccgtggaatgggacaaagaccatggggtcctggagtcccacctggcggagaaggggagaggcatggagctatccgacctgattgttttcaatgggaaactctactccgtggatgaccggacgggggtcgtctaccagatcgaaggcagcaaagccgtgccctgggtgattctgtccgacggcgacggcaccgtggagaaaggcttcaaggccgaatggctggcagtgaaggacgagcgtctgtacgtgggcggcctgggcaaggagtggacgaccactacgggtgatgtggtgaacgagaacccggagtgggtgaaggtggtgggctacaagggcagcgtggaccacgagaactgggtgtccaactacaacgccctgcgggctgctgccggcatccagccgccaggctacctcatccatgagtctgcctgctggagtgacacgctgcagcgctggttcttcctgccgcgccgcgccagccaggagcgctacagcgagaaggacgacgagcgcaagggcgccaacctgctgctgagcgcctcccctgacttcggcgacatcgctgtgagccacgtcggggcggtggtccccactcacggcttctcgtccttcaagttcatccccaacaccgacgaccagatcattgtggccctcaaatccgaggaggacagcggcagagtcgcctcctacatcatggccttcacgctggacgggcgcttcctgttgccggagaccaagatcggaagcgtgaaatacgaaggcatcgagttcatttaactcaaaacggaaacactgagcaaggccatcaggactcagcttttataaaaacaagaggagtgcacttttgttttgttttgttctttttggaactgtgcctgggttggaggtctggacagggagcccagtcccgggccccatagtggtgcgggcactggacccccgggccccacggaggccgcggtctgaactgctttccatgctgccatctggtggtgatttcggtcacttcaggcattgactcaaggcctgcctaactggctgggtcgtttcttccatccgacctcgtttcttttctttcctatgttcttttgttcagtgaatatccctagagctcctaccatatgtcaggccctatgcctcaccctgagaacgcagtgagcatgaggtggacctgtttgctgggaaccccaggtcacccccttttcttcctactctgtgcctggagcatcatgtccacccctgcagatccttggaaaagaaaatgtttatgttgcagggtattgcatggtcacgagtgagggcaggcccctggggacacatctgcccacagctgcacaggccagggcgcaggcacatctgttggttctcaggcctcagataaaaccatctccgcatcatatggccagtgaccgctttctcccttcaagaaaattctgtggctgtgcagtactttgaagttttaattattaacctgctttaattaaagcagtttcctttcttataaagtggaatcaccaaatcttatcacacagagcacagtcctgtagttacccagcccgctccagcagtgcgggagattgtaaggaagcggtggcggctggtgaagcaagtctcacatgtcggcgttcttggccaatggatacaaagataaagaaaatgttgcctttttctaggaactgtcagaaatcctcatgcctttcaagacttctgtgaatgacttgaattttttattccctgcctagggtctgtgaacgaggcctgtctcttccctggggtttctttccatggcctttatttctcctcttccagtgggagttttgcaggctcttctctgtggaaacttcacgagcgttggctgggcctcggcttcgctggagtgtactccagggtgaaggcagagtgggatttgagacccaggttaggcacgacccaggctgagaagggacgtttccatcattcacagtgccctccccacagcactacctcaccccgacccccaccctcactcctaccccaccccgcgatcgtcaggggtgccacggtgggccggagggtgccggctctggctgtccctgtgccggtccctcacaaacctctccccctttgaaactcaagcacagctgcgaggagggcagcgaggagggacccctctctcatggttgtctctttcccccgctatgtcataggtagtggaggaagcgaaggaagtgaacgctgaatgtgacgcatttctgaagagctcagctgtcaccgggcatagcctggaagccccaagtctgttctgactttgcctggctgtctccttgacccgcctcctagatcattgtccttgatgtccaggctgggtcatttaaaatagagatgcaatcaggaaggttgggggacttgggactgtggctgaattgagaccttgctgatgtattcatgtcagcacctgagtcacagcccaggtgcccggaagcagcctcttcgcataggcagtgatttgcgattactttaaagctcaccttttttcttcccctctctgttcgctgctgtcagcataatgattgtgttccttccctatgggatccatctgttttgtaaacaataaagcgtctgagggagtgtatagttttctgtctcccggtctgtgctgactgtttgcggaggcctggccacgagagcgcctgcgcaggatgctgggcatgcgcacgggagtcgcccgccagggcattccatctggaaactgcgtcctccagtccgccttgtcccactatctcaaggcgctccaagagcacgagcgctgtggtcagaaaggtggggtctgaagccactgcgagcccgatcctggctctgtccccatccagctgcatgtccttaggcaaatgacctaactttcctgtgcttcagtgtcctcgtctgcaaaaggatgctcatcgcagagctcatcccggggctgcagtgaacggtaagtgactgggtacgcgcaaggggcttagaacatcacctgacgtgtgctgggcacccacgtgcccgttttgttgctgctcatccctggggagccatctggatgacttggtaaggaggcgctcaggtgagaggtcagggctgagctggtgtctttagtgtgtcagtgagtccacaggaacagacgaggtcgctccaagtgac

SEQ ID NO: 53131 - DNA, 3536 bp, Homo sapiens
ttccctccctagtagccttcacccccctcaatgcctcccaccccaaaagatctgctgggcccacgttccagcgcaacgcggtggaagacggccctcatgtgccagtgcggaccctcgcgcccctccagcctgcagccagccggccgctcctccagcgcgcaggcgcaggacggaaaaaaaaaacacaaaaaaacaacaaaaaaaaaacccaaaaaaacacaaaccacagctcccagcagccctcgcgccgtccgcgcgcagccgcagagcagaggctgccgggaacgcgggcccagaggcggggcgagcgcgcgcggggcggaagtcggccaccttcctccgtcccggccgttagcccagccaagcccagccaagcccagccaagccccgccgatcgcgggcaccggagccagccccgcagcggagggaccacagagcaccagcctgcatggaacttccttcctcactcagcttcccacgttgccagctgggacaggggagatggagtaattttgctgtggaaagacttcacgtcttgccgaatgaaagtaagcaaagatactgctagagtcgggaatctagagtcgggaattcattaagccaagggagtaagaatggccacagagtagtgaaatactgtttcttctggaaaagtcagcctccagcgcctgcagcttccggaactaagatgtgactgggcttgcggaggcgctgactcctctcctccctccctggctgtgcaggtcccgcctgtctgtcacgctgatgcccgtgcagctgtctgagcacccggaatggaatgagtctatgcactccctccggatcagtgtggggggccttcctgtgctggcgtccatgaccaaggccgcggacccccgcttccgcccccgctggaaggtgatcctgacgttctttgtgggtgctgccatcctctggctgctctgctcccaccgcccggcccccggcaggccccccacccacaatgcacacaactggaggctcggccaggcgcccgccaactggtacaatgacacctaacccctgtctcccccacaaaggacaccggctgggattcggtatcgaatcgcagttatcgcagacctggacacagagtcaagggcccaagaggaaaacacctggttcagttacctgaaaaagggctacctgaccctgtcagacagtggggacaaggtggccgtggaatgggacaaagaccatggggtcctggagtcccacctggcggagaaggggagaggcatggagctatccgacctgattgttttcaatgggaaactctactccgtggatgaccggacgggggtcgtctaccagatcgaaggcagcaaagccgtgccctgggtgattctgtccgacggcgacggcaccgtggagaaaggcttcaaggccgaatggctggcagtgaaggacgagcgtctgtacgtgggcggcctgggcaaggagtggacgaccactacgggtgatgtggtgaacgagaacccggagtgggtgaaggtggtgggctacaagggcagcgtggaccacgagaactgggtgtccaactacaacgccctgcgggctgctgccggcatccagccgccaggctacctcatccatgagtctgcctgctggagtgacacgctgcagcgctggttcttcctgccgcgccgcgccagccaggagcgctacagcgagaaggacgacgagcgcaagggcgccaacctgctgctgagcgcctcccctgacttcggcgacatcgctgtgagccacgtcggggcggtggtccccactcacggcttctcgtccttcaagttcatccccaacaccgacgaccagatcattgtggccctcaaatccgaggaggacagcggcagagtcgcctcctacatcatggccttcacgctggacgggcgcttcctgttgccggagaccaagatcggaagcgtgaaatacgaaggcatcgagttcatttaactcaaaacggaaacactgagcaaggccatcaggactcagcttttataaaaacaagaggagtgcacttttgttttgttttgttctttttggaactgtgcctgggttggaggtctggacagggagcccagtcccgggccccatagtggtgcgggcactggacccccgggccccacggaggccgcggtctgaactgctttccatgctgccatctggtggtgatttcggtcacttcaggcattgactcaaggcctgcctaactggctgggtcgtttcttccatccgacctcgtttcttttctttcctatgttcttttgttcagtgaatatccctagagctcctaccatatgtcaggccctatgcctcaccctgagaacgcagtgagcatgaggtggacctgtttgctgggaaccccaggtcacccccttttcttcctactctgtgcctggagcatcatgtccacccctgcagatccttggaaaagaaaatgtttatgttgcagggtattgcatggtcacgagtgagggcaggcccctggggacacatctgcccacagctgcacaggccagggcgcaggcacatctgttggttctcaggcctcagataaaaccatctccgcatcatatggccagtgaccgctttctcccttcaagaaaattctgtggctgtgcagtactttgaagttttaattattaacctgctttaattaaagcagtttcctttcttataaagtggaatcaccaaatcttatcacacagagcacagtcctgtagttacccagcccgctccagcagtgcgggagattgtaaggaagcggtggcggctggtgaagcaagtctcacatgtcggcgttcttggccaatggatacaaagataaagaaaatgttgcctttttctaggaactgtcagaaatcctcatgcctttcaagacttctgtgaatgacttgaattttttattccctgcctagggtctgtgaacgaggcctgtctcttccctggggtttctttccatggcctttatttctcctcttccagtgggagttttgcaggctcttctctgtggaaacttcacgagcgttggctgggcctcggcttcgctggagtgtactccagggtgaaggcagagtgggatttgagacccaggtagtggaggaagcgaaggaagtgaacgctgaatgtgacgcatttctgaagagctcagctgtcaccgggcatagcctggaagccccaagtctgttctgactttgcctggctgtctccttgacccgcctcctagatcattgtccttgatgtccaggctgggtcatttaaaatagagatgcaatcaggaaggttgggggacttgggactgtggctgaattgagaccttgctgatgtattcatgtcagcacctgagtcacagcccaggtgcccggaagcagcctcttcgcataggcagtgatttgcgattactttaaagctcaccttttttcttcccctctctgttcgctgctgtcagcataatgattgtgttccttccctatgggatccatctgttttgtaaacaataaagcgtctgagggagtgta

SEQ ID NO: 53132 - DNA, 1267 bp, Homo sapiens
tgatgcggagatggttttatctgaggcctgagaaccaacagatgtgcctgcgccctggcctgtgaccgctttctcccttcaagaaaattctgtggctgtgcagtactttgaagttttaattattaacctgctttaattaaagcagtttcctttcttataaagtggaatcaccaaatcttatcacacagagcacagtcctgtagttacccagcccgctccagcagtgcgggagattgtaaggaagcggtggcggctggtgaagcaagtctcacatgtcggcgttcttggccaatggatacaaagataaagaaaatgttgcctttttctaggaactgtcagaaatcctcatgcctttcaagacttctgtgaatgacttgaattttttattccctgcctagggtctgtgaacgaggcctgtctcttccctggggtttctttccatggcctttatttctcctcttccagtgggagttttgcaggctcttctctgtggaaacttcacgagcgttggctgggcctcggcttcgctggagtgtactccagggtgaaggcagagtgggatttgagacccaggttaggcacgacccaggctgagaagggacgtttccatcattcacagtgccctccccacagcactacctcaccccgacccccaccctcactcctaccccaccccgcgatcgtcaggggtgccacggtgggccggagggtgccggctctggctgtccctgtgccggtccctcacaaacctctccccctttgaaactcaagcacagctgcgaggagggcagcgaggagggacccctctctcatggttgtctctttcccccgctatgtcataggtagtggaggaagcgaaggaagtgaacgctgaatgtgacgcatttctgaagagctcagctgtcaccgggcatagcctggaagccccaagtctgttctgactttgcctggctgtctccttgacccgcctcctagatcattgtccttgatgtccaggctgggtcatttaaaatagagatgcaatcaggaaggttgggggacttgggactgtggctgaattgagaccttgctgatgtattcatgtcagcacctgagtcacagcccaggtgcccggaagcagcctcttcgcataggcagtgatttgcgattactttaaagctcaccttttttcttcccctctctgttcgctgctgtcagcataatgattgtgttccttccctatgggatccatctgttttgtaaacaataaagcgtctgagggagtgta

SEQ ID NO: 53133 - DNA, 384 bp, Homo sapiens
atacgaaaaagaaggagtgtttttatttggtttggatgtgtttggtattccaatgctgcaggagcctaacccagaggaagtggagactcctttactgcacatctgtctgctccaggccaggcactgttctaggagccaggatacagaggtggagacagaaacaaacaaaccgataactgtatacaatactctaacgtcaggtggggacaagggccaaggacccagggacggagggtgatgtctgcagcagggcagtcagggagggcttcctggatgaggtggcatttgagtaaaatacagacctgtaccctgtctatgatcctatcccacttcaccccgtcagccttcccctcccacctgactctcctgcgcttctctctttag

SEQ ID NO: 53134 - DNA, 447 bp, Homo sapiens
ttccctccctagtagccttcacccccctcaatgcctcccaccccaaaagatctgctgggcccacgttccagcgcaacgcggtggaagacggccctcatgtgccagtgcggaccctcgcgcccctccagcctgcagccagccggccgctcctccagcgcgcaggcgcaggacggaaaaaaaaaacacaaaaaaacaacaaaaaaaaaacccaaaaaaacacaaaccacagctcccagcagccctcgcgccgtccgcgcgcagccgcagagcagaggctgccgggaacgcgggcccagaggcggggcgagcgcgcgcggggcggaagtcggccaccttcctccgtcccggccgttagcccagccaagcccagccaagcccagccaagccccgccgatcgcgggcaccggagccagccccgcagcgggtgagtgactgcgcccgcggccg

SEQ ID NO: 53135 - DNA, 3920 bp, Homo sapiens
ttccctccctagtagccttcacccccctcaatgcctcccaccccaaaagatctgctgggcccacgttccagcgcaacgcggtggaagacggccctcatgtgccagtgcggaccctcgcgcccctccagcctgcagccagccggccgctcctccagcgcgcaggcgcaggacggaaaaaaaaaacacaaaaaaacaacaaaaaaaaaacccaaaaaaacacaaaccacagctcccagcagccctcgcgccgtccgcgcgcagccgcagagcagaggctgccgggaacgcgggcccagaggcggggcgagcgcgcgcggggcggaagtcggccaccttcctccgtcccggccgttagcccagccaagcccagccaagcccagccaagccccgccgatcgcgggcaccggagccagccccgcagcggaaaagcacatctcccaggatcctgagagagcttgaaccagaccactgtggacacggtggccacccgtcaccactacccttcccaaggggagacgaggagcaagtaggcttgagggaaaagctgcacaggactcgtgtcttgaaatgtctaagacgcatgtcagaaatgcaggagcctaacccagaggaagtggagactcctttactgcacatctgtctgctccaggccaggcactgttctaggagccaggatacagaggtggagacagaaacaaacaaaccgataactgtatacaatactctaacgtcagagggaccacagagcaccagcctgcatggaacttccttcctcactcagcttcccacgttgccagctgggacaggggagatggagtaattttgctgtggaaagacttcacgtcttgccgaatgaaagtcccgcctgtctgtcacgctgatgcccgtgcagctgtctgagcacccggaatggaatgagtctatgcactccctccggatcagtgtggggggccttcctgtgctggcgtccatgaccaaggccgcggacccccgcttccgcccccgctggaaggtgatcctgacgttctttgtgggtgctgccatcctctggctgctctgctcccaccgcccggcccccggcaggccccccacccacaatgcacacaactggaggctcggccaggcgcccgccaactggtacaatgacacctaacccctgtctcccccacaaaggacaccggctgggattcggtatcgaatcgcagttatcgcagacctggacacagagtcaagggcccaagaggaaaacacctggttcagttacctgaaaaagggctacctgaccctgtcagacagtggggacaaggtggccgtggaatgggacaaagaccatggggtcctggagtcccacctggcggagaaggggagaggcatggagctatccgacctgattgttttcaatgggaaactctactccgtggatgaccggacgggggtcgtctaccagatcgaaggcagcaaagccgtgccctgggtgattctgtccgacggcgacggcaccgtggagaaaggcttcaaggccgaatggctggcagtgaaggacgagcgtctgtacgtgggcggcctgggcaaggagtggacgaccactacgggtgatgtggtgaacgagaacccggagtgggtgaaggtggtgggctacaagggcagcgtggaccacgagaactgggtgtccaactacaacgccctgcgggctgctgccggcatccagccgccaggctacctcatccatgagtctgcctgctggagtgacacgctgcagcgctggttcttcctgccgcgccgcgccagccaggagcgctacagcgagaaggacgacgagcgcaagggcgccaacctgctgctgagcgcctcccctgacttcggcgacatcgctgtgagccacgtcggggcggtggtccccactcacggcttctcgtccttcaagttcatccccaacaccgacgaccagatcattgtggccctcaaatccgaggaggacagcggcagagtcgcctcctacatcatggccttcacgctggacgggcgcttcctgttgccggagaccaagatcggaagcgtgaaatacgaaggcatcgagttcatttaactcaaaacggaaacactgagcaaggccatcaggactcagcttttataaaaacaagaggagtgcacttttgttttgttttgttctttttggaactgtgcctgggttggaggtctggacagggagcccagtcccgggccccatagtggtgcgggcactggacccccgggccccacggaggccgcggtctgaactgctttccatgctgccatctggtggtgatttcggtcacttcaggcattgactcaaggcctgcctaactggctgggtcgtttcttccatccgacctcgtttcttttctttcctatgttcttttgttcagtgaatatccctagagctcctaccatatgtcaggccctatgcctcaccctgagaacgcagtgagcatgaggtggacctgtttgctgggaaccccaggtcacccccttttcttcctactctgtgcctggagcatcatgtccacccctgcagatccttggaaaagaaaatgtttatgttgcagggtattgcatggtcacgagtgagggcaggcccctggggacacatctgcccacagctgcacaggccagggcgcaggcacatctgttggttctcaggcctcagataaaaccatctccgcatcatatggccagtgaccgctttctcccttcaagaaaattctgtggctgtgcagtactttgaagttttaattattaacctgctttaattaaagcagtttcctttcttataaagtggaatcaccaaatcttatcacacagagcacagtcctgtagttacccagcccgctccagcagtgcgggagattgtaaggaagcggtggcggctggtgaagcaagtctcacatgtcggcgttcttggccaatggatacaaagataaagaaaatgttgcctttttctaggaactgtcagaaatcctcatgcctttcaagacttctgtgaatgacttgaattttttattccctgcctagggtctgtgaacgaggcctgtctcttccctggggtttctttccatggcctttatttctcctcttccagtgggagttttgcaggctcttctctgtggaaacttcacgagcgttggctgggcctcggcttcgctggagtgtactccagggtgaaggcagagtgggatttgagacccaggttaggcacgacccaggctgagaagggacgtttccatcattcacagtgccctccccacagcactacctcaccccgacccccaccctcactcctaccccaccccgcgatcgtcaggggtgccacggtgggccggagggtgccggctctggctgtccctgtgccggtccctcacaaacctctccccctttgaaactcaagcacagctgcgaggagggcagcgaggagggacccctctctcatggttgtctctttcccccgctatgtcataggtagtggaggaagcgaaggaagtgaacgctgaatgtgacgcatttctgaagagctcagctgtcaccgggcatagcctggaagccccaagtctgttctgactttgcctggctgtctccttgacccgcctcctagatcattgtccttgatgtccaggctgggtcatttaaaatagagatgcaatcaggaaggttgggggacttgggactgtggctgaattgagaccttgctgatgtattcatgtcagcacctgagtcacagcccaggtgcccggaagcagcctcttcgcataggcagtgatttgcgattactttaaagctcaccttttttcttcccctctctgttcgctgctgtcagcataatgattgtgttccttccctatgggatccatctgttttgtaaacaataaagcgtctgagggagtgta

SEQ ID NO: 53136 - DNA, 2643 bp, Homo sapiens
  misc_feature (37)..(37): n is a, c, g, or t
acgcgggaggacgaaccacggctaggtacgaggctgnggtgtgggacaaagaccatggggtcctggagtcccacctggcggagaaggggagaggcatggagctatccgacctgattgttttcaatgggaaactctactccgtggatgaccggacgggggtcgtctaccagatcgaaggcagcaaagccgtgccctgggtgattctgtccgacggcgacggcaccgtggagaaaggcttcaaggccgaatggctggcagtgaaggacgagcgtctgtacgtgggcggcctgggcaaggagtggacgaccactacgggtgatgtggtgaacgagaacccggagtgggtgaaggtggtgggctacaagggcagcgtggaccacgagaactgggtgtccaactacaacgccctgcgggctgctgccggcatccagccgccaggctacctcatccatgagtctgcctgctggagtgacacgctgcagcgctggttcttcctgccgcgccgcgccagccaggagcgctacagcgagaaggacgacgagcgcaagggcgccaacctgctgctgagcgcctcccctgacttcggcgacatcgctgtgagccacgtcggggcggtggtccccactcacggcttctcgtccttcaagttcatccccaacaccgacgaccagatcattgtggccctcaaatccgaggaggacagcggcagagtcgcctcctacatcatggccttcacgctggacgggcgcttcctgttgccggagaccaagatcggaagcgtgaaatacgaaggcatcgagttcatttaactcaaaacggaaacactgagcaaggccatcaggactcagcttttataaaaacaagaggagtgcacttttgttttgttttgttctttttggaactgtgcctgggttggaggtctggacagggagcccagtcccgggccccatagtggtgcgggcactggacccccgggccccacggaggccgcggtctgaactgctttccatgctgccatctggtggtgatttcggtcacttcaggcattgactcaaggcctgcctaactggctgggtcgtttcttccatccgacctcgtttcttttctttcctatgttcttttgttcagtgaatatccctagagctcctaccatatgtcaggccctatgcctcaccctgagaacgcagtgagcatgaggtggacctgtttgctgggaaccccaggtcacccccttttcttcctactctgtgcctggagcatcatgtccacccctgcagatccttggaaaagaaaatgtttatgttgcagggtattgcatggtcacgagtgagggcaggcccctggggacacatctgcccacagctgcacaggccagggcgcaggcacatctgttggttctcaggcctcagataaaaccatctccgcatcatatggccagtgaccgctttctcccttcaagaaaattctgtggctgtgcagtactttgaagttttaattattaacctgctttaattaaagcagtttcctttcttataaagtggaatcaccaaatcttatcacacagagcacagtcctgtagttacccagcccgctccagcagtgcgggagattgtaaggaagcggtggcggctggtgaagcaagtctcacatgtcggcgttcttggccaatggatacaaagataaagaaaatgttgcctttttctaggaactgtcagaaatcctcatgcctttcaagacttctgtgaatgacttgaattttttattccctgcctagggtctgtgaacgaggcctgtctcttccctggggtttctttccatggcctttatttctcctcttccagtgggagttttgcaggctcttctctgtggaaacttcacgagcgttggctgggcctcggcttcgctggagtgtactccagggtgaaggcagagtgggatttgagacccaggttaggcacgacccaggctgagaagggacgtttccatcattcacagtgccctccccacagcactacctcaccccgacccccaccctcactcctaccccaccccgcgatcgtcaggggtgccacggtgggccggagggtgccggctctggctgtccctgtgccggtccctcacaaacctctccccctttgaaactcaagcacagctgcgaggagggcagcgaggagggacccctctctcatggttgtctctttcccccgctatgtcataggtagtggaggaagcgaaggaagtgaacgctgaatgtgacgcatttctgaagagctcagctgtcaccgggcatagcctggaagccccaagtctgttctgactttgcctggctgtctccttgacccgcctcctagatcattgtccttgatgtccaggctgggtcatttaaaatagagatgcaatcaggaaggttgggggacttgggactgtggctgaattgagaccttgctgatgtattcatgtcagcacctgagtcacagcccaggtgcccggaagcagcctcttcgcataggcagtgatttgcgattactttaaagctcaccttttttcttcccctctctgttcgctgctgtcagcataatgattgtgttccttccctatgggatccatctgttttgtaaacaataaagcgtctgagggagtgta

SEQ ID NO: 53137 - DNA, 3890 bp, Homo sapiens
ttccctccctagtagccttcacccccctcaatgcctcccaccccaaaagatctgctgggcccacgttccagcgcaacgcggtggaagacggccctcatgtgccagtgcggaccctcgcgcccctccagcctgcagccagccggccgctcctccagcgcgcaggcgcaggacggaaaaaaaaaacacaaaaaaacaacaaaaaaaaaacccaaaaaaacacaaaccacagctcccagcagccctcgcgccgtccgcgcgcagccgcagagcagaggctgccgggaacgcgggcccagaggcggggcgagcgcgcgcggggcggaagtcggccaccttcctccgtcccggccgttagcccagccaagcccagccaagcccagccaagccccgccgatcgcgggcaccggagccagccccgcagcggagggaccacagagcaccagcctgcatggaacttccttcctcactcagcttcccacgttgccagctgggacaggggagatggagtaattttgctgtggaaagacttcacgtcttgccgaatgaaagtaagcaaagatactgctagagtcgggaatctagagtcgggaattcattaagccaagggagtaagaatggccacagagtagtgaaatactgtttcttctggaaaagtcagcctccagcgcctgcagcttccggaactaagatgtgactgggcttgcggaggcgctgactcctctcctccctccctggctgtgcaggtcccgcctgtctgtcacgctgatgcccgtgcagctgtctgagcacccggaatggaatgagtctatgcactccctccggatcagtgtggggggccttcctgtgctggcgtccatgaccaaggccgcggacccccgcttccgcccccgctggaaggtgatcctgacgttctttgtgggtgctgccatcctctggctgctctgctcccaccgcccggcccccggcaggccccccacccacaatgcacacaactggaggctcggccaggcgcccgccaactggtacaatgacacctaacccctgtctcccccacaaaggacaccggctgggattcggtatcgaatcgcagttatcgcagacctggacacagagtcaagggcccaagaggaaaacacctggttcagttacctgaaaaagggctacctgaccctgtcagacagtggggacaaggtggccgtggaatgggacaaagaccatggggtcctggagtcccacctggcggagaaggggagaggcatggagctatccgacctgattgttttcaatgggaaactctactccgtggatgaccggacgggggtcgtctaccagatcgaaggcagcaaagccgtgccctgggtgattctgtccgacggcgacggcaccgtggagaaaggcttcaaggccgaatggctggcagtgaaggacgagcgtctgtacgtgggcggcctgggcaaggagtggacgaccactacgggtgatgtggtgaacgagaacccggagtgggtgaaggtggtgggctacaagggcagcgtggaccacgagaactgggtgtccaactacaacgccctgcgggctgctgccggcatccagccgccaggctacctcatccatgagtctgcctgctggagtgacacgctgcagcgctggttcttcctgccgcgccgcgccagccaggagcgctacagcgagaaggacgacgagcgcaagggcgccaacctgctgctgagcgcctcccctgacttcggcgacatcgctgtgagccacgtcggggcggtggtccccactcacggcttctcgtccttcaagttcatccccaacaccgacgaccagatcattgtggccctcaaatccgaggaggacagcggcagagtcgcctcctacatcatggccttcacgctggacgggcgcttcctgttgccggagaccaagatcggaagcgtgaaatacgaaggcatcgagttcatttaactcaaaacggaaacactgagcaaggccatcaggactcagcttttataaaaacaagaggagtgcacttttgttttgttttgttctttttggaactgtgcctgggttggaggtctggacagggagcccagtcccgggccccatagtggtgcgggcactggacccccgggccccacggaggccgcggtctgaactgctttccatgctgccatctggtggtgatttcggtcacttcaggcattgactcaaggcctgcctaactggctgggtcgtttcttccatccgacctcgtttcttttctttcctatgttcttttgttcagtgaatatccctagagctcctaccatatgtcaggccctatgcctcaccctgagaacgcagtgagcatgaggtggacctgtttgctgggaaccccaggtcacccccttttcttcctactctgtgcctggagcatcatgtccacccctgcagatccttggaaaagaaaatgtttatgttgcagggtattgcatggtcacgagtgagggcaggcccctggggacacatctgcccacagctgcacaggccagggcgcaggcacatctgttggttctcaggcctcagataaaaccatctccgcatcatatggccagtgaccgctttctcccttcaagaaaattctgtggctgtgcagtactttgaagttttaattattaacctgctttaattaaagcagtttcctttcttataaagtggaatcaccaaatcttatcacacagagcacagtcctgtagttacccagcccgctccagcagtgcgggagattgtaaggaagcggtggcggctggtgaagcaagtctcacatgtcggcgttcttggccaatggatacaaagataaagaaaatgttgcctttttctaggaactgtcagaaatcctcatgcctttcaagacttctgtgaatgacttgaattttttattccctgcctagggtctgtgaacgaggcctgtctcttccctggggtttctttccatggcctttatttctcctcttccagtgggagttttgcaggctcttctctgtggaaacttcacgagcgttggctgggcctcggcttcgctggagtgtactccagggtgaaggcagagtgggatttgagacccaggttaggcacgacccaggctgagaagggacgtttccatcattcacagtgccctccccacagcactacctcaccccgacccccaccctcactcctaccccaccccgcgatcgtcaggggtgccacggtgggccggagggtgccggctctggctgtccctgtgccggtccctcacaaacctctccccctttgaaactcaagcacagctgcgaggagggcagcgaggagggacccctctctcatggttgtctctttcccccgctatgtcataggtagtggaggaagcgaaggaagtgaacgctgaatgtgacgcatttctgaagagctcagctgtcaccgggcatagcctggaagccccaagtctgttctgactttgcctggctgtctccttgacccgcctcctagatcattgtccttgatgtccaggctgggtcatttaaaatagagatgcaatcaggaaggttgggggacttgggactgtggctgaattgagaccttgctgatgtattcatgtcagcacctgagtcacagcccaggtgcccggaagcagcctcttcgcataggcagtgatttgcgattactttaaagctcaccttttttcttcccctctctgttcgctgctgtcagcataatgattgtgttccttccctatgggatccatctgttttgtaaacaataaagcgtctgagggagtgtaaaggggggcccggtacccaaatttcccctatagtgagtcggattaccgcgccgtacctgggccgcggtttaccaactccggggac

SEQ ID NO: 53138 - DNA, 4022 bp, Homo sapiens
ttccctccctagtagccttcacccccctcaatgcctcccaccccaaaagatctgctgggcccacgttccagcgcaacgcggtggaagacggccctcatgtgccagtgcggaccctcgcgcccctccagcctgcagccagccggccgctcctccagcgcgcaggcgcaggacggaaaaaaaaaacacaaaaaaacaacaaaaaaaaaacccaaaaaaacacaaaccacagctcccagcagccctcgcgccgtccgcgcgcagccgcagagcagaggctgccgggaacgcgggcccagaggcggggcgagcgcgcgcggggcggaagtcggccaccttcctccgtcccggccgttagcccagccaagcccagccaagcccagccaagccccgccgatcgcgggcaccggagccagccccgcagcggagggaccacagagcaccagcctgcatggaacttccttcctcactcagcttcccacgttgccagctgggacaggggagatggagtaattttgctgtggaaagacttcacgtcttgccgaatgaaagtaagcaaagatactgctagagtcgggaatctagagtcgggaattcattaagccaagggagtaagaatggccacagagtagtgaaatactgtttcttctggaaaagtcagcctccagcgcctgcagcttccggaactaagatgtgactgggcttgcggaggcgctgactcctctcctccctccctggctgtgcaggtcccgcctgtctgtcacgctgatgcccgtgcagctgtctgagcacccggaatggaatgagtctatgcactccctccggatcagtgtggggggccttcctgtgctggcgtccatgaccaaggccgcggacccccgcttccgcccccgctggaaggtgatcctgacgttctttgtgggtgctgccatcctctggctgctctgctcccaccgcccggcccccggcaggccccccacccacaatgcacacaactggaggctcggccaggcgcccgccaactggtacaatgacacctaacccctgtctcccccacaaaggacaccggctgggattcggtatcgaatcgcagttatcgcagacctggacacagagtcaagggcccaagaggaaaacacctggttcagttacctgaaaaagggctacctgaccctgtcagacagtggggacaaggtggccgtggaatgggacaaagaccatggggtcctggagtcccacctggcggagaaggggagaggcatggagctatccgacctgattgttttcaatgggaaactctactccgtggatgaccggacgggggtcgtctaccagatcgaaggcagcaaagccgtgccctgggtgattctgtccgacggcgacggcaccgtggagaaaggcttcaaggccgaatggctggcagtgaaggacgagcgtctgtacgtgggcggcctgggcaaggagtggacgaccactacgggtgatgtggtgaacgagaacccggagtgggtgaaggtggtgggctacaagggcagcgtggaccacgagaactgggtgtccaactacaacgccctgcgggctgctgccggcatccagccgccaggctacctcatccatgagtctgcctgctggagtgacacgctgcagcgctggttcttcctgccgcgccgcgccagccaggagcgctacagcgagaaggacgacgagcgcaagggcgccaacctgctgctgagcgcctcccctgacttcggcgacatcgctgtgagccacgtcggggcggtggtccccactcacggcttctcgtccttcaagttcatccccaacaccgacgaccagatcattgtggccctcaaatccgaggaggacagcggcagagtcgcctcctacatcatggccttcacgctggacgggcgcttcctgttgccggagaccaagatcggaagcgtgaaatacgaaggcatcgagttcatttaactcaaaacggaaacactgagcaaggccatcaggactcagcttttataaaaacaagaggagtgcacttttgttttgttttgttctttttggaactgtgcctgggttggaggtctggacagggagcccagtcccgggccccatagtggtgcgggcactggacccccgggccccacggaggccgcggtctgaactgctttccatgctgccatctggtggtgatttcggtcacttcaggcattgactcaaggcctgcctaactggctgggtcgtttcttccatccgacctcgtttcttttctttcctatgttcttttgttcagtgaatatccctagagctcctaccatatgtcaggccctatgcctcaccctgagaacgcagtgagcatgaggtggacctgtttgctgggaaccccaggtcacccccttttcttcctactctgtgcctggagcatcatgtccacccctgcagatccttggaaaagaaaatgtttatgttgcagggtattgcatggtcacgagtgagggcaggcccctggggacacatctgcccacagctgcacaggccagggcgcaggcacatctgttggttctcaggcctcagataaaaccatctccgcatcatatggccagtgaccgctttctcccttcaagaaaattctgtggctgtgcagtactttgaagttttaattattaacctgctttaattaaagcagtttcctttcttataaagtggaatcaccaaatcttatcacacagagcacagtcctgtagttacccagcccgctccagcagtgcgggagattgtaaggaagcggtggcggctggtgaagcaagtctcacatgtcggcgttcttggccaatggatacaaagataaagaaaatgttgcctttttctaggaactgtcagaaatcctcatgcctttcaagacttctgtgaatgacttgaattttttattccctgcctagggtctgtgaacgaggcctgtctcttccctggggtttctttccatggcctttatttctcctcttccagtgggagttttgcaggctcttctctgtggaaacttcacgagcgttggctgggcctcggcttcgctggagtgtactccagggtgaaggcagagtgggatttgagacccaggttaggcacgacccaggctgagaagggacgtttccatcattcacagtgccctccccacagcactacctcaccccgacccccaccctcactcctaccccaccccgcgatcgtcaggggtgccacggtgggccggagggtgccggctctggctgtccctgtgccggtccctcacaaacctctccccctttgaaactcaagcacagctgcgaggagggcagcgaggagggacccctctctcatggttgtctctttcccccgctatgtcataggtagtggaggaagcgaaggaagtgaacgctgaatgtgacgcatttctgaagagctcagctgtcaccgggcatagcctggaagccccaagtctgttctgactttgcctggctgtctccttgacccgcctcctagatcattgtccttgatgtccaggctgggtcatttaaaatagagatgcaatcaggaaggttgggggacttgggactgtggctgaattgagaccttgctgatgtattcatgtcagcacctgagtcacagcccaggtgcccggaagcagcctcttcgcataggcagtgatttgcgattactttaaagctcaccttttttcttcccctctctgttcgctgctgtcagcataatgattgtgttccttccctatgggatccatctgttttgtaaacaataaagcgtctgagggagtgtaaaaaaaaaaaaaaaacaaaaaacaaccaaaaaaaaaaaaaaaacaaaaacaaaaacaaaagagaaacaaaaaatcaaaaaacaaacacccaaagtacaaacgaaacaaaggcggggggggcgccgcgctcacaccccctccgagggagacaccaccacccgcacccccgcacgccgcgtagccgacgcggcgcctccaccacgcgggcctcctagcg

SEQ ID NO: 53139 - DNA, 3689 bp, Homo sapiens
ttccctccctagtagccttcacccccctcaatgcctcccaccccaaaagatctgctgggcccacgttccagcgcaacgcggtggaagacggccctcatgtgccagtgcggaccctcgcgcccctccagcctgcagccagccggccgctcctccagcgcgcaggcgcaggacggaaaaaaaaaacacaaaaaaacaacaaaaaaaaaacccaaaaaaacacaaaccacagctcccagcagccctcgcgccgtccgcgcgcagccgcagagcagaggctgccgggaacgcgggcccagaggcggggcgagcgcgcgcggggcggaagtcggccaccttcctccgtcccggccgttagcccagccaagcccagccaagcccagccaagccccgccgatcgcgggcaccggagccagccccgcagcggagggaccacagagcaccagcctgcatggaacttccttcctcactcagcttcccacgttgccagctgggacaggggagatggagtaattttgctgtggaaagacttcacgtcttgccgaatgaaagtaagcaaagatactgctagagtcgggaatctagagtcgggaattcattaagccaagggagtaagaatggccacagagtagtgaaatactgtttcttctggaaaagtcagcctccagcgcctgcagcttccggaactaagatgtgactgggcttgcggaggcgctgactcctctcctccctccctggctgtgcaggtcccgcctgtctgtcacgctgatgcccgtgcagctgtctgagcacccggaatggaatgagtctatgcactccctccggatcagtgtggggggccttcctgtgctggcgtccatgaccaaggccgcggacccccgcttccgcccccgctggaaggtgatcctgacgttctttgtgggtgctgccatcctctggctgctctgctcccaccgcccggcccccggcaggccccccacccacaatgcacacaactggaggctcggccaggcgcccgccaactggtacaatgacacctaacccctgtctcccccacaaaggacaccggctgggattcggtatcgaatcgcagttatcgcagacctggacacagagtcaagggcccaagaggaaaacacctggttcagttacctgaaaaagggctacctgaccctgtcagacagtggggacaaggtggccgtggaatgggacaaagaccatggggtcctggagtcccacctggcggagaaggggagaggcatggagctatccgacctgattgttttcaatgggaaactctactccgtggatgaccggacgggggtcgtctaccagatcgaaggcagcaaagccgtgccctgggtgattctgtccgacggcgacggcaccgtggagaaaggcttcaaggccgaatggctggcagtgaaggacgagcgtctgtacgtgggcggcctgggcaaggagtggacgaccactacgggtgatgtggtgaacgagaacccggagtgggtgaaggtggtgggctacaagggcagcgtggaccacgagaactgggtgtccaactacaacgccctgcgggctgctgccggcatccagccgccaggctacctcatccatgagtctgcctgctggagtgacacgctgcagcgctggttcttcctgccgcgccgcgccagccaggagcgctacagcgagaaggacgacgagcgcaagggcgccaacctgctgctgagcgcctcccctgacttcggcgacatcgctgtgagccacgtcggggcggtggtccccactcacggcttctcgtccttcaagttcatccccaacaccgacgaccagatcattgtggccctcaaatccgaggaggacagcggcagagtcgcctcctacatcatggccttcacgctggacgggcgcttcctgttgccggagaccaagatcggaagcgtgaaatacgaaggcatcgagttcatttaactcaaaacggaaacactgagcaaggccatcaggactcagcttttataaaaacaagaggagtgcacttttgttttgttttgttctttttggaactgtgcctgggttggaggtctggacagggagcccagtcccgggccccatagtggtgcgggcactggacccccgggccccacggaggccgcggtctgaactgctttccatgctgccatctggtggtgatttcggtcacttcaggcattgactcaaggcctgcctaactggctgggtcgtttcttccatccgacctcgtttcttttctttcctatgttcttttgttcagtgaatatccctagagctcctaccatatgtcaggccctatgcctcaccctgagaacgcagtgagcatgaggtggacctgtttgctgggaaccccaggtcacccccttttcttcctactctgtgcctggagcatcatgtccacccctgcagatccttggaaaagaaaatgtttatgttgcagggtattgcatggtcacgagtgagggcaggcccctggggacacatctgcccacagctgcacaggccagggcgcaggcacatctgttggttctcaggcctcagataaaaccatctccgcatcatatggccagtgaccgctttctcccttcaagaaaattctgtggctgtgcagtactttgaagttttaattattaacctgctttaattaaagcagtttcctttcttataaagtggaatcaccaaatcttatcacacagagcacagtcctgtagttacccagcccgctccagcagtgcgggagattgtaaggaagcggtggcggctggtgaagcaagtctcacatgtcggcgttcttggccaatggatacaaagataaagaaaatgttgcctttttctaggaactgtcagaaatcctcatgcctttcaagacttctgtgaatgacttgaattttttattccctgcctagggtctgtgaacgaggcctgtctcttccctggggtttctttccatggcctttatttctcctcttccagtgggagttttgcaggctcttctctgtggaaacttcacgagcgttggctgggcctcggcttcgctggagtgtactccagggtgaaggcagagtgggatttgagacccaggtagtggaggaagcgaaggaagtgaacgctgaatgtgacgcatttctgaagagctcagctgtcaccgggcatagcctggaagccccaagtctgttctgactttgcctggctgtctccttgacccgcctcctagatcattgtccttgatgtccaggctgggtcatttaaaatagagatgcaatcaggaaggttgggggacttgggactgtggctgaattgagaccttgctgatgtattcatgtcagcacctgagtcacagcccaggtgcccggaagcagcctcttcgcataggcagtgatttgcgattactttaaagctcaccttttttcttcccctctctgttcgctgctgtcagcataatgattgtgttccttccctatgggatccatctgttttgtaaacaataaagcgtctgagggagtgtaaccaaccctccacaccaccacacacccaaccaccaccccccccaaacacggcgcgccgccaaaattccccggagggcccaaaggcccccctttgacagggcccccgggcccaaaacacacccgccccaaacccgggacaccccgccctggagc

SEQ ID NO: 53140 - DNA, 349 bp, Homo sapiens
gaggtttaaaagaaaagatggtaagtgtcacatgtccagaacctgagcgttcccctgccatgaagggagtctttcattcaccccaggaggagaggctgtcacctgaggaagccagcatgggggagaaaggcacttgctacaaagtggggtgcacagagggtacccccccatcttcagtctcatagggaattgggccccttggccaaaagcttgcagtacctaaaaacagagaaacgtgctttgcaaaaatggctcaaagagcacaacagaatgcgctgtccatgtgcccagtgctctcaggagccctgacctattgcagaagcctgtgttgaagccgctgcactagtag

SEQ ID NO: 53141 - DNA, 428 bp, Homo sapiens
ctcactgtcgccaaggctggagtgcagtggtgcaatcttggctaacttcaacctccgcctagattagggaggatctctgacatccattagcattaactagaagtcagacgcgtcagaaggtttctatttaccctcttactcacttcttagcccctttattaagccacctcattttaaactgggcaaaacagaatcagccaaagagctttgccaggtttgggacacccattcatgaccagccagcaagagagacagtgagttcaatctgagaagagtctggtgactcccagaataaaccattccttcctggccagccgtggtggttcatgcttgtaatcccagcactttgggaggccaaggcgggtggatctcctgaagtcaggagtttgagaccagcctgaccaatatggtgaaaccccatctctact

SEQ ID NO: 53142 - DNA, 456 bp, Homo sapiens
ccaggctcgtggttacccgatggaggaaaacttctgggagaatcggctggtgagatgcctgacaccgctctcctggcatctgacatcaaggatatcttaattttcttagtttttaaaaattatggtaaatacacaaaagatgaaatttaccatctgaaatacttctacgtgtatgattctgtggcattaaatacactcacagtgttgtgcagccatcaccaccatccatctccagaactttcttcatcttgcaatctgaaactctgtgtccgctaactcccctttccgcctcccccagcccctggcagccaccattctactttctgtctctgaatttgacgactccaggtgccacatgtgagtgaaatcatacaatcatttgtctttttccaactggcttctttgacttagcgtgacgttctcaaggcccacctgtgttgtagcgtgcgtcagaac

SEQ ID NO: 53143 - DNA, 274 bp, Homo sapiens
gtaaatatatgcagaatcacgaatgattttagatacagaagtattatgactaattttgtttttttagaatgctattttaatggtatttgaagaactgaattggtaaggttaggaacctattagaggtctatttcagcaatactagcaagaaattataaggacttagactaaagcaatgttagtgagactgacaaaatgggatagatttcaaagacatttagagggaaaattaaacaggatataatttgtttaaaaattatattaacaacaataa

SEQ ID NO: 53144 - DNA, 1280 bp, Homo sapiens
gccaacgccacttatccagtgaaccaaacattcacctatcacgaaaaaaactctacctctctatactaacctccctacaaatctccttaattatagcacccacaatcagccactgcgggcgaggagggcacgaggccaggttcccaagagctcaggaacatggagctgatccaggacacctcccgcccgccactggagtacgtgaagggggtcccgctcatcaagtactttgcagaggcactggggcccctgcagagcttccaggcccggcctgatgacctgctcatcagcacctaccccaagtccggcactacctgggtaagccagattctggacatgatctaccagggtggtgacctggagaagtgtcaccgagctcccatcttcatgcgggtgcccttccttgagttcaaagccccagggattccctcagggatggagactctgaaagacacaccggccccacgactcctgaagacacacctgcccctggctctgctcccccagactctgttggatcagaaggtcaaggtggtctatgttgcccgcaacgcaaaggatgtggcagtttcctactaccacttctaccacatggccaaggtgcaccctgagcctgggacctgggacagcttcctggagaagttcatggtcggagaagtgtcctacggatcctggtaccagcacgtgcaggagtggtgggagctgagccgcacccaccctgttctctacctcttctatgaagacatgaaggagaacccgaaaagggagattcaaaagatcctggagtttgtggggcgctccctgccagaggagaccgtggacttcatggttcagcacacgtcgttcaaggagatgaagaagaaccctatgaccaactacaccaccgtcccccaggagttcatggaccacagcatctcccccttcatgaggaaaggcatggctggggactggaagaccaccttcaccgtggcgcagaatgagcgcttcgatgcggactatgcggagaagatggcaggctgcagcctcagcttccgctctgagctgtgagaggggctcctggagtcactgcagagggagtgtgcgaatcaaacctgaccaagcggctcaagaataaaatatgaattgagggcccgggacggtaggtcatgtctgtaatcccagcaatttggaggctgaggtgggaggatcatttgagcccaggagttcgagaccaacctgggcaacatagtgagattctgttaaaaaaataaaataaaataaaaccaatttttaaaaagaga

SEQ ID NO: 53145 - DNA, 1905 bp, Homo sapiens
cagcgcagtagctgctggaggctggcgaggcccggaggcggtgcaggaagcctccgaccacgcgggctcctgatcgcgggcgcccacagcgcggacatggcgggctggtggccggcgttgtcgcgcacggcccggcgccacccgtggcccaccaacgtgctgctctacgttgctcgagcaacgtagctctacgctctacgagcgtgccgtagctcgctcgtctccgccggggacgtgctgcagcaacggctgcagggccgctaggccgactggcgccagacgcggcgcgtggccacgttggtggtgaccttccacgccaacttcaactacgtgtggctgggcctgctggagcgcgcgctcccgggccgagcgccgcgcgccatgctggccaagttgctgtgcgaccaggtggtcggtgcgcccatcgcggtctcggccttctacgccggtatgagcattctccagggaaaggatgacatatttttggacctgaaacagaaattctggaacacctatatgcaaactcagtcgtggctttggagatcactttaagcttgtctccagctggcacactaaggagggtaatggagaagctcccccacccccaaccccaccccttccttccggaagcaaatctaagtccagccccggctccagatccctcccacagtggacctaggaaaccctcagctcagagaacaaccctgcattccccacacaacacccacaatcagccactgcgggcgaggagggcacgaggccaggttcccaagagctcaggaacatggagctgatccaggacacctcccgcccgccactggagtacgtgaagggggtcccgctcatcaagtactttgcagaggcactggggcccctgcagagcttccaggcccggcctgatgacctgctcatcagcacctaccccaagtccggcactacctgggtaagccagattctggacatgatctaccagggtggtgacctggagaagtgtcaccgagctcccatcttcatgcgggtgcccttccttgagttcaaagccccagggattccctcagggatggagactctgaaagacacaccggccccacgactcctgaagacacacctgcccctggctctgctcccccagactctgttggatcagaaggtcaaggtggtctatgttgcccgcaacgcaaaggatgtggcagtttcctactaccacttctaccacatggccaaggtgcaccctgagcctgggacctgggacagcttcctggagaagttcatggtcggagaagtgtcctacggatcctggtaccagcacgtgcaggagtggtgggagctgagccgcacccaccctgttctctacctcttctatgaagacatgaaggagaacccgaaaagggagattcaaaagatcctggagtttgtggggcgctccctgccagaggagaccgtggacttcatggttcagcacacgtcgttcaaggagatgaagaagaaccctatgaccaactacaccaccgtcccccaggagttcatggaccacagcatctcccccttcatgaggaaaggcatggctggggactggaagaccaccttcaccgtggcgcagaatgagcgcttcgatgcggactatgcggagaagatggcaggctgcagcctcagcttccgctctgagctgtgagaggggctcctggagtcactgcagagggagtgtgcgaatcaaacctgaccaagcggctcaagaataaaatatgaattgagggcccgggacggtaggtcatgtctgtaatcccagcaatttggaggctgaggtgggaggatcatttgagcccaggagttcgagaccaacctgggcaacatagtgagattctgttaaaaaaataaaataaaataaaaccaatttttaaaaagaga

SEQ ID NO: 53146 - DNA, 1765 bp, Homo sapiens
cagcgcagtagctgctggaggctggcgaggcccggaggcggtgcaggaagcctccgaccacgcgggctcctgatcgcgggcgcccacagcgcggacatggcgggctggtggccggcgttgtcgcgcacggcccggcgccacccgtggcccaccaacgtgctgctctacgttgctcgagcaacgtagctctacgctctacgagcgtgccgtagctcgctcgtctccgccggggacgtgctgcagcaacggctgcagggccgctaggccgactggcgccagacgcggcgcgtggccacgttggtggtgaccttccacgccaacttcaactacgtgtggctgggcctgctggagcgcgcgctcccgggccgagcgccgcgcgccatgctggccaagttgctgtgcgaccaggtggtcggtgcgcccatcgcggtctcggccttctacgccggtatgagcattctccagggaaaggatgacatatttttggacctgaaacagaaattctggaacacctatatgcaaactcagtcgtggctttggagatcactttaagcttgtctccagctggcacactaaggaggcacccacaatcagccactgcgggcgaggagggcacgaggccaggttcccaagagctcaggaacatggagctgatccaggacacctcccgcccgccactggagtacgtgaagggggtcccgctcatcaagtactttgcagaggcactggggcccctgcagagcttccaggcccggcctgatgacctgctcatcagcacctaccccaagtccggcactacctgggtaagccagattctggacatgatctaccagggtggtgacctggagaagtgtcaccgagctcccatcttcatgcgggtgcccttccttgagttcaaagccccagggattccctcagggatggagactctgaaagacacaccggccccacgactcctgaagacacacctgcccctggctctgctcccccagactctgttggatcagaaggtcaaggtggtctatgttgcccgcaacgcaaaggatgtggcagtttcctactaccacttctaccacatggccaaggtgcaccctgagcctgggacctgggacagcttcctggagaagttcatggtcggagaagtgtcctacggatcctggtaccagcacgtgcaggagtggtgggagctgagccgcacccaccctgttctctacctcttctatgaagacatgaaggagaacccgaaaagggagattcaaaagatcctggagtttgtggggcgctccctgccagaggagaccgtggacttcatggttcagcacacgtcgttcaaggagatgaagaagaaccctatgaccaactacaccaccgtcccccaggagttcatggaccacagcatctcccccttcatgaggaaaggcatggctggggactggaagaccaccttcaccgtggcgcagaatgagcgcttcgatgcggactatgcggagaagatggcaggctgcagcctcagcttccgctctgagctgtgagaggggctcctggagtcactgcagagggagtgtgcgaatcaaacctgaccaagcggctcaagaataaaatatgaattgagggcccgggacggtaggtcatgtctgtaatcccagcaatttggaggctgaggtgggaggatcatttgagcccaggagttcgagaccaacctgggcaacatagtgagattctgttaaaaaaataaaataaaataaaaccaatttttaaaaagaga

SEQ ID NO: 53147 - DNA, 1236 bp, Homo sapiens
  misc_feature (8)..(8): n is a, c, g, or t
  misc_feature (15)..(15): n is a, c, g, or t
  misc_feature (20)..(20): n is a, c, g, or t
  misc_feature (23)..(23): n is a, c, g, or t
aatccccnttttganttccnctncctgttggcctacttgattccccacacaacacccacaatcagccactgcgggcgaggagggcacgaggccaggttcccaagagctcaggaacatggagctgatccaggacacctcccgcccgccactggagtacgtgaagggggtcccgctcatcaagtactttgcagaggcactggggcccctgcagagcttccaggcccggcctgatgacctgctcatcagcacctaccccaagtccggcactacctgggtaagccagattctggacatgatctaccagggtggtgacctggagaagtgtcaccgagctcccatcttcatgcgggtgcccttccttgagttcaaagccccagggattccctcagggatggagactctgaaagacacaccggccccacgactcctgaagacacacctgcccctggctctgctcccccagactctgttggatcagaaggtcaaggtggtctatgttgcccgcaacgcaaaggatgtggcagtttcctactaccacttctaccacatggccaaggtgcaccctgagcctgggacctgggacagcttcctggagaagttcatggtcggagaagtgtcctacggatcctggtaccagcacgtgcaggagtggtgggagctgagccgcacccaccctgttctctacctcttctatgaagacatgaaggagaacccgaaaagggagattcaaaagatcctggagtttgtggggcgctccctgccagaggagaccgtggacttcatggttcagcacacgtcgttcaaggagatgaagaagaaccctatgaccaactacaccaccgtcccccaggagttcatggaccacagcatctcccccttcatgaggaaaggcatggctggggactggaagaccaccttcaccgtggcgcagaatgagcgcttcgatgcggactatgcggagaagatggcaggctgcagcctcagcttccgctctgagctgtgagaggggctcctggagtcactgcagagggagtgtgcgaatcaaacctgaccaagcggctcaagaataaaatatgaattgagggcccgggacggtaggtcatgtctgtaatcccagcaatttggaggctgaggtgggaggatcatttgagcccaggagttcgagaccaacctgggcaacatagtgagattctgttaaaaaaataaaataaaataaaaccaatttttaaaaagaga

SEQ ID NO: 53148 - DNA, 1209 bp, Homo sapiens
  misc_feature (10)..(10): n is a, c, g, or t
ggatccccgngctgcaggaattcggcacccacaatcagccactgcgggcgaggagggcacgaggccaggttcccaagagctcaggaacatggagctgatccaggacacctcccgcccgccactggagtacgtgaagggggtcccgctcatcaagtactttgcagaggcactggggcccctgcagagcttccaggcccggcctgatgacctgctcatcagcacctaccccaagtccggcactacctgggtaagccagattctggacatgatctaccagggtggtgacctggagaagtgtcaccgagctcccatcttcatgcgggtgcccttccttgagttcaaagccccagggattccctcagggatggagactctgaaagacacaccggccccacgactcctgaagacacacctgcccctggctctgctcccccagactctgttggatcagaaggtcaaggtggtctatgttgcccgcaacgcaaaggatgtggcagtttcctactaccacttctaccacatggccaaggtgcaccctgagcctgggacctgggacagcttcctggagaagttcatggtcggagaagtgtcctacggatcctggtaccagcacgtgcaggagtggtgggagctgagccgcacccaccctgttctctacctcttctatgaagacatgaaggagaacccgaaaagggagattcaaaagatcctggagtttgtggggcgctccctgccagaggagaccgtggacttcatggttcagcacacgtcgttcaaggagatgaagaagaaccctatgaccaactacaccaccgtcccccaggagttcatggaccacagcatctcccccttcatgaggaaaggcatggctggggactggaagaccaccttcaccgtggcgcagaatgagcgcttcgatgcggactatgcggagaagatggcaggctgcagcctcagcttccgctctgagctgtgagaggggctcctggagtcactgcagagggagtgtgcgaatcaaacctgaccaagcggctcaagaataaaatatgaattgagggcccgggacggtaggtcatgtctgtaatcccagcaatttggaggctgaggtgggaggatcatttgagcccaggagttcgagaccaacctgggcaacatagtgagattctgttaaaaaaataaaataaaataaaaccaatttttaaaaagaga

SEQ ID NO: 53149 - DNA, 2284 bp, Homo sapiens
cagcgcagtagctgctggaggctggcgaggcccggaggcggtgcaggaagcctccgaccacgcgggctcctgatcgcgggcgcccacagcgcggacatggcgggctggtggccggcgttgtcgcgcacggcccggcgccacccgtggcccaccaacgtgctgctctacgttgctcgagcaacgtagctctacgctctacgagcgtgccgtagctcgctcgtctccgccggggacgtgctgcagcaacggctgcagggccgctaggccgactggcgccagacgcggcgcgtggccacgttggtggtgaccttccacgccaacttcaactacgtgtggctgggcctgctggagcgcgcgctcccgggccgagcgccgcgcgccatgctggccaagttgctgtgcgaccaggtggtcggtgcgcccatcgcggtctcggccttctacgccggtatgagcattctccagggaaaggatgacatatttttggacctgaaacagaaattctggaacacctatatgcaaactcagtcgtggctttggagatcactttaagcttgtctccagctggcacactaaggagggtaatggagaagctcccccacccccaaccccaccccttccttccggaagcaaatctaagtccagccccggctccagatccctcccacagtggacctaggaaaccctcagctcagagaacaaccctgcattccccacacaacacccacaatcagccactgcgggcgaggagggcacgaggccaggttcccaagagctcaggaacatggagctgatccaggacacctcccgcccgccactggagtacgtgaagggggtcccgctcatcaagtactttgcagaggcactggggcccctgcagagcttccaggcccggcctgatgacctgctcatcagcacctaccccaagtccggcactacctgggtaagccagattctggacatgatctaccagggtggtgacctggagaagtgtcaccgagctcccatcttcatgcgggtgcccttccttgagttcaaagccccagggattccctcagggatggagactctgaaagacacaccggccccacgactcctgaagacacacctgcccctggctctgctcccccagactctgttggatcagaaggtcaaggtggtctatgttgcccgcaacgcaaaggatgtggcagtttcctactaccacttctaccacatggccaaggtgcaccctgagcctgggacctgggacagcttcctggagaagttcatggtcggagaagtgtcctacggatcctggtaccagcacgtgcaggagtggtgggagctgagccgcacccaccctgttctctacctcttctatgaagacatgaaggagaacccgaaaagggagattcaaaagatcctggagtttgtggggcgctccctgccagaggagaccgtggacttcatggttcagcacacgtcgttcaaggagatgaagaagaaccctatgaccaactacaccaccgtcccccaggagttcatggaccacagcatctcccccttcatgaggaaaggcatggctggggactggaagaccaccttcaccgtggcgcagaatgagcgcttcgatgcggactatgcggagaagatggcaggctgcagcctcagcttccgctctgagctgtgagaggggctcctggagtcactgcagagggagtgtgcgaatcaaacctgaccaagcggctcaagaataaaatatgaattgagggcccgggacggtaggtcatgtctgtaatcccagcaatttggaggctgaggtgggaggatcatttgagcccaggagttcgagaccaacctgggcaacatagtgagattctgttaaaaaaataaaataaaataaaaccaatttttaaaaagagaataaaatatgattgtgggccaggcagagtggctcatgcctgtaatcccagcaatttgagaagttgaggctagaggatcactggaggacaggagtttgggaccagcctgttcaacattacaagacatcatccctacaaaaatttgagaaaattatctgtacgtgatggtgggcacctgtagtcccagctacttgacaagtgaaggcaggaggatcgcctgagccagggaggttatggctgcagtgggctgactgggctaatccactcaagcctgagggacagagcaaatcttgcttgagaaataaataaaatacaatttacttaacataaattatgattcaggaccagtctggccaacatggtgaaaccccgtctctact

SEQ ID NO: 53150 - DNA, 2836 bp, Homo sapiens
cagcgcagtagctgctggaggctggcgaggcccggaggcggtgcaggaagcctccgaccacgcgggctcctgatcgcgggcgcccacagcgcggacatggcgggctggtggccggcgttgtcgcgcacggcccggcgccacccgtggcccaccaacgtgctgctctacgttgctcgagcaacgtagctctacgctctacgagcgtgccgtagctcgctcgtctccgccggggacgtgctgcagcaacggctgcagggccgctaggccgactggcgccagacgcggcgcgtggccacgttggtggtgaccttccacgccaacttcaactacgtgtggctgggcctgctggagcgcgcgctcccgggccgagcgccgcgcgccatgctggccaagttgctgtgcgaccaggtggtcggtgcgcccatcgcggtctcggccttctacgccggtatgagcattctccagggaaaggatgacatatttttggacctgaaacagaaattctggaacacctatatgcaaactcagtcgtggctttggagatcactttaagcttgtctccagctggcacactaaggaggcacccacaatcagccactgcgggcgaggagggcacgaggccaggttcccaagagctcaggtgagtgacacagtggaacggcccagggcgccctcaccctgctcagcttgtggctctaacattccagaagctgaggcctctggcatccctgccctttccccatggatatcccatttcagacaaccctggcctgcgtgaatccccctcccttcccttgtttgtttgtttttttccccggggaggccaggtcttgctgtcacccaggctggagtgctgtgggatcctggccactgcagccttgaattcctgggctcaagtgattctcttgcctcagcctctggagtagctaggactacaggccctcatcatcctgcctggttaatgtttaagaatttttttaaagatttttagagatggggtcttgcaatgctgcaccaggttggtctccaactcctggcctcagcctccctagggtctgggattataggtgggagccaccctgcctaggcctgtgcttttgctgagtcatcagagttttgttcattcccacagcagctctggcccctagtagcagctcagttcctcaatgggccgtgtttgtcctggagcccagatggactgtggccaggcaagtggatcacaggcctggctggcctgggcggtttccacatgtgaggggctgaggggctcaaggaggggagcatctccactgggtggaggctgggggtcccagcaggaaatggtgagacaaagggcgctggctggcagggagacagcacaggaaggtcctagagcttcctcagtgcagctggactctcctggagaccttcacacaccctgatatctgggccttgcccgacgagggtgctttcactggtctgcaccatggcccaggccctgggattttgaacagctccgcaggtgaatgaaaggtgaggccaggctggggaaccaccgcattagagcccgacctggttttcagccccagccccgccactgagtggctttgtgagtgcgggcaagtcactcagcctccctaggcctcagtgacttccctgaaagcaagaattccactttcttgctgttgtgatggtggtaagggaacgggcctggctctggcccctgacgcaggaacatggagctgatccaggacacctcccgcccgccactggagtacgtgaagggggtcccgctcatcaagtactttgcagaggcactggggcccctgcagagcttccaggcccggcctgatgacctgctcatcagcacctaccccaagtccggcactacctgggtaagccagattctggacatgatctaccagggtggtgacctggagaagtgtcaccgagctcccatcttcatgcgggtgcccttccttgagttcaaagccccagggattccctcagggatggagactctgaaagacacaccggccccacgactcctgaagacacacctgcccctggctctgctcccccagactctgttggatcagaaggtcaaggtggtctatgttgcccgcaacgcaaaggatgtggcagtttcctactaccacttctaccacatggccaaggtgcaccctgagcctgggacctgggacagcttcctggagaagttcatggtcggagaagtgtcctacggatcctggtaccagcacgtgcaggagtggtgggagctgagccgcacccaccctgttctctacctcttctatgaagacatgaaggagaacccgaaaagggagattcaaaagatcctggagtttgtggggcgctccctgccagaggagaccgtggacttcatggttcagcacacgtcgttcaaggagatgaagaagaaccctatgaccaactacaccaccgtcccccaggagttcatggaccacagcatctcccccttcatgaggaaaggcatggctggggactggaagaccaccttcaccgtggcgcagaatgagcgcttcgatgcggactatgcggagaagatggcaggctgcagcctcagcttccgctctgagctgtgagaggggctcctggagtcactgcagagggagtgtgcgaatcaaacctgaccaagcggctcaagaataaaatatgaattgagggcccgggacggtaggtcatgtctgtaatcccagcaatttggaggctgaggtgggaggatcatttgagcccaggagttcgagaccaacctgggcaacatagtgagattctgttaaaaaaataaaataaaataaaaccaatttttaaaaagaga

SEQ ID NO: 53151 - DNA, 2026 bp, Homo sapiens
ttttgagacagagtcttgttttattgcccagcctggagtgtgcagtggcctgatctcagctcattgaaacctcctcctgggctcaagtgattctcttgcctcagcctctggagtagctaggactacaggccctcatcatcctgcctggttaatgtttaagaatttttttaaagatttttagagatggggtcttgcaatgctgcaccaggttggtctccaactcctggcctcagcctccctagggtctgggattataggtgggagccaccctgcctaggcctgtgcttttgctgagtcatcagagttttgttcattcccacagcagctctggcccctagtagcagctcagttcctcaatgggccgtgtttgtcctggagcccagatggactgtggccaggcaagtggatcacaggcctggctggcctgggcggtttccacatgtgaggggctgaggggctcaaggaggggagcatctccactgggtggaggctgggggtcccagcaggaaatggtgagacaaagggcgctggctggcagggagacagcacaggaaggtcctagagcttcctcagtgcagctggactctcctggagaccttcacacaccctgatatctgggccttgcccgacgagggtgctttcactggtctgcaccatggcccaggccctgggattttgaacagctccgcaggtgaatgaaaggtgaggccaggctggggaaccaccgcattagagcccgacctggttttcagccccagccccgccactgagtggctttgtgagtgcgggcaagtcactcagcctccctaggcctcagtgacttccctgaaagcaagaattccactttcttgctgttgtgatggtggtaagggaacgggcctggctctggcccctgacgcaggaacatggagctgatccaggacacctcccgcccgccactggagtacgtgaagggggtcccgctcatcaagtactttgcagaggcactggggcccctgcagagcttccaggcccggcctgatgacctgctcatcagcacctaccccaagtccggcactacctgggtaagccagattctggacatgatctaccagggtggtgacctggagaagtgtcaccgagctcccatcttcatgcgggtgcccttccttgagttcaaagccccagggattccctcagggatggagactctgaaagacacaccggccccacgactcctgaagacacacctgcccctggctctgctcccccagactctgttggatcagaaggtcaaggtggtctatgttgcccgcaacgcaaaggatgtggcagtttcctactaccacttctaccacatggccaaggtgcaccctgagcctgggacctgggacagcttcctggagaagttcatggtcggagaagtgtcctacggatcctggtaccagcacgtgcaggagtggtgggagctgagccgcacccaccctgttctctacctcttctatgaagacatgaaggagaacccgaaaagggagattcaaaagatcctggagtttgtggggcgctccctgccagaggagaccgtggacttcatggttcagcacacgtcgttcaaggagatgaagaagaaccctatgaccaactacaccaccgtcccccaggagttcatggaccacagcatctcccccttcatgaggaaaggcatggctggggactggaagaccaccttcaccgtggcgcagaatgagcgcttcgatgcggactatgcggagaagatggcaggctgcagcctcagcttccgctctgagctgtgagaggggctcctggagtcactgcagagggagtgtgcgaatcaaacctgaccaagcggctcaagaataaaatatgaattgagggcccgggacggtaggtcatgtctgtaatcccagcaatttggaggctgaggtgggaggatcatttgagcccaggagttcgagaccaacctgggcaacatagtgagattctgttaaaaaaataaaataaaataaaaccaatttttaaaaagaga

SEQ ID NO: 53152 - DNA, 1936 bp, Homo sapiens
cagcgcagtagctgctggaggctggcgaggcccggaggcggtgcaggaagcctccgaccacgcgggctcctgatcgcgggcgcccacagcgcggacatggcgggctggtggccggcgttgtcgcgcacggcccggcgccacccgtggcccaccaacgtgctgctctacgttgctcgagcaacgtagctctacgctctacgagcgtgccgtagctcgctcgtctccgccggggacgtgctgcagcaacggctgcagggccgctaggccgactggcgccagacgcggcgcgtggccacgttggtggtgaccttccacgccaacttcaactacgtgtggctgggcctgctggagcgcgcgctcccgggccgagcgccgcgcgccatgctggccaagttgctgtgcgaccaggtggtcggtgcgcccatcgcggtctcggccttctacgccggtatgagcattctccagggaaaggatgacatatttttggacctgaaacagaaattctggaacacctatatgcaaactcagtcgtggctttggagatcactttaagcttgtctccagctggcacactaaggagggtaatggagaagctcccccacccccaaccccaccccttccttccggaagcaaatctaagtccagccccggctccagatccctcccacagtggacctaggaaaccctcagctcagagaacaaccctgcattccccacacaacacccacaatcagccactgcgggcgaggagggcacgaggccaggttcccaagagctcagggaacgggcctggctctggcccctgacgcaggaacatggagctgatccaggacacctcccgcccgccactggagtacgtgaagggggtcccgctcatcaagtactttgcagaggcactggggcccctgcagagcttccaggcccggcctgatgacctgctcatcagcacctaccccaagtccggcactacctgggtaagccagattctggacatgatctaccagggtggtgacctggagaagtgtcaccgagctcccatcttcatgcgggtgcccttccttgagttcaaagccccagggattccctcagggatggagactctgaaagacacaccggccccacgactcctgaagacacacctgcccctggctctgctcccccagactctgttggatcagaaggtcaaggtggtctatgttgcccgcaacgcaaaggatgtggcagtttcctactaccacttctaccacatggccaaggtgcaccctgagcctgggacctgggacagcttcctggagaagttcatggtcggagaagtgtcctacggatcctggtaccagcacgtgcaggagtggtgggagctgagccgcacccaccctgttctctacctcttctatgaagacatgaaggagaacccgaaaagggagattcaaaagatcctggagtttgtggggcgctccctgccagaggagaccgtggacttcatggttcagcacacgtcgttcaaggagatgaagaagaaccctatgaccaactacaccaccgtcccccaggagttcatggaccacagcatctcccccttcatgaggaaaggcatggctggggactggaagaccaccttcaccgtggcgcagaatgagcgcttcgatgcggactatgcggagaagatggcaggctgcagcctcagcttccgctctgagctgtgagaggggctcctggagtcactgcagagggagtgtgcgaatcaaacctgaccaagcggctcaagaataaaatatgaattgagggcccgggacggtaggtcatgtctgtaatcccagcaatttggaggctgaggtgggaggatcatttgagcccaggagttcgagaccaacctgggcaacatagtgagattctgttaaaaaaataaaataaaataaaaccaatttttaaaaagaga

SEQ ID NO: 53153 - DNA, 2059 bp, Homo sapiens
cagcgcagtagctgctggaggctggcgaggcccggaggcggtgcaggaagcctccgaccacgcgggctcctgatcgcgggcgcccacagcgcggacatggcgggctggtggccggcgttgtcgcgcacggcccggcgccacccgtggcccaccaacgtgctgctctacgttgctcgagcaacgtagctctacgctctacgagcgtgccgtagctcgctcgtctccgccggggacgtgctgcagcaacggctgcagggccgctaggccgactggcgccagacgcggcgcgtggccacgttggtggtgaccttccacgccaacttcaactacgtgtggctgggcctgctggagcgcgcgctcccgggccgagcgccgcgcgccatgctggccaagttgctgtgcgaccaggtggtcggtgcgcccatcgcggtctcggccttctacgccggtatgagcattctccagggaaaggatgacatatttttggacctgaaacagaaattctggaacacctatatgcaaactcagtcgtggctttggagatcactttaagcttgtctccagctggcacactaaggagggtaatggagaagctcccccacccccaaccccaccccttccttccggaagcaaatctaagtccagccccggctccagatccctcccacagtggacctaggaaaccctcagctcagagaacaaccctgcattccccacacaacacccacaatcagccactgcgggcgaggagggcacgaggccaggttcccaagagctcaggaacatggagctgatccaggacacctcccgcccgccactggagtacgtgaagggggtcccgctcatcaagtactttgcagaggcactggggcccctgcagagcttccaggcccggcctgatgacctgctcatcagcacctaccccaagtccggcactacctgggtaagccagattctggacatgatctaccagggtggtgacctggagaagtgtcaccgagctcccatcttcatgcgggtgcccttccttgagttcaaagccccagggattccctcagggatggagactctgaaagacacaccggccccacgactcctgaagacacacctgcccctggctctgctcccccagactctgttggatcagaaggtcaaggtggtctatgttgcccgcaacgcaaaggatgtggcagtttcctactaccacttctaccacatggccaaggtgcaccctgagcctgggacctgggacagcttcctggagaagttcatggtcggagaagtgtcctacggatcctggtaccagcacgtgcaggagtggtgggagctgagccgcacccaccctgttctctacctcttctatgaagacatgaaggagaacccgaaaagggagattcaaaagatcctggagtttgtggggcgctccctgccagaggagaccgtggacttcatggttcagcacacgtcgttcaaggagatgaagaagaaccctatgaccaactacaccaccgtcccccaggagttcatggaccacagcatctcccccttcatgaggaaaggcatggctggggactggaagaccaccttcaccgtggcgcagaatgagcgcttcgatgcggactatgcggagaagatggcaggctgcagcctcagcttccgctctgagctgtgagaggggctcctggagtcactgcagagggagtgtgcgaatcaaacctgaccaagcggctcaagaataaaatatgaattgagggcccgggacggtaggtcatgtctgtaatcccagcaatttggaggctgaggtgggaggatcatttgagcccaggagttcgagaccaacctgggcaacatagtgagattctgttaaaaaaataaaataaaataaaaccaatttttaaaaagagaaaaaaactcgagtttttttttttttttttttttttttcattcatccatttaacatgtatttatggagtcatggttctgaactggtaggcatttgggattacagagatgagacagacggccctgcccccatggcttacagtttagcacccggccc

SEQ ID NO: 53154 - DNA, 1796 bp, Homo sapiens
cagcgcagtagctgctggaggctggcgaggcccggaggcggtgcaggaagcctccgaccacgcgggctcctgatcgcgggcgcccacagcgcggacatggcgggctggtggccggcgttgtcgcgcacggcccggcgccacccgtggcccaccaacgtgctgctctacgttgctcgagcaacgtagctctacgctctacgagcgtgccgtagctcgctcgtctccgccggggacgtgctgcagcaacggctgcagggccgctaggccgactggcgccagacgcggcgcgtggccacgttggtggtgaccttccacgccaacttcaactacgtgtggctgggcctgctggagcgcgcgctcccgggccgagcgccgcgcgccatgctggccaagttgctgtgcgaccaggtggtcggtgcgcccatcgcggtctcggccttctacgccggtatgagcattctccagggaaaggatgacatatttttggacctgaaacagaaattctggaacacctatatgcaaactcagtcgtggctttggagatcactttaagcttgtctccagctggcacactaaggaggcacccacaatcagccactgcgggcgaggagggcacgaggccaggttcccaagagctcagggaacgggcctggctctggcccctgacgcaggaacatggagctgatccaggacacctcccgcccgccactggagtacgtgaagggggtcccgctcatcaagtactttgcagaggcactggggcccctgcagagcttccaggcccggcctgatgacctgctcatcagcacctaccccaagtccggcactacctgggtaagccagattctggacatgatctaccagggtggtgacctggagaagtgtcaccgagctcccatcttcatgcgggtgcccttccttgagttcaaagccccagggattccctcagggatggagactctgaaagacacaccggccccacgactcctgaagacacacctgcccctggctctgctcccccagactctgttggatcagaaggtcaaggtggtctatgttgcccgcaacgcaaaggatgtggcagtttcctactaccacttctaccacatggccaaggtgcaccctgagcctgggacctgggacagcttcctggagaagttcatggtcggagaagtgtcctacggatcctggtaccagcacgtgcaggagtggtgggagctgagccgcacccaccctgttctctacctcttctatgaagacatgaaggagaacccgaaaagggagattcaaaagatcctggagtttgtggggcgctccctgccagaggagaccgtggacttcatggttcagcacacgtcgttcaaggagatgaagaagaaccctatgaccaactacaccaccgtcccccaggagttcatggaccacagcatctcccccttcatgaggaaaggcatggctggggactggaagaccaccttcaccgtggcgcagaatgagcgcttcgatgcggactatgcggagaagatggcaggctgcagcctcagcttccgctctgagctgtgagaggggctcctggagtcactgcagagggagtgtgcgaatcaaacctgaccaagcggctcaagaataaaatatgaattgagggcccgggacggtaggtcatgtctgtaatcccagcaatttggaggctgaggtgggaggatcatttgagcccaggagttcgagaccaacctgggcaacatagtgagattctgttaaaaaaataaaataaaataaaaccaatttttaaaaagaga

SEQ ID NO: 53155 - DNA, 1932 bp, Homo sapiens
cagcgcagtagctgctggaggctggcgaggcccggaggcggtgcaggaagcctccgaccacgcgggctcctgatcgcgggcgcccacagcgcggacatggcgggctggtggccggcgttgtcgcgcacggcccggcgccacccgtggcccaccaacgtgctgctctacgttgctcgagcaacgtagctctacgctctacgagcgtgccgtagctcgctcgtctccgccggggacgtgctgcagcaacggctgcagggccgctaggccgactggcgccagacgcggcgcgtggccacgttggtggtgaccttccacgccaacttcaactacgtgtggctgggcctgctggagcgcgcgctcccgggccgagcgccgcgcgccatgctggccaagttgctgtgcgaccaggtggtcggtgcgcccatcgcggtctcggccttctacgccggtatgagcattctccagggaaaggatgacatatttttggacctgaaacagaaattctggaacacctatatgcaaactcagtcgtggctttggagatcactttaagcttgtctccagctggcacactaaggagggtaatggagaagctcccccacccccaaccccaccccttccttccggaagcaaatctaagtccagccccggctccagatccctcccacagtggacctaggaaaccctcagctcagagaacaaccctgcattccccacacaacacccacaatcagccactgcgggcgaggagggcacgaggccaggttcccaagagctcaggaacatggagctgatccaggacacctcccgcccgccactggagtacgtgaagggggtcccgctcatcaagtactttgcagaggcactggggcccctgcagagcttccaggcccggcctgatgacctgctcatcagcacctaccccaagtccggcactacctgggtaagccagattctggacatgatctaccagggtggtgacctggagaagtgtcaccgagctcccatcttcatgcgggtgcccttccttgagttcaaagccccagggattccctcagggatggagactctgaaagacacaccggccccacgactcctgaagacacacctgcccctggctctgctcccccagactctgttggatcagaaggtcaaggtggtctatgttgcccgcaacgcaaaggatgtggcagtttcctactaccacttctaccacatggccaaggtgcaccctgagcctgggacctgggacagcttcctggagaagttcatggtcggagaagtgtcctacggatcctggtaccagcacgtgcaggagtggtgggagctgagccgcacccaccctgttctctacctcttctatgaagacatgaaggagaacccgaaaagggagattcaaaagatcctggagtttgtggggcgctccctgccagaggagaccgtggacttcatggttcagcacacgtcgttcaaggagatgaagaagaaccctatgaccaactacaccaccgtcccccaggagttcatggaccacagcatctcccccttcatgaggaaaggcatggctggggactggaagaccaccttcaccgtggcgcagaatgagcgcttcgatgcggactatgcggagaagatggcaggctgcagcctcagcttccgctctgagctgtgagaggggctcctggagtcactgcagagggagtgtgcgaatcaaacctgaccaagcggctcaagaataaaatatgaattgagggcccgggacggtaggtcatgtctgtaatcccagcaatttggaggctgaggtgggaggatcatttgagcccaggagttcgagaccaacctgggcaacatagtgagattctgttaaaaaaataaaataaaataaaaccaatttttaaaaagagaccataacacatctaccaataaataaaa

SEQ ID NO: 53156 - DNA, 2230 bp, Homo sapiens
cagcgcagtagctgctggaggctggcgaggcccggaggcggtgcaggaagcctccgaccacgcgggctcctgatcgcgggcgcccacagcgcggacatggcgggctggtggccggcgttgtcgcgcacggcccggcgccacccgtggcccaccaacgtgctgctctacgttgctcgagcaacgtagctctacgctctacgagcgtgccgtagctcgctcgtctccgccggggacgtgctgcagcaacggctgcagggccgctaggccgactggcgccagacgcggcgcgtggccacgttggtggtgaccttccacgccaacttcaactacgtgtggctgggcctgctggagcgcgcgctcccgggccgagcgccgcgcgccatgctggccaagttgctgtgcgaccaggtggtcggtgcgcccatcgcggtctcggccttctacgccggtatgagcattctccagggaaaggatgacatatttttggacctgaaacagaaattctggaacacctatatgcaaactcagtcgtggctttggagatcactttaagcttgtctccagctggcacactaaggagggtaatggagaagctcccccacccccaaccccaccccttccttccggaagcaaatctaagtccagccccggctccagatccctcccacagtggacctaggaaaccctcagctcagagaacaaccctgcattccccacacaacacccacaatcagccactgcgggcgaggagggcacgaggccaggttcccaagagctcaggaacatggagctgatccaggacacctcccgcccgccactggagtacgtgaagggggtcccgctcatcaagtactttgcagaggcactggggcccctgcagagcttccaggcccggcctgatgacctgctcatcagcacctaccccaagtccggcactacctgggtaagccagattctggacatgatctaccagggtggtgacctggagaagtgtcaccgagctcccatcttcatgcgggtgcccttccttgagttcaaagccccagggattccctcagggatggagactctgaaagacacaccggccccacgactcctgaagacacacctgcccctggctctgctcccccagactctgttggatcagaaggtcaaggtggtctatgttgcccgcaacgcaaaggatgtggcagtttcctactaccacttctaccacatggccaaggtgcaccctgagcctgggacctgggacagcttcctggagaagttcatggtcggagaagtgtcctacggatcctggtaccagcacgtgcaggagtggtgggagctgagccgcacccaccctgttctctacctcttctatgaagacatgaaggagaacccgaaaagggagattcaaaagatcctggagtttgtggggcgctccctgccagaggagaccgtggacttcatggttcagcacacgtcgttcaaggagatgaagaagaaccctatgaccaactacaccaccgtcccccaggagttcatggaccacagcatctcccccttcatgaggaaaggcatggctggggactggaagaccaccttcaccgtggcgcagaatgagcgcttcgatgcggactatgcggagaagatggcaggctgcagcctcagcttccgctctgagctgtgagaggggctcctggagtcactgcagagggagtgtgcgaatcaaacctgaccaagcggctcaagaattggaggctgaggtgggaggatcatttgagcccaggagttcgagaccaacctgggcaacatagtgagattctgttaaaaaaataaaataaaataaaaccaatttttaaaaagagaataaaatatgattgtgggccaggcagagtggctcatgcctgtaatcccagcaatttgagaagttgaggctagaggatcactggaggacaggagtttgggaccagcctgttcaacattacaagacatcatccctacaaaaatttgagaaaattatctgtacgtgatggtgggcacctgtagtcccagctacttgacaagtgaaggcaggaggatcgcctgagccagggaggttatggctgcagtgggctgactgggctaatccactcaagcctgagggacagagcaaatcttgcttgagaaataaataaaatacaatttacttaacataaattatgattcaggaccagtctggccaacatggtgaaaccccgtctctact

SEQ ID NO: 53157 - DNA, 2637 bp, Homo sapiens
cagcgcagtagctgctggaggctggcgaggcccggaggcggtgcaggaagcctccgaccacgcgggctcctgatcgcgggcgcccacagcgcggacatggcgggctggtggccggcgttgtcgcgcacggcccggcgccacccgtggcccaccaacgtgctgctctacgttgctcgagcaacgtagctctacgctctacgagcgtgccgtagctcgctcgtctccgccggggacgtgctgcagcaacggctgcagggccgctaggccgactggcgccagacgcggcgcgtggccacgttggtggtgaccttccacgccaacttcaactacgtgtggctgggcctgctggagcgcgcgctcccgggccgagcgccgcgcgccatgctggccaagttgctgtgcgaccaggtggtcggtgcgcccatcgcggtctcggccttctacgccggtatgagcattctccagggaaaggatgacatatttttggacctgaaacagaaattctggaacacctatatgcaaactcagtcgtggctttggagatcactttaagcttgtctccagctggcacactaaggaggcacccacaatcagccactgcgggcgaggagggcacgaggccaggttcccaagagctcaggtgagtgacacagtggaacggcccagggcgccctcaccctgctcagcttgtggctctaacattccagaagctgaggcctctggcatccctgccctttccccatggatatcccatttcagacaaccctggcctgcgtgaatccccctcccttcccttgtttgtttgtttttttccccggggaggccaggtcttgctgtcacccaggctggagtgctgtgggatcctggccactgcagccttgaattcctgggctcaagtgattctcttgcctcagcctctggagtagctaggactacaggccctcatcatcctgcctggttaatgtttaagaatttttttaaagatttttagagatggggtcttgcaatgctgcaccaggttggtctccaactcctggcctcagcctccctagggtctgggattataggtgggagccaccctgcctaggcctgtgcttttgctgagtcatcagagttttgttcattcccacagcagctctggcccctagtagcagctcagttcctcaatgggccgtgtttgtcctggagcccagatggactgtggccaggcaagtggatcacaggcctggctggcctgggcggtttccacatgtgaggggctgaggggctcaaggaggggagcatctccactgggtggaggctgggggtcccagcaggaaatggtgagacaaagggcgctggctggcagggagacagcacaggaaggtcctagagcttcctcagtgcagctggactctcctggagaccttcacacaccctgatatctgggccttgcccgacgagggtgctttcactggtctgcaccatggcccaggccctgggattttgaacagctccgcaggtgaatgaaaggaacatggagctgatccaggacacctcccgcccgccactggagtacgtgaagggggtcccgctcatcaagtactttgcagaggcactggggcccctgcagagcttccaggcccggcctgatgacctgctcatcagcacctaccccaagtccggcactacctgggtaagccagattctggacatgatctaccagggtggtgacctggagaagtgtcaccgagctcccatcttcatgcgggtgcccttccttgagttcaaagccccagggattccctcagggatggagactctgaaagacacaccggccccacgactcctgaagacacacctgcccctggctctgctcccccagactctgttggatcagaaggtcaaggtggtctatgttgcccgcaacgcaaaggatgtggcagtttcctactaccacttctaccacatggccaaggtgcaccctgagcctgggacctgggacagcttcctggagaagttcatggtcggagaagtgtcctacggatcctggtaccagcacgtgcaggagtggtgggagctgagccgcacccaccctgttctctacctcttctatgaagacatgaaggagaacccgaaaagggagattcaaaagatcctggagtttgtggggcgctccctgccagaggagaccgtggacttcatggttcagcacacgtcgttcaaggagatgaagaagaaccctatgaccaactacaccaccgtcccccaggagttcatggaccacagcatctcccccttcatgaggaaaggcatggctggggactggaagaccaccttcaccgtggcgcagaatgagcgcttcgatgcggactatgcggagaagatggcaggctgcagcctcagcttccgctctgagctgtgagaggggctcctggagtcactgcagagggagtgtgcgaatcaaacctgaccaagcggctcaagaataaaatatgaattgagggcccgggacggtaggtcatgtctgtaatcccagcaatttggaggctgaggtgggaggatcatttgagcccaggagttcgagaccaacctgggcaacatagtgagattctgttaaaaaaataaaataaaataaaaccaatttttaaaaagaga

SEQ ID NO: 53158 - DNA, 1268 bp, Homo sapiens
cagcgcagtagctgctggaggctggcgaggcccggaggcggtgcaggaagcctccgaccacgcgggctcctgatcgcgggcgcccacagcgcggacatggcgggctggtggccggcgttgtcgcgcacggcccggcgccacccgtggcccaccaacgtgctgctctacgttgctcgagcaacgtagctctacgctctacgagcgtgccgtagctcgctcgtctccgccggggacgtgctgcagcaacggctgcagggccgctaggccgactggcgccagacgcggcgcgtggccacgttggtggtgaccttccacgccaacttcaactacgtgtggctgggcctgctggagcgcgcgctcccgggccgagcgccgcgcgccatgctggccaagttgctgtgcgaccaggtggtcggtgcgcccatcgcggtctcggccttctacgccggtatgagcattctccagggaaaggatgacatatttttggacctgaaacagaaattctggaacacctatatggtggtctatgttgcccgcaacgcaaaggatgtggcagtttcctactaccacttctaccacatggccaaggtgcaccctgagcctgggacctgggacagcttcctggagaagttcatggtcggagaagtgtcctacggatcctggtaccagcacgtgcaggagtggtgggagctgagccgcacccaccctgttctctacctcttctatgaagacatgaaggagaacccgaaaagggagattcaaaagatcctggagtttgtggggcgctccctgccagaggagaccgtggacttcatggttcagcacacgtcgttcaaggagatgaagaagaaccctatgaccaactacaccaccgtcccccaggagttcatggaccacagcatctcccccttcatgaggaaaggcatggctggggactggaagaccaccttcaccgtggcgcagaatgagcgcttcgatgcggactatgcggagaagatggcaggctgcagcctcagcttccgctctgagctgtgagaggggctcctggagtcactgcagagggagtgtgcgaatcaaacctgaccaagcggctcaagaataaaatatgaattgagggcccgggacggtaggtcatgtctgtaatcccagcaatttggaggctgaggtgggaggatcatttgagcccaggagttcgagaccaacctgggcaacatagtgagattctgttaaaaaaataaaataaaataaaaccaatttttaaaaagaga

SEQ ID NO: 53159 - DNA, 2429 bp, Homo sapiens
cagcgcagtagctgctggaggctggcgaggcccggaggcggtgcaggaagcctccgaccacgcgggctcctgatcgcgggcgcccacagcgcggacatggcgggctggtggccggcgttgtcgcgcacggcccggcgccacccgtggcccaccaacgtgctgctctacgttgctcgagcaacgtagctctacgctctacgagcgtgccgtagctcgctcgtctccgccggggacgtgctgcagcaacggctgcagggccgctaggccgactggcgccagacgcggcgcgtggccacgttggtggtgaccttccacgccaacttcaactacgtgtggctgggcctgctggagcgcgcgctcccgggccgagcgccgcgcgccatgctggccaagttgctgtgcgaccaggtggtcggtgcgcccatcgcggtctcggccttctacgccggtatgagcattctccagggaaaggatgacatatttttggacctgaaacagaaattctggaacacctatatgcaaactcagtcgtggctttggagatcactttaagcttgtctccagctggcacactaaggagggtaatggagaagctcccccacccccaaccccaccccttccttccggaagcaaatctaagtccagccccggctccagatccctcccacagtggacctaggaaaccctcagctcagagaacaaccctgcattccccacacaacacccacaatcagccactgcgggcgaggagggcacgaggccaggttcccaagagctcaggaacatggagctgatccaggacacctcccgcccgccactggagtacgtgaagggggtcccgctcatcaagtactttgcagaggcactggggcccctgcagagcttccaggcccggcctgatgacctgctcatcagcacctaccccaagtccggcactacctgggtaagccagattctggacatgatctaccagggtggtgacctggagaagtgtcaccgagctcccatcttcatgcgggtgcccttccttgagttcaaagccccagggattccctcagggatggagactctgaaagacacaccggccccacgactcctgaagacacacctgcccctggctctgctcccccagactctgttggatcagaaggtcaaggtggtctatgttgcccgcaacgcaaaggatgtggcagtttcctactaccacttctaccacatggccaaggtgcaccctgagcctgggacctgggacagcttcctggagaagttcatggtcggagaagtgtcctacggatcctggtaccagcacgtgcaggagtggtgggagctgagccgcacccaccctgttctctacctcttctatgaagacatgaaggaggtgagaccacgtgcgatgcttccctccatgtgactcctgggggcaggcacctcacagggacccgccaaggccacccagccccctccctgggcagcccccacagcaggaccagattccccatcctgccttcttggcccaggcctccccactaaggccccacctggcagcgggccccacacagctctcatctctcgcacctgagtcagctgcatggggggccacggatcagaaacttagtcctattgctactccctgccaaagggtgtgccacccagggccacagtcacagaagaagaccatcacggtcctcacccataggagccaagcccagctcatgatgggatcacagggcagacagcaattctttttacccccgggactggggccctgggggttgaggagttggctctgcagggtttctaggagaagtggccagatcgcctctgaggttagagaaggggaccccttttacttttcctgaatcagtaatccgagcctccactgaggggccctctgctgctcagaacccgaaaagggagattcaaaagatcctggagtttgtggggcgctccctgccagaggagaccgtggacttcatggttcagcacacgtcgttcaaggagatgaagaagaaccctatgaccaactacaccaccgtcccccaggagttcatggaccacagcatctcccccttcatgaggaaaggcatggctggggactggaagaccaccttcaccgtggcgcagaatgagcgcttcgatgcggactatgcggagaagatggcaggctgcagcctcagcttccgctctgagctgtgagaggggctcctggagtcactgcagagggagtgtgcgaatcaaacctgaccaagcggctcaagaataaaatatgaattgagggcccgggacggtaggtcatgtctgtaatcccagcaatttggaggctgaggtgggaggatcatttgagcccaggagttcgagaccaacctgggcaacatagtgagattctgttaaaaaaataaaataaaataaaaccaatttttaaaaagaga

SEQ ID NO: 53160 - DNA, 1134 bp, Homo sapiens
gggactgtctgcctcttgctctgatgaccaagaacgtaagactcttcagtgtagacctaagaaagctagagggtgggtcctcacaggcccacaaaatttggtggcggtgggatcacggctggtggagcatgccttgctccagattaggggtgtgacgctattgatgcagattatattactatagaatatgatggtctcagggaccaggcaggactttggcttctgagcagggttcagctcctgacttggccctaccggtgccgtgagatctcaaacaagtcagcctctaagcctcaggttcctcctttgccaatccaagagatgagctggcctgggacaggctgttgtggtgatggtgctggggttgagtcttctgcccctgcaggtggtctatgttgcccgcaacgcaaaggatgtggcagtttcctactaccacttctaccacatggccaaggtgcaccctgagcctgggacctgggacagcttcctggagaagttcatggtcggagaagtgtcctacggatcctggtaccagcacgtgcaggagtggtgggagctgagccgcacccaccctgttctctacctcttctatgaagacatgaaggagaacccgaaaagggagattcaaaagatcctggagtttgtggggcgctccctgccagaggagaccgtggacttcatggttcagcacacgtcgttcaaggagatgaagaagaaccctatgaccaactacaccaccgtcccccaggagttcatggaccacagcatctcccccttcatgaggaaaggcatggctggggactggaagaccaccttcaccgtggcgcagaatgagcgcttcgatgcggactatgcggagaagatggcaggctgcagcctcagcttccgctctgagctgtgagaggggctcctggagtcactgcagagggagtgtgcgaatcaaacctgaccaagcggctcaagaataaaatatgaattgagggcccgggacggtaggtcatgtctgtaatcccagcaatttggaggctgaggtgggaggatcatttgagcccaggagttcgagaccaacctgggcaacatagtgagattctgttaaaaaaataaaataaaataaaaccaatttttaaaaagaga

SEQ ID NO: 53161 - DNA, 1849 bp, Homo sapiens
cagcgcagtagctgctggaggctggcgaggcccggaggcggtgcaggaagcctccgaccacgcgggctcctgatcgcgggcgcccacagcgcggacatggcgggctggtggccggcgttgtcgcgcacggcccggcgccacccgtggcccaccaacgtgctgctctacgttgctcgagcaacgtagctctacgctctacgagcgtgccgtagctcgctcgtctccgccggggacgtgctgcagcaacggctgcagggccgctaggccgactggcgccagacgcggcgcgtggccacgttggtggtgaccttccacgccaacttcaactacgtgtggctgggcctgctggagcgcgcgctcccgggccgagcgccgcgcgccatgctggccaagttgctgtgcgaccaggtggtcggtgcgcccatcgcggtctcggccttctacgccggtatgagcattctccagggaaaggatgacatatttttggacctgaaacagaaattctggaacacctatatgcaaactcagtcgtggctttggagatcactttaagcttgtctccagctggcacactaaggagggtaatggagaagctcccccacccccaaccccaccccttccttccggaagcaaatctaagtccagccccggctccagatccctcccacagtggacctaggaaaccctcagctcagagaacaaccctgcattccccacacaacacccacaatcagccactgcgggcgaggagggcacgaggccaggttcccaagagctcaggaacatggagctgatccaggacacctcccgcccgccactggagtacgtgaagggggtcccgctcatcaagtactttgcagaggcactggggcccctgcagagcttccaggcccggcctgatgacctgctcatcagcacctaccccaagtccggcactacctgggtaagccagattctggacatgatctaccagggtggtgacctggagaagtgtcaccgagctcccatcttcatgcgggtgcccttccttgagttcaaagccccagggattccctcagggatggagactctgaaagacacaccggccccacgactcctgaagacacacctgcccctggctctgctcccccagactctgttggatcagaaggtcaaggtggtctatgttgcccgcaacgcaaaggatgtggcagtttcctactaccacttctaccacatggccaaggtgcaccctgagcctgggacctgggacagcttcctggagaagttcatggtcggagaagtgtcctacggatcctggtaccagcacgtgcaggagtggtgggagctgagccgcacccaccctgttctctacctcttctatgaagacatgaaggagggagaccgtggacttcatggttcagcacacgtcgttcaaggagatgaagaagaaccctatgaccaactacaccaccgtcccccaggagttcatggaccacagcatctcccccttcatgaggaaaggcatggctggggactggaagaccaccttcaccgtggcgcagaatgagcgcttcgatgcggactatgcggagaagatggcaggctgcagcctcagcttccgctctgagctgtgagaggggctcctggagtcactgcagagggagtgtgcgaatcaaacctgaccaagcggctcaagaataaaatatgaattgagggcccgggacggtaggtcatgtctgtaatcccagcaatttggaggctgaggtgggaggatcatttgagcccaggagttcgagaccaacctgggcaacatagtgagattctgttaaaaaaataaaataaaataaaaccaatttttaaaaagaga

SEQ ID NO: 53162 - DNA, 2303 bp, Homo sapiens
cagcgcagtagctgctggaggctggcgaggcccggaggcggtgcaggaagcctccgaccacgcgggctcctgatcgcgggcgcccacagcgcggacatggcgggctggtggccggcgttgtcgcgcacggcccggcgccacccgtggcccaccaacgtgctgctctacgttgctcgagcaacgtagctctacgctctacgagcgtgccgtagctcgctcgtctccgccggggacgtgctgcagcaacggctgcagggccgctaggccgactggcgccagacgcggcgcgtggccacgttggtggtgaccttccacgccaacttcaactacgtgtggctgggcctgctggagcgcgcgctcccgggccgagcgccgcgcgccatgctggccaagttgctgtgcgaccaggtggtcggtgcgcccatcgcggtctcggccttctacgccggtatgagcattctccagggaaaggatgacatatttttggacctgaaacagaaattctggaacacctatatgcaaactcagtcgtggctttggagatcactttaagcttgtctccagctggcacactaaggagggtaatggagaagctcccccacccccaaccccaccccttccttccggaagcaaatctaagtccagccccggctccagatccctcccacagtggacctaggaaaccctcagctcagagaacaaccctgcattccccacacaacacccacaatcagccactgcgggcgaggagggcacgaggccaggttcccaagagctcaggaacatggagctgatccaggacacctcccgcccgccactggagtacgtgaagggggtcccgctcatcaagtactttgcagaggcactggggcccctgcagagcttccaggcccggcctgatgacctgctcatcagcacctaccccaagtccgggatggagactctgaaagacacaccggccccacgactcctgaagacacacctgcccctggctctgctcccccagactctgttggatcagaaggtcaaggtggtctatgttgcccgcaacgcaaaggatgtggcagtttcctactaccacttctaccacatggccaaggtgcaccctgagcctgggacctgggacagcttcctggagaagttcatggtcggagaagtgtcctacggatcctggtaccagcacgtgcaggagtggtgggagctgagccgcacccaccctgttctctacctcttctatgaagacatgaaggaggtgagaccacgtgcgatgcttccctccatgtgactcctgggggcaggcacctcacagggacccgccaaggccacccagccccctccctgggcagcccccacagcaggaccagattccccatcctgccttcttggcccaggcctccccactaaggccccacctggcagcgggccccacacagctctcatctctcgcacctgagtcagctgcatggggggccacggatcagaaacttagtcctattgctactccctgccaaagggtgtgccacccagggccacagtcacagaagaagaccatcacggtcctcacccataggagccaagcccagctcatgatgggatcacagggcagacagcaattctttttacccccgggactggggccctgggggttgaggagttggctctgcagggtttctaggagaagtggccagatcgcctctgaggttagagaaggggaccccttttacttttcctgaatcagtaatccgagcctccactgaggggccctctgctgctcagaacccgaaaagggagattcaaaagatcctggagtttgtggggcgctccctgccagaggagaccgtggacttcatggttcagcacacgtcgttcaaggagatgaagaagaaccctatgaccaactacaccaccgtcccccaggagttcatggaccacagcatctcccccttcatgaggaaaggcatggctggggactggaagaccaccttcaccgtggcgcagaatgagcgcttcgatgcggactatgcggagaagatggcaggctgcagcctcagcttccgctctgagctgtgagaggggctcctggagtcactgcagagggagtgtgcgaatcaaacctgaccaagcggctcaagaataaaatatgaattgagggcccgggacggtaggtcatgtctgtaatcccagcaatttggaggctgaggtgggaggatcatttgagcccaggagttcgagaccaacctgggcaacatagtgagattctgttaaaaaaataaaataaaataaaaccaatttttaaaaagaga

SEQ ID NO: 53163 - DNA, 1821 bp, Homo sapiens
cagcgcagtagctgctggaggctggcgaggcccggaggcggtgcaggaagcctccgaccacgcgggctcctgatcgcgggcgcccacagcgcggacatggcgggctggtggccggcgttgtcgcgcacggcccggcgccacccgtggcccaccaacgtgctgctctacgttgctcgagcaacgtagctctacgctctacgagcgtgccgtagctcgctcgtctccgccggggacgtgctgcagcaacggctgcagggccgctaggccgactggcgccagacgcggcgcgtggccacgttggtggtgaccttccacgccaacttcaactacgtgtggctgggcctgctggagcgcgcgctcccgggccgagcgccgcgcgccatgctggccaagttgctgtgcgaccaggtggtcggtgcgcccatcgcggtctcggccttctacgccggtatgagcattctccagggaaaggatgacatatttttggacctgaaacagaaattctggaacacctatatgcaaactcagtcgtggctttggagatcactttaagcttgtctccagctggcacactaaggagggtaatggagaagctcccccacccccaaccccaccccttccttccggaagcaaatctaagtccagccccggctccagatccctcccacagtggacctaggaaaccctcagctcagagaacaaccctgcattccccacacaacacccacaatcagccactgcgggcgaggagggcacgaggccaggttcccaagagctcaggaacatggagctgatccaggacacctcccgcccgccactggagtacgtgaagggggtcccgctcatcaagtactttgcagaggcactggggcccctgcagagcttccaggcccggcctgatgacctgctcatcagcacctaccccaagtccggcactacctgggtaagccagattctggacatgatctaccagggtggtgacctggagaagtgtcaccgagctcccatcttcatgcgggtgcccttccttgagttcaaagccccagggattccctcagggatggagactctgaaagacacaccggccccacgactcctgaagacacacctgcccctggctctgctcccccagactctgttggatcagaaggtcaaggtggtctatgttgcccgcaacgcaaaggatgtggcagtttcctactaccacttctaccacatggccaaggtgcaccctgagcctgggacctgggacagcttcctggagaagttcatggtcggagaagtgtcctacggatcctggtaccagcacgtgcaggagtggtgggagctgagccgcacccaccctgttctctacctcttctatgaagacatgaaggagaacccgaaaagggagattcaaaagatcctggagtttgtggggcgctccctgccagaggagaccgtggacttcatggttcagcacacgcgcccatgagtatatcaagcagaacgctagtgacacaacagcacccagccctcaagccaggaggccatcgagccaccagctattatgcgatctccactcgaggagaggaattgctggggaccggaagactcacatttcatccatagatcaatatatcagacttcaacccagcataggtcgcacaagctcgacagtccccaaggctatctcaggagcgctgatggtgcggatggagtcaggggtaccctgggtcgaggcaggcggcatgtgtagctgagatcaccccactcgcacgcgctgccactgatgacatacgcataccgtgatctcacacacacactacaaatccgcttcac

SEQ ID NO: 53164 - DNA, 1460 bp, Homo sapiens
cagcgcagtagctgctggaggctggcgaggcccggaggcggtgcaggaagcctccgaccacgcgggctcctgatcgcgggcgcccacagcgcggacatggcgggctggtggccggcgttgtcgcgcacggcccggcgccacccgtggcccaccaacgtgctgctctacgttgctcgagcaacgtagctctacgctctacgagcgtgccgtagctcgctcgtctccgccggggacgtgctgcagcaacggctgcagggccgctaggccgactggcgccagacgcggcgcgtggccacgttggtggtgaccttccacgccaacttcaactacgtgtggctgggcctgctggagcgcgcgctcccgggccgagcgccgcgcgccatgctggccaagttgctgtgcgaccaggtggtcggtgcgcccatcgcggtctcggccttctacgccggtatgagcattctccagggaaaggatgacatatttttggacctgaaacagaaattctggaacacctatatgcaaactcagtcgtggctttggagatcactttaagcttgtctccagctggcacactaaggagggtaatggagaagctcccccacccccaaccccaccccttccttccggaagcaaatctaagtccagccccggctccagatccctcccacagtggacctaggaaaccctcagctcagagaacaaccctgcattccccacacaacacccacaatcagccactgcgggcgaggagggcacgaggccaggttcccaagagctcaggaacatggagctgatccaggacacctcccgcccgccactggagtacgtgaagggggtcccgctcatcaagtactttgcagaggcactggggcccctgcagagcttccaggcccggcctgatgacctgctcatcagcacctaccccaagtccggcactacctgggtaagccagattctggacatgatctaccagggtggtgacctggagaagtgtcaccgagctcccatcttcatgcgggtgcccttccttgagttcaaagccccagggattccctcagggatggagactctgaaagacacaccggccccacgactcctgaagacacacctgcccctggctctgctcccccagactctgttggatcagaaggtcaaggtggtctatgttgcccgcaacgcaaaggatgtggcagtttcctactaccacttctaccacatggccaaggtgcaccctgagcctgggacctgggacagcttcctggagaagttcatggtcggagaagtgtcctacggatcctggtaccagcacgtgcaggagtggtgggagctgagccgcacccaccctgttctctacctcttctatgaagacatgaaggagaacccgaaaagggagattcaaaagatcctggagtttgtggggcgctccctgccagatttggggaaaacaaatttcaaacagg

SEQ ID NO: 53165 - DNA, 1619 bp, Homo sapiens
cagcgcagtagctgctggaggctggcgaggcccggaggcggtgcaggaagcctccgaccacgcgggctcctgatcgcgggcgcccacagcgcggacatggcgggctggtggccggcgttgtcgcgcacggcccggcgccacccgtggcccaccaacgtgctgctctacgttgctcgagcaacgtagctctacgctctacgagcgtgccgtagctcgctcgtctccgccggggacgtgctgcagcaacggctgcagggccgctaggccgactggcgccagacgcggcgcgtggccacgttggtggtgaccttccacgccaacttcaactacgtgtggctgggcctgctggagcgcgcgctcccgggccgagcgccgcgcgccatgctggccaagttgctgtgcgaccaggtggtcggtgcgcccatcgcggtctcggccttctacgccggtatgagcattctccagggaaaggatgacatatttttggacctgaaacagaaattctggaacacctatatgcaaactcagtcgtggctttggagatcactttaagcttgtctccagctggcacactaaggagggtaatggagaagctcccccacccccaaccccaccccttccttccggaagcaaatctaagtccagccccggctccagatccctcccacagtggacctaggaaaccctcagctcagagaacaaccctgcattccccacacaacacccacaatcagccactgcgggcgaggagggcacgaggccaggttcccaagagctcaggaacatggagctgatccaggacacctcccgcccgccactggagtacgtgaagggggtcccgctcatcaagtactttgcagaggcactggggcccctgcagagcttccaggcccggcctgatgacctgctcatcagcacctaccccaagtccggcactacctgggtaagccagattctggacatgatctaccagggtggtgacctggagaagtgtcaccgagctcccatcttcatgcgggtgcccttccttgagttcaaagccccagggattccctcagggatggagactctgaaagacacaccggccccacgactcctgaagacacacctgcccctggctctgctcccccagactctgttggatcagaaggtcaaggtgaggcagggcacagtgtttcacatccataatcccagcactttgggaggctgaggcaggcagatcacctgaggttgggagtttgagagcaccctgagcaacatagaagaaccttgtctctactaaaaatacaaaattagccgggtgtggtggcgggtgcctgtaatcccagctactccgaagcctgagacaggagaatcacttgaacccgggagaaggaggttgtggtgagccagagatcccaccattgcattccagcctgagcaacaagagcaaaactcacaaaaataaataaataaataaatatataaataaaaataaaactgtggcacctgtggtggctcactgctgtaatgccagcactttgggaggccaaattgggtggatcacttgagctcaggagttacagaccagcccgggaaacatggggagtctccatctctataaaaatgcaaaatatcag

SEQ ID NO: 53166 - DNA, 1707 bp, Homo sapiens
cagcgcagtagctgctggaggctggcgaggcccggaggcggtgcaggaagcctccgaccacgcgggctcctgatcgcgggcgcccacagcgcggacatggcgggctggtggccggcgttgtcgcgcacggcccggcgccacccgtggcccaccaacgtgctgctctacgttgctcgagcaacgtagctctacgctctacgagcgtgccgtagctcgctcgtctccgccggggacgtgctgcagcaacggctgcagggccgctaggccgactggcgccagacgcggcgcgtggccacgttggtggtgaccttccacgccaacttcaactacgtgtggctgggcctgctggagcgcgcgctcccgggccgagcgccgcgcgccatgctggccaagttgctgtgcgaccaggtggtcggtgcgcccatcgcggtctcggccttctacgccggtatgagcattctccagggaaaggatgacatatttttggacctgaaacagaaattctggaacacctatatgcaaactcagtcgtggctttggagatcactttaagcttgtctccagctggcacactaaggagggtaatggagaagctcccccacccccaaccccaccccttccttccggaagcaaatctaagtccagccccggctccagatccctcccacagtggacctaggaaaccctcagctcagagaacaaccctgcattccccacacaacacccacaatcagccactgcgggcgaggagggcacgaggccaggttcccaagagctcaggaacatggagctgatccaggacacctcccgcccgccactggagtacgtgaagggggtcccgctcatcaagtactttgcagaggcactggggcccctgcagagcttccaggcccggcctgatgacctgctcatcagcacctaccccaagtccggcactacctgggtaagccagattctggacatgatctaccagggtggtgacctggagaagtgtcaccgagctcccatcttcatgcgggtgcccttccttgagttcaaagccccagggattccctcaggtgtgtgagtgtgtcctgggtgcaaggggagtggaggaagacaggggctggggcttcagctcaccagaccttccctgacccactgctcggatggagactctgaaagacacaccggccccacgactcctgaagacacacctgcccctggctctgctcccccagactctgttggatcagaaggtcaaggtgaggcagggcacagtgtttcacatccataatcccagcactttgggaggctgaggcaggcagatcacctgaggttgggagtttgagagcaccctgagcaacatagaagaaccttgtctctactaaaaatacaaaattagccgggtgtggtggcgggtgcctgtaatcccagctactccgaagcctgagacaggagaatcacttgaacccgggagaaggaggttgtggtgagccagagatcccaccattgcattccagcctgagcaacaagagcaaaactcacaaaaataaataaataaataaatatataaataaaaataaaactgtggcacctgtggtggctcactgctgtaatgccagcactttgggaggccaaattgggtggatcacttgagctcaggagttacagaccagcccgggaaacatggggagtctccatctctataaaaatgcaaaatatcag

SEQ ID NO: 53167 - DNA, 4371 bp, Homo sapiens
ctgcaacctccgcctcccgggttcaagaagtttccctaccttaggctcctgagtagctgggactacaggattacagtttaaagacaatttctgtgatcaagttgtcatttggaagattaaacccatttcacgaggacttggagcctggtccttgctttgaggaagcagtggcttgtttcaagaagccacttctgatctaagaatctacccagcatgcctaatcaaggagaagactgctatttttttttctattccacatgtaccaaaggcgacagctgcccattccgtcactgtgaagctgcaataggaaatgaaactgtttgcacattatggcaagaagggcgctgttttcgacaggtgtgcaggtttcggcacatggagattgataaaaaacgcagtgaaattccttgttattgggaaaatcagccaacaggatgtcaaaaattaaactgcgctttccatcacaatagaggacgatatgttgatggccttttcctacctccgagcaaaactgtgttgcccactgtgcctgagtcaccagaagaggaagtgaaggctagccaactttcagttcagcagaacaaattgtctgtccagtccaatccttcccctcagctgcggagcgttatgaaagtagaaagttccgaaaatgttcctagccccacgcatccaccagttgtaattaatgctgcagatgatgatgaagatgatgatgatcagttttctgaggaaggtgatgaaaccaaaacacctaccctgcaaccaactcctgaagttcacaatggattacgagtgacttctgtccggaaacctgcagtcaatataaagcaaggtgaatgtttgaattttggaataaaaactcttgaggaaattaagtcaaagaaaatgaaggaaaaatctaagaagcaaggtgagggttcttcaggagtttccagtcttttactccaccctgagcccgttccaggtcctgaaaaagaaaatgtcaggactgtggtgaggacagtaactctctccaccaaacaaggagaagaacccttggttagattgagtcttactgagagactggggaaacgaaaattttcagcaggcggtgacagtgatcctccattaaagcgtagcctggcacagaggctagggaagaaagttgaagctccagaaactaacattgacaaaacaccaaagaaagctcaagtttccaagtctcttaaggagcgattaggcatgtcagctgatccagataatgaggatgcaacagataaagttaataaagttggtgagatccatgtgaagacattagaagaaattcttcttgaaagagccagtcagaaacgtggagaattgcaaactaaactcaagacagaaggaccttcaaaaactgatgattctacttcaggagcaagaagctcctccactatccgtatcaaaaccttctctgaggtcctggctgaaaaaaaacatcggcagcaggaagcagagagacaaaaaagcaaaaaggatacaacttgcatcaagctaaagattgatagtgaaattaaaaaaacagtagttttgccacccattgttgccagcagaggacaatcagaggagcctgcaggtaaaacaaagtctatgcaggaggtgcacatcaagacgctggaagaaattaaactggagaaggcactgagggtgcagcagagctctgagagcagcaccagctccccgtctcaacacgaggccactccaggggcaaggcggctgctgcgaatcaccaaaagaacagggatgaaagaagagaagaaccttcaggaaggaaatgaagttgattctcagagcagtattagaacagaagctaaagaggcttcaggtgagaccacaggagttgacatcactaaaattcaagtcaagagatgtgagaccatgagagagaagcacatgcagaaacagcaggagagggaaaaatcagtcttgacacctcttcggggagatgtagcctcttgcaatacccaagtggcagagaaaccagtgctcactgctgtgccaggaatcacacggcacctgaccaagcggcttcccacaaagtcatcccagaaggtggaggtagaaacctcagggattggagactcattattgaatgtgaaatgtgcagcacagaccttggaaaaaaggggtaaagctaaacccaaagtgaacgtgaagccatctgtggttaaagttgtgtcatcccccaaattggccccaaaacgtaaggcagtggagatgcacgctgctgtcattgccgctgtgaagccactcagctccagcagtgtcctacaggaacccccagccaaaaaggcagctgtggctgttgtcccgcttgtctctgaggacaaatcagtcactgtgcctgaagcagaaaatcctagagacagtcttgtgctgcctccaacccagtcctcttcagattcctcacccccggaggtgtctggcccttcctcatcccaaatgagcatgaaaactcgccgactcagctctgcctcaacaggaaagcccccactctctgtggaggatgattttgagaaactaatatgggagatttcaggaggcaaattggaagctgagattgacctggatcctgggaaagatgaagatgaccttctgcttgagctatcagaaatgattgatagctgaaggtggtagtgaggacactttaaaaaaaaaatcgccaaaaaactggacttagtttcatctattgtaacatttacctgagatgatcatttctttagtctagaatttgccccaaatcagaagtatacctctgaattatctgtatgtgtcctggattccttggggtcagatttttaaagttactttataaccattttgtccatttgatgccattgtttatcatcttttgagaaaaaagttctgtcatacccttctctccacaaaaaagagactgagagggagatcaagtgaaagggtgcaagcgaacttagtgactccttgaggtgtttgtcagttttggcttttttcttctttgttgtattctttatgtattgtcttgatgtacttaatattacctgagtttgaaatggatgaagacagctgctaccattaaggaccaaattttatgctaccactaaacaaaaatacccactcagtctgtgttaaattgtatgtctttttaaaggtatttaaagattcaactaagctttaaagagggctgagcagctcaggaagcctgtaatgtgggcataactctttggacctgatcttgatgcttctgctgctctgttagcctctgaagagcaatatctaatttattattactgtaattttttaaaaggctttaaagtgcctcaggggtcccctgaaactaattttctatttctgggattccctggattcattatatgagatggtgacatgattagaggaattcttttttagtatgaaaattgtcccttttcttcttcagtacttgcctccttgctggcattgaattaacacagggacaaaatttggttaattttttatttctaactctcccaacaaacccctgttgcccagtatttgtttggtggcctttaaccacctgagggaaaaaatgagcttattcaagctgccaatatttatctatgggctgtagcagtacactgaattgtactgtgccagggatattgagatgctctgggggtgtattgtatacctgccagttttcttcatttctgaattgagttttcttttcttgatgttggtttccttcatatcacctcaaggtttagatttgtgaaggaataagcatgatggaaataatagtcttgaaaggagatatgttgtatataatcaggaggaagaggaaggaaggacttacccattttgatattttgctgtaggtggccagttttgtttctcatagggaaatctgacccacctgtcatgttggctcctaaggaactgctgttgtaagcggctcatcaagagttgaacttcacgtagccttgttgggaatatggaaaaggaagaaagccacaggactgcccattcagtcttgggaagattgggatgattctgcacaagcaaaaatgactgaagtttatgtatagacacacctctaccaatccatcttcagctgactgaatgttgtatgatagcccttctccaaagcagaggtagaatgttcaggtttcaccatggattttctacttatttcgtttttggaatcaccttacagattccaggtcccttttgtatatattctttattcttttgcttttttaaaaaataattttgtttcatatttaaagcacttgtattagtcaatgtttcgtgttccgcattatttgaaccatttgcccttacagaaagagaaatacttgtttgtgttttaaataaaactgatgtaggaaagtc

SEQ ID NO: 53168 - DNA, 279 bp, Homo sapiens
gcggccgactactactactactactgctcgaattcaagcttctaacgatgtacggggacatggattttctacttatttcgtttttggaatcaccttacagattccaggtcccttttgtatatattctttattcttttgcttttttaaaaaataattttgtttcatatttaaagcacttgtattagtcaatgtttcgtgttccgcattatttgaaccatttgcccttacagaaagagaaatacttgtttgtgttttaaataaaactgatgtaggaaagtc

SEQ ID NO: 53169 - DNA, 757 bp, Homo sapiens
tgtagccaggcgccatctttgacgctggcagtcttggttttctgctagtgctgctgctgctgggaggacgacggacggcagcggccaagcaagaagaaagacgtggcagcaagcgggagtcggggatagtgtcatcggttcggtaaagtttctgttctctggactggtgaaaccgtaatgaagaacacccctaaactcccataatcggtgcggattcctatggggaaggcctatattgttgacatcttccaggccttggttctggaccttgagaaagaggctgtggaactagagatagcgatgctttttagggtaaatgtatgtaggtattgggggaaggggagggatcaatcgaaaaatggaagtggtttaaagttcatatttcactttttgctatctctatagcgtacaacttgtgagttacttacaggctgtaaaagcttctcaagtctaaaaatatctgaaaactaaacttgaattaactcttaatacaaacagtactttgaaaatgcagcatttaaccttgttttaaaatttttttctcaaagcatttttttccagccactcacattttaaaaggttgtattacttttagttagaactgaaagggctcaactagcatttgctgtgaccagtatgcggagtctgtgttggctttccagaattgactttttgggttgtattggcaaatcacagtcctaaatgatgaatgttgaatgatgcactatgtttttgtttaaatgagatttcctgaaaa

SEQ ID NO: 53170 - DNA, 6380 bp, Homo sapiens
gttttatatttggaaatttctaattgcctcctcatactggtcagctttataatttcaaattgttgagtgtgatagtgttaccctttagaattggatcttatataaaagggaaatattagaaaacaattaggaaaatatacttttagtctttgaaatgcctgttttaacctttataaaatattataaaaatagattgtgtaggtactttcaaataatttatgggtaaaaacagactaaaatgtttgcaagaattggaaaaggttgaatgggaattgtaatgagagccctttgaacatgcttggaaaaacccagtagacatttcccaaagattgtttctgtaattttaggtaatctttttaaaaacatacttaatgacccattatactgtattaactgtgcggttgttttggccactgaattcttaatgaaaactaagcagtcggtatttttatgtgttaggaatcattggtgaaatgagtgaattgatctcattttaagatccctttctactctgaaagtatgtttctgagattgagtaggaggccagaaaatgatgacttttagtaaaagtctattaaaagtttcagactgaataactaatgtgagatcccaatttttccttttttttcattttagatttggggatattccctgcccaaaaaattcctggaaaattgactagtattaagtgtgagtaaaaggtgtccacttttttttaagttttgattttagttttgtcttggatagtatttggcaagatttagcctagaaattatgtagtatttattacataagaatcaaaattgctttgttactgggctggtttcaaagtttagaactcatttctatgtatcaaaatcgggttttttttggttttgatttttttttttttaaattcttaaatggtaaatatgccattgtgaaatgaaatctcaactccaaaagtttacccttttactaactggagtaaatgtatacttacaaagtctttagctgtagccattagtagtaaagaatttggacctaggctgcgtaagcaagcctttccagggccactatttaatggcaaaccagtgatactggtgttgatacaaaataagaaataaattttcccttagataaagctttctgtgttttgacagtgccagtttagaatggctataatgctgctctgccttctacagcttgctgcaccactctgtagttactctattaccatacgtttctatcttttttggttaaacactccctgatgacgatgatggatatatatacatacatccatattatacataatgatatatgtgtaaggatttaccttcgtctttattttgtgggctgggcaaaatttagtgtaacaataacttcatgatactttggtataagagtaagttctttatttttataatgaacccaaatctaaagtcttttatagtgcattttaaaaggggaaacttatccaaatgttatatttctatacatttttgtgtatatgtgtgtgtgtataagccagttagtatatatctgtatgtatattatatacataaaacactatatttttacatacaagtatgcttttattatacagataataaagatgggggaaggtttctgtttttttcttaataggtgaagaaatcttgaagaccagaaattggatcttactgaaaaactgatgtttttttgttttttttttaaattatattgttcagctatggaagatggatttttttttcatgatcctttaactctcaagttcatctttaaatgaactctttttttttgtttttttttggttttgttttgttttgtttttgaggagataactaaccctagctgtctccagtctgacaaaggttatttgaatggacttaatctcccagtagttgggagatgttttaaaaacacatgctgtgtttgaattgtggctgagaggttttcttggcaatgtgaggaggaaatttttttctgcctcattattattaattcatggattgagtgttggttcgacctacaggcgtaatagattggaactcagtgaagacacagatgttcctgttcagagcaaccagctaatgattacagtttaaagacaatttctgtgatcaagttgtcatttggaagattaaacccatttcacgaggacttggagcctggtccttgctttgaggaagcagtggcttgtttcaagaagccacttctgatctaagaatctacccagcatgcctaatcaaggagaagactgctatttttttttctattccacatgtaccaaaggcgacagctgcccattccgtcactgtgaagctgcaataggaaatgaaactgtttgcacattatggcaagaagggcgctgttttcgacaggtgtgcaggtttcggcacatggagattgataaaaaacgcagtgaaattccttgttattgggaaaatcagccaacaggatgtcaaaaattaaactgcgctttccatcacaatagaggacgatatgttgatggccttttcctacctccgagcaaaactgtgttgcccactgtgcctgagtcaccagaagaggaagtgaaggctagccaactttcagttcagcagaacaaattgtctgtccagtccaatccttcccctcagctgcggagcgttatgaaagtagaaagttccgaaaatgttcctagccccacgcatccaccagttgtaattaatgctgcagatgatgatgaagatgatgatgatcagttttctgaggaaggtgatgaaaccaaaacacctaccctgcaaccaactcctgaagttcacaatggattacgagtgacttctgtccggaaacctgcagtcaatataaagcaaggtgaatgtttgaattttggaataaaaactcttgaggaaattaagtcaaagaaaatgaaggaaaaatctaagaagcaaggtgagggttcttcaggagtttccagtcttttactccaccctgagcccgttccaggtcctgaaaaagaaaatgtcaggactgtggtgaggacagtaactctctccaccaaacaaggagaagaacccttggttagattgagtcttactgagagactggggaaacgaaaattttcagcaggcggtgacagtgatcctccattaaagcgtagcctggcacagaggctagggaagaaagttgaagctccagaaactaacattgacaaaacaccaaagaaagctcaagtttccaagtctcttaaggagcgattaggcatgtcagctgatccagataatgaggatgcaacagataaagttaataaagttggtgagatccatgtgaagacattagaagaaattcttcttgaaagagccagtcagaaacgtggagaattgcaaactaaactcaagacagaaggaccttcaaaaactgatgattctacttcaggagcaagaagctcctccactatccgtatcaaaaccttctctgaggtcctggctgaaaaaaaacatcggcagcaggaagcagagagacaaaaaagcaaaaaggatacaacttgcatcaagctaaagattgatagtgaaattaaaaaaacagtagttttgccacccattgttgccagcagaggacaatcagaggagcctgcaggtaaaacaaagtctatgcaggaggtgcacatcaagacgctggaagaaattaaactggagaaggcactgagggtgcagcagagctctgagagcagcaccagctccccgtctcaacacgaggccactccaggggcaaggcggctgctgcgaatcaccaaaagaacagggatgaaagaagagaagaaccttcaggaaggaaatgaagttgattctcagagcagtattagaacagaagctaaagaggcttcaggtgagaccacaggagttgacatcactaaaattcaagtcaagagatgtgagaccatgagagagaagcacatgcagaaacagcaggagagggaaaaatcagtcttgacacctcttcggggagatgtagcctcttgcaatacccaagtggcagagaaaccagtgctcactgctgtgccaggaatcacacggcacctgaccaagcggcttcccacaaagtcatcccagaaggtggaggtagaaacctcagggattggagactcattattgaatgtgaaatgtgcagcacagaccttggaaaaaaggggtaaagctaaacccaaagtgaacgtgaagccatctgtggttaaagttgtgtcatcccccaaattggccccaaaacgtaaggcagtggagatgcacgctgctgtcattgccgctgtgaagccactcagctccagcagtgtcctacaggaacccccagccaaaaaggcagctgtggctgttgtcccgcttgtctctgaggacaaatcagtcactgtgcctgaagcagaaaatcctagagacagtcttgtgctgcctccaacccagtcctcttcagattcctcacccccggaggtgtctggcccttcctcatcccaaatgagcatgaaaactcgccgactcagctctgcctcaacaggaaagcccccactctctgtggaggatgattttgagaaactaatatgggagatttcaggaggcaaattggaagctgagattgacctggatcctgggaaagatgaagatgaccttctgcttgagctatcagaaatgattgatagctgaaggtggtagtgaggacactttaaaaaaaaaatcgccaaaaaactggacttagtttcatctattgtaacatttacctgagatgatcatttctttagtctagaatttgccccaaatcagaagtatacctctgaattatctgtatgtgtcctggattccttggggtcagatttttaaagttactttataaccattttgtccatttgatgccattgtttatcatcttttgagaaaaaagttctgtcatacccttctctccacaaaaaagagactgagagggagatcaagtgaaagggtgcaagcgaacttagtgactccttgaggtgtttgtcagttttggcttttttcttctttgttgtattctttatgtattgtcttgatgtacttaatattacctgagtttgaaatggatgaagacagctgctaccattaaggaccaaattttatgctaccactaaacaaaaatacccactcagtctgtgttaaattgtatgtctttttaaaggtatttaaagattcaactaagctttaaagagggctgagcagctcaggaagcctgtaatgtgggcataactctttggacctgatcttgatgcttctgctgctctgttagcctctgaagagcaatatctaatttattattactgtaattttttaaaaggctttaaagtgcctcaggggtcccctgaaactaattttctatttctgggattccctggattcattatatgagatggtgacatgattagaggaattcttttttagtatgaaaattgtcccttttcttcttcagtacttgcctccttgctggcattgaattaacacagggacaaaatttggttaattttttatttctaactctcccaacaaacccctgttgcccagtatttgtttggtggcctttaaccacctgagggaaaaaatgagcttattcaagctgccaatatttatctatgggctgtagcagtacactgaattgtactgtgccagggatattgagatgctctgggggtgtattgtatacctgccagttttcttcatttctgaattgagttttcttttcttgatgttggtttccttcatatcacctcaaggtttagatttgtgaaggaataagcatgatggaaataatagtcttgaaaggagatatgttgtatataatcaggaggaagaggaaggaaggacttacccattttgatattttgctgtaggtggccagttttgtttctcatagggaaatctgacccacctgtcatgttggctcctaaggaactgctgttgtaagcggctcatcaagagttgaacttcacgtagccttgttgggaatatggaaaaggaagaaagccacaggactgcccattcagtcttgggaagattgggatgattctgcacaagcaaaaatgactgaagtttatgtatagacacacctctaccaatccatcttcagctgactgaatgttgtatgatagcccttctccaaagcagaggtagaatgttcaggtttcaccatggattttctacttatttcgtttttggaatcaccttacagattccaggtcccttttgtatatattctttattcttttgcttttttaaaaaataattttgtttcatatttaaagcacttgtattagtcaatgtttcgtgttccgcattatttgaaccatttgcccttacagaaagagaaatacttgtttgtgttttaaataaaactgatgtaggaaagtc

SEQ ID NO: 53171 - DNA, 6214 bp, Homo sapiens
tgtagccaggcgccatctttgacgctggcagtcttggttttctgctagtgctgctgctgctgggaggacgacggacggcagcggccaagcaagaagaaagacgtggcagcaagcgggagtcggggatagtgtcatcggttcggtaaagtttctgttctctgggtcccggtactttggagcttgtctcaaactccacatacagaaagccaccgaccttattccggtatcctacacccattccccactctcattacactcccacccctggccctcagcgtcggagtcaagagcaacagggacacttccgttctccttgtaggactggtgaaaccgtaatgaagaacacccctaaactcccataatcggtgcggattcctatggggaaggcctatattgttgacatcttccaggccttggttctggaccttgagaaagaggctgtggaactagagatagcgatgctttttaggatttggggatattccctgcccaaaaaattcctggaaaattgactagtattaagtgtgagtaaaaggtgtccacttttttttaagttttgattttagttttgtcttggatagtatttggcaagatttagcctagaaattatgtagtatttattacataagaatcaaaattgctttgttactgggctggtttcaaagtttagaactcatttctatgtatcaaaatcgggttttttttggttttgatttttttttttttaaattcttaaatggtaaatatgccattgtgaaatgaaatctcaactccaaaagtttacccttttactaactggagtaaatgtatacttacaaagtctttagctgtagccattagtagtaaagaatttggacctaggctgcgtaagcaagcctttccagggccactatttaatggcaaaccagtgatactggtgttgatacaaaataagaaataaattttcccttagataaagctttctgtgttttgacagtgccagtttagaatggctataatgctgctctgccttctacagcttgctgcaccactctgtagttactctattaccatacgtttctatcttttttggttaaacactccctgatgacgatgatggatatatatacatacatccatattatacataatgatatatgtgtaaggatttaccttcgtctttattttgtgggctgggcaaaatttagtgtaacaataacttcatgatactttggtataagagtaagttctttatttttataatgaacccaaatctaaagtcttttatagtgcattttaaaaggggaaacttatccaaatgttatatttctatacatttttgtgtatatgtgtgtgtgtataagccagttagtatatatctgtatgtatattatatacataaaacactatatttttacatacaagtatgcttttattatacagataataaagatgggggaaggtttctgtttttttcttaataggtgaagaaatcttgaagaccagaaattggatcttactgaaaaactgatgtttttttgttttttttttaaattatattgttcagctatggaagatggatttttttttcatgatcctttaactctcaagttcatctttaaatgaactctttttttttgtttttttttggttttgttttgttttgtttttgaggagataactaaccctagctgtctccagtctgacaaaggttatttgaatggacttaatctcccagtagttgggagatgttttaaaaacacatgctgtgtttgaattgtggctgagaggttttcttggcaatgtgaggaggaaatttttttctgcctcattattattaattcatggattgagtgttggttcgacctacaggcgtaatagattggaactcagtgaagacacagatgttcctgttcagagcaaccagctaatgattacagtttaaagacaatttctgtgatcaagttgtcatttggaagattaaacccatttcacgaggacttggagcctggtccttgctttgaggaagcagtggcttgtttcaagaagccacttctgatctaagaatctacccagcatgcctaatcaaggagaagactgctatttttttttctattccacatgtaccaaaggcgacagctgcccattccgtcactgtgaagctgcaataggaaatgaaactgtttgcacattatggcaagaagggcgctgttttcgacaggtgtgcaggtttcggcacatggagattgataaaaaacgcagtgaaattccttgttattgggaaaatcagccaacaggatgtcaaaaattaaactgcgctttccatcacaatagaggacgatatgttgatggccttttcctacctccgagcaaaactgtgttgcccactgtgcctgagtcaccagaagaggaagtgaaggctagccaactttcagttcagcagaacaaattgtctgtccagtccaatccttcccctcagctgcggagcgttatgaaagtagaaagttccgaaaatgttcctagccccacgcatccaccagttgtaattaatgctgcagatgatgatgaagatgatgatgatcagttttctgaggaaggtgatgaaaccaaaacacctaccctgcaaccaactcctgaagttcacaatggattacgagtgacttctgtccggaaacctgcagtcaatataaagcaaggtgaatgtttgaattttggaataaaaactcttgaggaaattaagtcaaagaaaatgaaggaaaaatctaagaagcaaggtgagggttcttcaggagtttccagtcttttactccaccctgagcccgttccaggtcctgaaaaagaaaatgtcaggactgtggtgaggacagtaactctctccaccaaacaaggagaagaacccttggttagattgagtcttactgagagactggggaaacgaaaattttcagcaggcggtgacagtgatcctccattaaagcgtagcctggcacagaggctagggaagaaagttgaagctccagaaactaacattgacaaaacaccaaagaaagctcaagtttccaagtctcttaaggagcgattaggcatgtcagctgatccagataatgaggatgcaacagataaagttaataaagttggtgagatccatgtgaagacattagaagaaattcttcttgaaagagccagtcagaaacgtggagaattgcaaactaaactcaagacagaaggaccttcaaaaactgatgattctacttcaggagcaagaagctcctccactatccgtatcaaaaccttctctgaggtcctggctgaaaaaaaacatcggcagcaggaagcagagagacaaaaaagcaaaaaggatacaacttgcatcaagctaaagattgatagtgaaattaaaaaaacagtagttttgccacccattgttgccagcagaggacaatcagaggagcctgcaggtaaaacaaagtctatgcaggaggtgcacatcaagacgctggaagaaattaaactggagaaggcactgagggtgcagcagagctctgagagcagcaccagctccccgtctcaacacgaggccactccaggggcaaggcggctgctgcgaatcaccaaaagaacagggatgaaagaagagaagaaccttcaggaaggaaatgaagttgattctcagagcagtattagaacagaagctaaagaggcttcaggtgagaccacaggagttgacatcactaaaattcaagtcaagagatgtgagaccatgagagagaagcacatgcagaaacagcaggagagggaaaaatcagtcttgacacctcttcggggagatgtagcctcttgcaatacccaagtggcagagaaaccagtgctcactgctgtgccaggaatcacacggcacctgaccaagcggcttcccacaaagtcatcccagaaggtggaggtagaaacctcagggattggagactcattattgaatgtgaaatgtgcagcacagaccttggaaaaaaggggtaaagctaaacccaaagtgaacgtgaagccatctgtggttaaagttgtgtcatcccccaaattggccccaaaacgtaaggcagtggagatgcacgctgctgtcattgccgctgtgaagccactcagctccagcagtgtcctacaggaacccccagccaaaaaggcagctgtggctgttgtcccgcttgtctctgaggacaaatcagtcactgtgcctgaagcagaaaatcctagagacagtcttgtgctgcctccaacccagtcctcttcagattcctcacccccggaggtgtctggcccttcctcatcccaaatgagcatgaaaactcgccgactcagctctgcctcaacaggaaagcccccactctctgtggaggatgattttgagaaactaatatgggagatttcaggaggcaaattggaagctgagattgacctggatcctgggaaagatgaagatgaccttctgcttgagctatcagaaatgattgatagctgaaggtggtagtgaggacactttaaaaaaaaaatcgccaaaaaactggacttagtttcatctattgtaacatttacctgagatgatcatttctttagtctagaatttgccccaaatcagaagtatacctctgaattatctgtatgtgtcctggattccttggggtcagatttttaaagttactttataaccattttgtccatttgatgccattgtttatcatcttttgagaaaaaagttctgtcatacccttctctccacaaaaaagagactgagagggagatcaagtgaaagggtgcaagcgaacttagtgactccttgaggtgtttgtcagttttggcttttttcttctttgttgtattctttatgtattgtcttgatgtacttaatattacctgagtttgaaatggatgaagacagctgctaccattaaggaccaaattttatgctaccactaaacaaaaatacccactcagtctgtgttaaattgtatgtctttttaaaggtatttaaagattcaactaagctttaaagagggctgagcagctcaggaagcctgtaatgtgggcataactctttggacctgatcttgatgcttctgctgctctgttagcctctgaagagcaatatctaatttattattactgtaattttttaaaaggctttaaagtgcctcaggggtcccctgaaactaattttctatttctgggattccctggattcattatatgagatggtgacatgattagaggaattcttttttagtatgaaaattgtcccttttcttcttcagtacttgcctccttgctggcattgaattaacacagggacaaaatttggttaattttttatttctaactctcccaacaaacccctgttgcccagtatttgtttggtggcctttaaccacctgagggaaaaaatgagcttattcaagctgccaatatttatctatgggctgtagcagtacactgaattgtactgtgccagggatattgagatgctctgggggtgtattgtatacctgccagttttcttcatttctgaattgagttttcttttcttgatgttggtttccttcatatcacctcaaggtttagatttgtgaaggaataagcatgatggaaataatagtcttgaaaggagatatgttgtatataatcaggaggaagaggaaggaaggacttacccattttgatattttgctgtaggtggccagttttgtttctcatagggaaatctgacccacctgtcatgttggctcctaaggaactgctgttgtaagcggctcatcaagagttgaacttcacgtagccttgttgggaatatggaaaaggaagaaagccacaggactgcccattcagtcttgggaagattgggatgattctgcacaagcaaaaatgactgaagtttatgtatagacacacctctaccaatccatcttcagctgactgaatgttgtatgatagcccttctccaaagcagaggtagaatgttcaggtttcaccatggattttctacttatttcgtttttggaatcaccttacagattccaggtcccttttgtatatattctttattcttttgcttttttaaaaaataattttgtttcatatttaaagcacttgtattagtcaatgtttcgtgttccgcattatttgaaccatttgcccttacagaaagagaaatacttgtttgtgttttaaataaaactgatgtaggaaagtc

SEQ ID NO: 53172 - DNA, 6090 bp, Homo sapiens
tgtagccaggcgccatctttgacgctggcagtcttggttttctgctagtgctgctgctgctgggaggacgacggacggcagcggccaagcaagaagaaagacgtggcagcaagcgggagtcggggatagtgtcatcggttcgggtcccggtactttggagcttgtctcaaactccacatacagaaagccaccgaccttattccggtatcctacacccattccccactctcattacactcccacccctggccctcagcgtcggagtcaagagcaacagggacacttccgttctccttgtaggactggtgaaaccgtaatgaagaacacccctaaactcccataatcgatttggggatattccctgcccaaaaaattcctggaaaattgactagtattaagtgtgagtaaaaggtgtccacttttttttaagttttgattttagttttgtcttggatagtatttggcaagatttagcctagaaattatgtagtatttattacataagaatcaaaattgctttgttactgggctggtttcaaagtttagaactcatttctatgtatcaaaatcgggttttttttggttttgatttttttttttttaaattcttaaatggtaaatatgccattgtgaaatgaaatctcaactccaaaagtttacccttttactaactggagtaaatgtatacttacaaagtctttagctgtagccattagtagtaaagaatttggacctaggctgcgtaagcaagcctttccagggccactatttaatggcaaaccagtgatactggtgttgatacaaaataagaaataaattttcccttagataaagctttctgtgttttgacagtgccagtttagaatggctataatgctgctctgccttctacagcttgctgcaccactctgtagttactctattaccatacgtttctatcttttttggttaaacactccctgatgacgatgatggatatatatacatacatccatattatacataatgatatatgtgtaaggatttaccttcgtctttattttgtgggctgggcaaaatttagtgtaacaataacttcatgatactttggtataagagtaagttctttatttttataatgaacccaaatctaaagtcttttatagtgcattttaaaaggggaaacttatccaaatgttatatttctatacatttttgtgtatatgtgtgtgtgtataagccagttagtatatatctgtatgtatattatatacataaaacactatatttttacatacaagtatgcttttattatacagataataaagatgggggaaggtttctgtttttttcttaataggtgaagaaatcttgaagaccagaaattggatcttactgaaaaactgatgtttttttgttttttttttaaattatattgttcagctatggaagatggatttttttttcatgatcctttaactctcaagttcatctttaaatgaactctttttttttgtttttttttggttttgttttgttttgtttttgaggagataactaaccctagctgtctccagtctgacaaaggttatttgaatggacttaatctcccagtagttgggagatgttttaaaaacacatgctgtgtttgaattgtggctgagaggttttcttggcaatgtgaggaggaaatttttttctgcctcattattattaattcatggattgagtgttggttcgacctacaggcgtaatagattggaactcagtgaagacacagatgttcctgttcagagcaaccagctaatgattacagtttaaagacaatttctgtgatcaagttgtcatttggaagattaaacccatttcacgaggacttggagcctggtccttgctttgaggaagcagtggcttgtttcaagaagccacttctgatctaagaatctacccagcatgcctaatcaaggagaagactgctatttttttttctattccacatgtaccaaaggcgacagctgcccattccgtcactgtgaagctgcaataggaaatgaaactgtttgcacattatggcaagaagggcgctgttttcgacaggtgtgcaggtttcggcacatggagattgataaaaaacgcagtgaaattccttgttattgggaaaatcagccaacaggatgtcaaaaattaaactgcgctttccatcacaatagaggacgatatgttgatggccttttcctacctccgagcaaaactgtgttgcccactgtgcctgagtcaccagaagaggaagtgaaggctagccaactttcagttcagcagaacaaattgtctgtccagtccaatccttcccctcagctgcggagcgttatgaaagtagaaagttccgaaaatgttcctagccccacgcatccaccagttgtaattaatgctgcagatgatgatgaagatgatgatgatcagttttctgaggaaggtgatgaaaccaaaacacctaccctgcaaccaactcctgaagttcacaatggattacgagtgacttctgtccggaaacctgcagtcaatataaagcaaggtgaatgtttgaattttggaataaaaactcttgaggaaattaagtcaaagaaaatgaaggaaaaatctaagaagcaaggtgagggttcttcaggagtttccagtcttttactccaccctgagcccgttccaggtcctgaaaaagaaaatgtcaggactgtggtgaggacagtaactctctccaccaaacaaggagaagaacccttggttagattgagtcttactgagagactggggaaacgaaaattttcagcaggcggtgacagtgatcctccattaaagcgtagcctggcacagaggctagggaagaaagttgaagctccagaaactaacattgacaaaacaccaaagaaagctcaagtttccaagtctcttaaggagcgattaggcatgtcagctgatccagataatgaggatgcaacagataaagttaataaagttggtgagatccatgtgaagacattagaagaaattcttcttgaaagagccagtcagaaacgtggagaattgcaaactaaactcaagacagaaggaccttcaaaaactgatgattctacttcaggagcaagaagctcctccactatccgtatcaaaaccttctctgaggtcctggctgaaaaaaaacatcggcagcaggaagcagagagacaaaaaagcaaaaaggatacaacttgcatcaagctaaagattgatagtgaaattaaaaaaacagtagttttgccacccattgttgccagcagaggacaatcagaggagcctgcaggtaaaacaaagtctatgcaggaggtgcacatcaagacgctggaagaaattaaactggagaaggcactgagggtgcagcagagctctgagagcagcaccagctccccgtctcaacacgaggccactccaggggcaaggcggctgctgcgaatcaccaaaagaacagggatgaaagaagagaagaaccttcaggaaggaaatgaagttgattctcagagcagtattagaacagaagctaaagaggcttcaggtgagaccacaggagttgacatcactaaaattcaagtcaagagatgtgagaccatgagagagaagcacatgcagaaacagcaggagagggaaaaatcagtcttgacacctcttcggggagatgtagcctcttgcaatacccaagtggcagagaaaccagtgctcactgctgtgccaggaatcacacggcacctgaccaagcggcttcccacaaagtcatcccagaaggtggaggtagaaacctcagggattggagactcattattgaatgtgaaatgtgcagcacagaccttggaaaaaaggggtaaagctaaacccaaagtgaacgtgaagccatctgtggttaaagttgtgtcatcccccaaattggccccaaaacgtaaggcagtggagatgcacgctgctgtcattgccgctgtgaagccactcagctccagcagtgtcctacaggaacccccagccaaaaaggcagctgtggctgttgtcccgcttgtctctgaggacaaatcagtcactgtgcctgaagcagaaaatcctagagacagtcttgtgctgcctccaacccagtcctcttcagattcctcacccccggaggtgtctggcccttcctcatcccaaatgagcatgaaaactcgccgactcagctctgcctcaacaggaaagcccccactctctgtggaggatgattttgagaaactaatatgggagatttcaggaggcaaattggaagctgagattgacctggatcctgggaaagatgaagatgaccttctgcttgagctatcagaaatgattgatagctgaaggtggtagtgaggacactttaaaaaaaaaatcgccaaaaaactggacttagtttcatctattgtaacatttacctgagatgatcatttctttagtctagaatttgccccaaatcagaagtatacctctgaattatctgtatgtgtcctggattccttggggtcagatttttaaagttactttataaccattttgtccatttgatgccattgtttatcatcttttgagaaaaaagttctgtcatacccttctctccacaaaaaagagactgagagggagatcaagtgaaagggtgcaagcgaacttagtgactccttgaggtgtttgtcagttttggcttttttcttctttgttgtattctttatgtattgtcttgatgtacttaatattacctgagtttgaaatggatgaagacagctgctaccattaaggaccaaattttatgctaccactaaacaaaaatacccactcagtctgtgttaaattgtatgtctttttaaaggtatttaaagattcaactaagctttaaagagggctgagcagctcaggaagcctgtaatgtgggcataactctttggacctgatcttgatgcttctgctgctctgttagcctctgaagagcaatatctaatttattattactgtaattttttaaaaggctttaaagtgcctcaggggtcccctgaaactaattttctatttctgggattccctggattcattatatgagatggtgacatgattagaggaattcttttttagtatgaaaattgtcccttttcttcttcagtacttgcctccttgctggcattgaattaacacagggacaaaatttggttaattttttatttctaactctcccaacaaacccctgttgcccagtatttgtttggtggcctttaaccacctgagggaaaaaatgagcttattcaagctgccaatatttatctatgggctgtagcagtacactgaattgtactgtgccagggatattgagatgctctgggggtgtattgtatacctgccagttttcttcatttctgaattgagttttcttttcttgatgttggtttccttcatatcacctcaaggtttagatttgtgaaggaataagcatgatggaaataatagtcttgaaaggagatatgttgtatataatcaggaggaagaggaaggaaggacttacccattttgatattttgctgtaggtggccagttttgtttctcatagggaaatctgacccacctgtcatgttggctcctaaggaactgctgttgtaagcggctcatcaagagttgaacttcacgtagccttgttgggaatatggaaaaggaagaaagccacaggactgcccattcagtcttgggaagattgggatgattctgcacaagcaaaaatgactgaagtttatgtatagacacacctctaccaatccatcttcagctgactgaatgttgtatgatagcccttctccaaagcagaggtagaatgttcaggtttcaccatggattttctacttatttcgtttttggaatcaccttacagattccaggtcccttttgtatatattctttattcttttgcttttttaaaaaataattttgtttcatatttaaagcacttgtattagtcaatgtttcgtgttccgcattatttgaaccatttgcccttacagaaagagaaatacttgtttgtgttttaaataaaactgatgtaggaaagtc

SEQ ID NO: 53173 - DNA, 6109 bp, Homo sapiens
tgtagccaggcgccatctttgacgctggcagtcttggttttctgctagtgctgctgctgctgggaggacgacggacggcagcggccaagcaagaagaaagacgtggcagcaagcgggagtcggggatagtgtcatcggttcggtaaagtttctgttctctgggtcccggtactttggagcttgtctcaaactccacatacagaaagccaccgaccttattccggtatcctacacccattccccactctcattacactcccacccctggccctcagcgtcggagtcaagagcaacagggacacttccgttctccttgtaggactggtgaaaccgtaatgaagaacacccctaaactcccataatcgatttggggatattccctgcccaaaaaattcctggaaaattgactagtattaagtgtgagtaaaaggtgtccacttttttttaagttttgattttagttttgtcttggatagtatttggcaagatttagcctagaaattatgtagtatttattacataagaatcaaaattgctttgttactgggctggtttcaaagtttagaactcatttctatgtatcaaaatcgggttttttttggttttgatttttttttttttaaattcttaaatggtaaatatgccattgtgaaatgaaatctcaactccaaaagtttacccttttactaactggagtaaatgtatacttacaaagtctttagctgtagccattagtagtaaagaatttggacctaggctgcgtaagcaagcctttccagggccactatttaatggcaaaccagtgatactggtgttgatacaaaataagaaataaattttcccttagataaagctttctgtgttttgacagtgccagtttagaatggctataatgctgctctgccttctacagcttgctgcaccactctgtagttactctattaccatacgtttctatcttttttggttaaacactccctgatgacgatgatggatatatatacatacatccatattatacataatgatatatgtgtaaggatttaccttcgtctttattttgtgggctgggcaaaatttagtgtaacaataacttcatgatactttggtataagagtaagttctttatttttataatgaacccaaatctaaagtcttttatagtgcattttaaaaggggaaacttatccaaatgttatatttctatacatttttgtgtatatgtgtgtgtgtataagccagttagtatatatctgtatgtatattatatacataaaacactatatttttacatacaagtatgcttttattatacagataataaagatgggggaaggtttctgtttttttcttaataggtgaagaaatcttgaagaccagaaattggatcttactgaaaaactgatgtttttttgttttttttttaaattatattgttcagctatggaagatggatttttttttcatgatcctttaactctcaagttcatctttaaatgaactctttttttttgtttttttttggttttgttttgttttgtttttgaggagataactaaccctagctgtctccagtctgacaaaggttatttgaatggacttaatctcccagtagttgggagatgttttaaaaacacatgctgtgtttgaattgtggctgagaggttttcttggcaatgtgaggaggaaatttttttctgcctcattattattaattcatggattgagtgttggttcgacctacaggcgtaatagattggaactcagtgaagacacagatgttcctgttcagagcaaccagctaatgattacagtttaaagacaatttctgtgatcaagttgtcatttggaagattaaacccatttcacgaggacttggagcctggtccttgctttgaggaagcagtggcttgtttcaagaagccacttctgatctaagaatctacccagcatgcctaatcaaggagaagactgctatttttttttctattccacatgtaccaaaggcgacagctgcccattccgtcactgtgaagctgcaataggaaatgaaactgtttgcacattatggcaagaagggcgctgttttcgacaggtgtgcaggtttcggcacatggagattgataaaaaacgcagtgaaattccttgttattgggaaaatcagccaacaggatgtcaaaaattaaactgcgctttccatcacaatagaggacgatatgttgatggccttttcctacctccgagcaaaactgtgttgcccactgtgcctgagtcaccagaagaggaagtgaaggctagccaactttcagttcagcagaacaaattgtctgtccagtccaatccttcccctcagctgcggagcgttatgaaagtagaaagttccgaaaatgttcctagccccacgcatccaccagttgtaattaatgctgcagatgatgatgaagatgatgatgatcagttttctgaggaaggtgatgaaaccaaaacacctaccctgcaaccaactcctgaagttcacaatggattacgagtgacttctgtccggaaacctgcagtcaatataaagcaaggtgaatgtttgaattttggaataaaaactcttgaggaaattaagtcaaagaaaatgaaggaaaaatctaagaagcaaggtgagggttcttcaggagtttccagtcttttactccaccctgagcccgttccaggtcctgaaaaagaaaatgtcaggactgtggtgaggacagtaactctctccaccaaacaaggagaagaacccttggttagattgagtcttactgagagactggggaaacgaaaattttcagcaggcggtgacagtgatcctccattaaagcgtagcctggcacagaggctagggaagaaagttgaagctccagaaactaacattgacaaaacaccaaagaaagctcaagtttccaagtctcttaaggagcgattaggcatgtcagctgatccagataatgaggatgcaacagataaagttaataaagttggtgagatccatgtgaagacattagaagaaattcttcttgaaagagccagtcagaaacgtggagaattgcaaactaaactcaagacagaaggaccttcaaaaactgatgattctacttcaggagcaagaagctcctccactatccgtatcaaaaccttctctgaggtcctggctgaaaaaaaacatcggcagcaggaagcagagagacaaaaaagcaaaaaggatacaacttgcatcaagctaaagattgatagtgaaattaaaaaaacagtagttttgccacccattgttgccagcagaggacaatcagaggagcctgcaggtaaaacaaagtctatgcaggaggtgcacatcaagacgctggaagaaattaaactggagaaggcactgagggtgcagcagagctctgagagcagcaccagctccccgtctcaacacgaggccactccaggggcaaggcggctgctgcgaatcaccaaaagaacagggatgaaagaagagaagaaccttcaggaaggaaatgaagttgattctcagagcagtattagaacagaagctaaagaggcttcaggtgagaccacaggagttgacatcactaaaattcaagtcaagagatgtgagaccatgagagagaagcacatgcagaaacagcaggagagggaaaaatcagtcttgacacctcttcggggagatgtagcctcttgcaatacccaagtggcagagaaaccagtgctcactgctgtgccaggaatcacacggcacctgaccaagcggcttcccacaaagtcatcccagaaggtggaggtagaaacctcagggattggagactcattattgaatgtgaaatgtgcagcacagaccttggaaaaaaggggtaaagctaaacccaaagtgaacgtgaagccatctgtggttaaagttgtgtcatcccccaaattggccccaaaacgtaaggcagtggagatgcacgctgctgtcattgccgctgtgaagccactcagctccagcagtgtcctacaggaacccccagccaaaaaggcagctgtggctgttgtcccgcttgtctctgaggacaaatcagtcactgtgcctgaagcagaaaatcctagagacagtcttgtgctgcctccaacccagtcctcttcagattcctcacccccggaggtgtctggcccttcctcatcccaaatgagcatgaaaactcgccgactcagctctgcctcaacaggaaagcccccactctctgtggaggatgattttgagaaactaatatgggagatttcaggaggcaaattggaagctgagattgacctggatcctgggaaagatgaagatgaccttctgcttgagctatcagaaatgattgatagctgaaggtggtagtgaggacactttaaaaaaaaaatcgccaaaaaactggacttagtttcatctattgtaacatttacctgagatgatcatttctttagtctagaatttgccccaaatcagaagtatacctctgaattatctgtatgtgtcctggattccttggggtcagatttttaaagttactttataaccattttgtccatttgatgccattgtttatcatcttttgagaaaaaagttctgtcatacccttctctccacaaaaaagagactgagagggagatcaagtgaaagggtgcaagcgaacttagtgactccttgaggtgtttgtcagttttggcttttttcttctttgttgtattctttatgtattgtcttgatgtacttaatattacctgagtttgaaatggatgaagacagctgctaccattaaggaccaaattttatgctaccactaaacaaaaatacccactcagtctgtgttaaattgtatgtctttttaaaggtatttaaagattcaactaagctttaaagagggctgagcagctcaggaagcctgtaatgtgggcataactctttggacctgatcttgatgcttctgctgctctgttagcctctgaagagcaatatctaatttattattactgtaattttttaaaaggctttaaagtgcctcaggggtcccctgaaactaattttctatttctgggattccctggattcattatatgagatggtgacatgattagaggaattcttttttagtatgaaaattgtcccttttcttcttcagtacttgcctccttgctggcattgaattaacacagggacaaaatttggttaattttttatttctaactctcccaacaaacccctgttgcccagtatttgtttggtggcctttaaccacctgagggaaaaaatgagcttattcaagctgccaatatttatctatgggctgtagcagtacactgaattgtactgtgccagggatattgagatgctctgggggtgtattgtatacctgccagttttcttcatttctgaattgagttttcttttcttgatgttggtttccttcatatcacctcaaggtttagatttgtgaaggaataagcatgatggaaataatagtcttgaaaggagatatgttgtatataatcaggaggaagaggaaggaaggacttacccattttgatattttgctgtaggtggccagttttgtttctcatagggaaatctgacccacctgtcatgttggctcctaaggaactgctgttgtaagcggctcatcaagagttgaacttcacgtagccttgttgggaatatggaaaaggaagaaagccacaggactgcccattcagtcttgggaagattgggatgattctgcacaagcaaaaatgactgaagtttatgtatagacacacctctaccaatccatcttcagctgactgaatgttgtatgatagcccttctccaaagcagaggtagaatgttcaggtttcaccatggattttctacttatttcgtttttggaatcaccttacagattccaggtcccttttgtatatattctttattcttttgcttttttaaaaaataattttgtttcatatttaaagcacttgtattagtcaatgtttcgtgttccgcattatttgaaccatttgcccttacagaaagagaaatacttgtttgtgttttaaataaaactgatgtaggaaagtc

SEQ ID NO: 53174 - DNA, 4966 bp, Homo sapiens
tgtagccaggcgccatctttgacgctggcagtcttggttttctgctagtgctgctgctgctgggaggacgacggacggcagcggccaagcaagaagaaagacgtggcagcaagcgggagtcggggatagtgtcatcggttcggtaaagtttctgttctctgatttggggatattccctgcccaaaaaattcctggaaaattgactagtattaagtgtgaagaaatcttgaagaccagaaattggatcttactgaaaaactgatgtttttttgttttttttttaaattatattgttcagctatggaagatggatttttttttcatgatcctttaactctcaagttcatctttaaatgaactctttttttttgtttttttttggttttgttttgttttgtttttgaggagataactaaccctagctgtctccagtctgacaaaggttatttgaatggacttaatctcccagtagttgggagatgttttaaaaacacatgctgtgtttgaattgtggctgagaggttttcttggcaatgtgaggaggaaatttttttctgcctcattattattaattcatggattgagtgttggttcgacctacaggcgtaatagattggaactcagtgaagacacagatgttcctgttcagagcaaccagctaatgattacagtttaaagacaatttctgtgatcaagttgtcatttggaagattaaacccatttcacgaggacttggagcctggtccttgctttgaggaagcagtggcttgtttcaagaagccacttctgatctaagaatctacccagcatgcctaatcaaggagaagactgctatttttttttctattccacatgtaccaaaggcgacagctgcccattccgtcactgtgaagctgcaataggaaatgaaactgtttgcacattatggcaagaagggcgctgttttcgacaggtgtgcaggtttcggcacatggagattgataaaaaacgcagtgaaattccttgttattgggaaaatcagccaacaggatgtcaaaaattaaactgcgctttccatcacaatagaggacgatatgttgatggccttttcctacctccgagcaaaactgtgttgcccactgtgcctgagtcaccagaagaggaagtgaaggctagccaactttcagttcagcagaacaaattgtctgtccagtccaatccttcccctcagctgcggagcgttatgaaagtagaaagttccgaaaatgttcctagccccacgcatccaccagttgtaattaatgctgcagatgatgatgaagatgatgatgatcagttttctgaggaaggtgatgaaaccaaaacacctaccctgcaaccaactcctgaagttcacaatggattacgagtgacttctgtccggaaacctgcagtcaatataaagcaaggtgaatgtttgaattttggaataaaaactcttgaggaaattaagtcaaagaaaatgaaggaaaaatctaagaagcaaggtgagggttcttcaggagtttccagtcttttactccaccctgagcccgttccaggtcctgaaaaagaaaatgtcaggactgtggtgaggacagtaactctctccaccaaacaaggagaagaacccttggttagattgagtcttactgagagactggggaaacgaaaattttcagcaggcggtgacagtgatcctccattaaagcgtagcctggcacagaggctagggaagaaagttgaagctccagaaactaacattgacaaaacaccaaagaaagctcaagtttccaagtctcttaaggagcgattaggcatgtcagctgatccagataatgaggatgcaacagataaagttaataaagttggtgagatccatgtgaagacattagaagaaattcttcttgaaagagccagtcagaaacgtggagaattgcaaactaaactcaagacagaaggaccttcaaaaactgatgattctacttcaggagcaagaagctcctccactatccgtatcaaaaccttctctgaggtcctggctgaaaaaaaacatcggcagcaggaagcagagagacaaaaaagcaaaaaggatacaacttgcatcaagctaaagattgatagtgaaattaaaaaaacagtagttttgccacccattgttgccagcagaggacaatcagaggagcctgcaggtaaaacaaagtctatgcaggaggtgcacatcaagacgctggaagaaattaaactggagaaggcactgagggtgcagcagagctctgagagcagcaccagctccccgtctcaacacgaggccactccaggggcaaggcggctgctgcgaatcaccaaaagaacagggatgaaagaagagaagaaccttcaggaaggaaatgaagttgattctcagagcagtattagaacagaagctaaagaggcttcaggtgagaccacaggagttgacatcactaaaattcaagtcaagagatgtgagaccatgagagagaagcacatgcagaaacagcaggagagggaaaaatcagtcttgacacctcttcggggagatgtagcctcttgcaatacccaagtggcagagaaaccagtgctcactgctgtgccaggaatcacacggcacctgaccaagcggcttcccacaaagtcatcccagaaggtggaggtagaaacctcagggattggagactcattattgaatgtgaaatgtgcagcacagaccttggaaaaaaggggtaaagctaaacccaaagtgaacgtgaagccatctgtggttaaagttgtgtcatcccccaaattggccccaaaacgtaaggcagtggagatgcacgctgctgtcattgccgctgtgaagccactcagctccagcagtgtcctacaggaacccccagccaaaaaggcagctgtggctgttgtcccgcttgtctctgaggacaaatcagtcactgtgcctgaagcagaaaatcctagagacagtcttgtgctgcctccaacccagtcctcttcagattcctcacccccggaggtgtctggcccttcctcatcccaaatgagcatgaaaactcgccgactcagctctgcctcaacaggaaagcccccactctctgtggaggatgattttgagaaactaatatgggagatttcaggaggcaaattggaagctgagattgacctggatcctgggaaagatgaagatgaccttctgcttgagctatcagaaatgattgatagctgaaggtggtagtgaggacactttaaaaaaaaaatcgccaaaaaactggacttagtttcatctattgtaacatttacctgagatgatcatttctttagtctagaatttgccccaaatcagaagtatacctctgaattatctgtatgtgtcctggattccttggggtcagatttttaaagttactttataaccattttgtccatttgatgccattgtttatcatcttttgagaaaaaagttctgtcatacccttctctccacaaaaaagagactgagagggagatcaagtgaaagggtgcaagcgaacttagtgactccttgaggtgtttgtcagttttggcttttttcttctttgttgtattctttatgtattgtcttgatgtacttaatattacctgagtttgaaatggatgaagacagctgctaccattaaggaccaaattttatgctaccactaaacaaaaatacccactcagtctgtgttaaattgtatgtctttttaaaggtatttaaagattcaactaagctttaaagagggctgagcagctcaggaagcctgtaatgtgggcataactctttggacctgatcttgatgcttctgctgctctgttagcctctgaagagcaatatctaatttattattactgtaattttttaaaaggctttaaagtgcctcaggggtcccctgaaactaattttctatttctgggattccctggattcattatatgagatggtgacatgattagaggaattcttttttagtatgaaaattgtcccttttcttcttcagtacttgcctccttgctggcattgaattaacacagggacaaaatttggttaattttttatttctaactctcccaacaaacccctgttgcccagtatttgtttggtggcctttaaccacctgagggaaaaaatgagcttattcaagctgccaatatttatctatgggctgtagcagtacactgaattgtactgtgccagggatattgagatgctctgggggtgtattgtatacctgccagttttcttcatttctgaattgagttttcttttcttgatgttggtttccttcatatcacctcaaggtttagatttgtgaaggaataagcatgatggaaataatagtcttgaaaggagatatgttgtatataatcaggaggaagaggaaggaaggacttacccattttgatattttgctgtaggtggccagttttgtttctcatagggaaatctgacccacctgtcatgttggctcctaaggaactgctgttgtaagcggctcatcaagagttgaacttcacgtagccttgttgggaatatggaaaaggaagaaagccacaggactgcccattcagtcttgggaagattgggatgattctgcacaagcaaaaatgactgaagtttatgtatagacacacctctaccaatccatcttcagctgactgaatgttgtatgatagcccttctccaaagcagaggtagaatgttcaggtttcaccatggattttctacttatttcgtttttggaatcaccttacagattccaggtcccttttgtatatattctttattcttttgcttttttaaaaaataattttgtttcatatttaaagcacttgtattagtcaatgtttcgtgttccgcattatttgaaccatttgcccttacagaaagagaaatacttgtttgtgttttaaataaaactgatgtaggaaagtc

SEQ ID NO: 53175 - DNA, 4763 bp, Homo sapiens
tgtagccaggcgccatctttgacgctggcagtcttggttttctgctagtgctgctgctgctgggaggacgacggacggcagcggccaagcaagaagaaagacgtggcagcaagcgggagtcggggatagtgtcatcggttcgggtcccggtactttggagcttgtctcaaactccacatacagaaagccaccgaccttattccggtatcctacacccattccccactctcattacactcccacccctggccctcagcgtcggagtcaagagcaacagggacacttccgttctccttgtaggactggtgaaaccgtaatgaagaacacccctaaactcccataatcgatttggggatattccctgcccaaaaaattcctggaaaattgactagtattaagtgcgtaatagattggaactcagtgaagacacagatgttcctgttcagagcaaccagctaatgattacagtttaaagacaatttctgtgatcaagttgtcatttggaagattaaacccatttcacgaggacttggagcctggtccttgctttgaggaagcagtggcttgtttcaagaagccacttctgatctaagaatctacccagcatgcctaatcaaggagaagactgctatttttttttctattccacatgtaccaaaggcgacagctgcccattccgtcactgtgaagctgcaataggaaatgaaactgtttgcacattatggcaagaagggcgctgttttcgacaggtgtgcaggtttcggcacatggagattgataaaaaacgcagtgaaattccttgttattgggaaaatcagccaacaggatgtcaaaaattaaactgcgctttccatcacaatagaggacgatatgttgatggccttttcctacctccgagcaaaactgtgttgcccactgtgcctgagtcaccagaagaggaagtgaaggctagccaactttcagttcagcagaacaaattgtctgtccagtccaatccttcccctcagctgcggagcgttatgaaagtagaaagttccgaaaatgttcctagccccacgcatccaccagttgtaattaatgctgcagatgatgatgaagatgatgatgatcagttttctgaggaaggtgatgaaaccaaaacacctaccctgcaaccaactcctgaagttcacaatggattacgagtgacttctgtccggaaacctgcagtcaatataaagcaaggtgaatgtttgaattttggaataaaaactcttgaggaaattaagtcaaagaaaatgaaggaaaaatctaagaagcaaggtgagggttcttcaggagtttccagtcttttactccaccctgagcccgttccaggtcctgaaaaagaaaatgtcaggactgtggtgaggacagtaactctctccaccaaacaaggagaagaacccttggttagattgagtcttactgagagactggggaaacgaaaattttcagcaggcggtgacagtgatcctccattaaagcgtagcctggcacagaggctagggaagaaagttgaagctccagaaactaacattgacaaaacaccaaagaaagctcaagtttccaagtctcttaaggagcgattaggcatgtcagctgatccagataatgaggatgcaacagataaagttaataaagttggtgagatccatgtgaagacattagaagaaattcttcttgaaagagccagtcagaaacgtggagaattgcaaactaaactcaagacagaaggaccttcaaaaactgatgattctacttcaggagcaagaagctcctccactatccgtatcaaaaccttctctgaggtcctggctgaaaaaaaacatcggcagcaggaagcagagagacaaaaaagcaaaaaggatacaacttgcatcaagctaaagattgatagtgaaattaaaaaaacagtagttttgccacccattgttgccagcagaggacaatcagaggagcctgcaggtaaaacaaagtctatgcaggaggtgcacatcaagacgctggaagaaattaaactggagaaggcactgagggtgcagcagagctctgagagcagcaccagctccccgtctcaacacgaggccactccaggggcaaggcggctgctgcgaatcaccaaaagaacagggatgaaagaagagaagaaccttcaggaaggaaatgaagttgattctcagagcagtattagaacagaagctaaagaggcttcaggtgagaccacaggagttgacatcactaaaattcaagtcaagagatgtgagaccatgagagagaagcacatgcagaaacagcaggagagggaaaaatcagtcttgacacctcttcggggagatgtagcctcttgcaatacccaagtggcagagaaaccagtgctcactgctgtgccaggaatcacacggcacctgaccaagcggcttcccacaaagtcatcccagaaggtggaggtagaaacctcagggattggagactcattattgaatgtgaaatgtgcagcacagaccttggaaaaaaggggtaaagctaaacccaaagtgaacgtgaagccatctgtggttaaagttgtgtcatcccccaaattggccccaaaacgtaaggcagtggagatgcacgctgctgtcattgccgctgtgaagccactcagctccagcagtgtcctacaggaacccccagccaaaaaggcagctgtggctgttgtcccgcttgtctctgaggacaaatcagtcactgtgcctgaagcagaaaatcctagagacagtcttgtgctgcctccaacccagtcctcttcagattcctcacccccggaggtgtctggcccttcctcatcccaaatgagcatgaaaactcgccgactcagctctgcctcaacaggaaagcccccactctctgtggaggatgattttgagaaactaatatgggagatttcaggaggcaaattggaagctgagattgacctggatcctgggaaagatgaagatgaccttctgcttgagctatcagaaatgattgatagctgaaggtggtagtgaggacactttaaaaaaaaaatcgccaaaaaactggacttagtttcatctattgtaacatttacctgagatgatcatttctttagtctagaatttgccccaaatcagaagtatacctctgaattatctgtatgtgtcctggattccttggggtcagatttttaaagttactttataaccattttgtccatttgatgccattgtttatcatcttttgagaaaaaagttctgtcatacccttctctccacaaaaaagagactgagagggagatcaagtgaaagggtgcaagcgaacttagtgactccttgaggtgtttgtcagttttggcttttttcttctttgttgtattctttatgtattgtcttgatgtacttaatattacctgagtttgaaatggatgaagacagctgctaccattaaggaccaaattttatgctaccactaaacaaaaatacccactcagtctgtgttaaattgtatgtctttttaaaggtatttaaagattcaactaagctttaaagagggctgagcagctcaggaagcctgtaatgtgggcataactctttggacctgatcttgatgcttctgctgctctgttagcctctgaagagcaatatctaatttattattactgtaattttttaaaaggctttaaagtgcctcaggggtcccctgaaactaattttctatttctgggattccctggattcattatatgagatggtgacatgattagaggaattcttttttagtatgaaaattgtcccttttcttcttcagtacttgcctccttgctggcattgaattaacacagggacaaaatttggttaattttttatttctaactctcccaacaaacccctgttgcccagtatttgtttggtggcctttaaccacctgagggaaaaaatgagcttattcaagctgccaatatttatctatgggctgtagcagtacactgaattgtactgtgccagggatattgagatgctctgggggtgtattgtatacctgccagttttcttcatttctgaattgagttttcttttcttgatgttggtttccttcatatcacctcaaggtttagatttgtgaaggaataagcatgatggaaataatagtcttgaaaggagatatgttgtatataatcaggaggaagaggaaggaaggacttacccattttgatattttgctgtaggtggccagttttgtttctcatagggaaatctgacccacctgtcatgttggctcctaaggaactgctgttgtaagcggctcatcaagagttgaacttcacgtagccttgttgggaatatggaaaaggaagaaagccacaggactgcccattcagtcttgggaagattgggatgattctgcacaagcaaaaatgactgaagtttatgtatagacacacctctaccaatccatcttcagctgactgaatgttgtatgatagcccttctccaaagcagaggtagaatgttcaggtttcaccatggattttctacttatttcgtttttggaatcaccttacagattccaggtcccttttgtatatattctttattcttttgcttttttaaaaaataattttgtttcatatttaaagcacttgtattagtcaatgtttcgtgttccgcattatttgaaccatttgcccttacagaaagagaaatacttgtttgtgttttaaataaaactgatgtaggaaagtc

SEQ ID NO: 53176 - DNA, 4401 bp, Homo sapiens
ctcagtgcaacctcaaactcctgggctcaaggcttcctccagcgtcagccccctgagtagctgggattacaaatgtgactcactatgcctggctattggattacagtttaaagacaatttctgtgatcaagttgtcatttggaagattaaacccatttcacgaggacttggagcctggtccttgctttgaggaagcagtggcttgtttcaagaagccacttctgatctaagaatctacccagcatgcctaatcaaggagaagactgctatttttttttctattccacatgtaccaaaggcgacagctgcccattccgtcactgtgaagctgcaataggaaatgaaactgtttgcacattatggcaagaagggcgctgttttcgacaggtgtgcaggtttcggcacatggagattgataaaaaacgcagtgaaattccttgttattgggaaaatcagccaacaggatgtcaaaaattaaactgcgctttccatcacaatagaggacgatatgttgatggccttttcctacctccgagcaaaactgtgttgcccactgtgcctgagtcaccagaagaggaagtgaaggctagccaactttcagttcagcagaacaaattgtctgtccagtccaatccttcccctcagctgcggagcgttatgaaagtagaaagttccgaaaatgttcctagccccacgcatccaccagttgtaattaatgctgcagatgatgatgaagatgatgatgatcagttttctgaggaaggtgatgaaaccaaaacacctaccctgcaaccaactcctgaagttcacaatggattacgagtgacttctgtccggaaacctgcagtcaatataaagcaaggtgaatgtttgaattttggaataaaaactcttgaggaaattaagtcaaagaaaatgaaggaaaaatctaagaagcaaggtgagggttcttcaggagtttccagtcttttactccaccctgagcccgttccaggtcctgaaaaagaaaatgtcaggactgtggtgaggacagtaactctctccaccaaacaaggagaagaacccttggttagattgagtcttactgagagactggggaaacgaaaattttcagcaggcggtgacagtgatcctccattaaagcgtagcctggcacagaggctagggaagaaagttgaagctccagaaactaacattgacaaaacaccaaagaaagctcaagtttccaagtctcttaaggagcgattaggcatgtcagctgatccagataatgaggatgcaacagataaagttaataaagttggtgagatccatgtgaagacattagaagaaattcttcttgaaagagccagtcagaaacgtggagaattgcaaactaaactcaagacagaaggaccttcaaaaactgatgattctacttcaggagcaagaagctcctccactatccgtatcaaaaccttctctgaggtcctggctgaaaaaaaacatcggcagcaggaagcagagagacaaaaaagcaaaaaggatacaacttgcatcaagctaaagattgatagtgaaattaaaaaaacagtagttttgccacccattgttgccagcagaggacaatcagaggagcctgcaggtaaaacaaagtctatgcaggaggtgcacatcaagacgctggaagaaattaaactggagaaggcactgagggtgcagcagagctctgagagcagcaccagctccccgtctcaacacgaggccactccaggggcaaggcggctgctgcgaatcaccaaaagaacagggatgaaagaagagaagaaccttcaggaaggaaatgaagttgattctcagagcagtattagaacagaagctaaagaggcttcaggtgagaccacaggagttgacatcactaaaattcaagtcaagagatgtgagaccatgagagagaagcacatgcagaaacagcaggagagggaaaaatcagtcttgacacctcttcggggagatgtagcctcttgcaatacccaagtggcagagaaaccagtgctcactgctgtgccaggaatcacacggcacctgaccaagcggcttcccacaaagtcatcccagaaggtggaggtagaaacctcagggattggagactcattattgaatgtgaaatgtgcagcacagaccttggaaaaaaggggtaaagctaaacccaaagtgaacgtgaagccatctgtggttaaagttgtgtcatcccccaaattggccccaaaacgtaaggcagtggagatgcacgctgctgtcattgccgctgtgaagccactcagctccagcagtgtcctacaggaacccccagccaaaaaggcagctgtggctgttgtcccgcttgtctctgaggacaaatcagtcactgtgcctgaagcagaaaatcctagagacagtcttgtgctgcctccaacccagtcctcttcagattcctcacccccggaggtgtctggcccttcctcatcccaaatgagcatgaaaactcgccgactcagctctgcctcaacaggaaagcccccactctctgtggaggatgattttgagaaactaatatgggagatttcaggaggcaaattggaagctgagattgacctggatcctgggaaagatgaagatgaccttctgcttgagctatcagaaatgattgatagctgaaggtggtagtgaggacactttaaaaaaaaaatcgccaaaaaactggacttagtttcatctattgtaacatttacctgagatgatcatttctttagtctagaatttgccccaaatcagaagtatacctctgaattatctgtatgtgtcctggattccttggggtcagatttttaaagttactttataaccattttgtccatttgatgccattgtttatcatcttttgagaaaaaagttctgtcatacccttctctccacaaaaaagagactgagagggagatcaagtgaaagggtgcaagcgaacttagtgactccttgaggtgtttgtcagttttggcttttttcttctttgttgtattctttatgtattgtcttgatgtacttaatattacctgagtttgaaatggatgaagacagctgctaccattaaggaccaaattttatgctaccactaaacaaaaatacccactcagtctgtgttaaattgtatgtctttttaaaggtatttaaagattcaactaagctttaaagagggctgagcagctcaggaagcctgtaatgtgggcataactctttggacctgatcttgatgcttctgctgctctgttagcctctgaagagcaatatctaatttattattactgtaattttttaaaaggctttaaagtgcctcaggggtcccctgaaactaattttctatttctgggattccctggattcattatatgagatggtgacatgattagaggaattcttttttagtatgaaaattgtcccttttcttcttcagtacttgcctccttgctggcattgaattaacacagggacaaaatttggttaattttttatttctaactctcccaacaaacccctgttgcccagtatttgtttggtggcctttaaccacctgagggaaaaaatgagcttattcaagctgccaatatttatctatgggctgtagcagtacactgaattgtactgtgccagggatattgagatgctctgggggtgtattgtatacctgccagttttcttcatttctgaattgagttttcttttcttgatgttggtttccttcatatcacctcaaggtttagatttgtgaaggaataagcatgatggaaataatagtcttgaaaggagatatgttgtatataatcaggaggaagaggaaggaaggacttacccattttgatattttgctgtaggtggccagttttgtttctcatagggaaatctgacccacctgtcatgttggctcctaaggaactgctgttgtaagcggctcatcaagagttgaacttcacgtagccttgttgggaatatggaaaaggaagaaagccacaggactgcccattcagtcttgggaagattgggatgattctgcacaagcaaaaatgactgaagtttatgtatagacacacctctaccaatccatcttcagctgactgaatgttgtatgatagcccttctccaaagcagaggtagaatgttcaggtttcaccatggattttctacttatttcgtttttggaatcaccttacagattccaggtcccttttgtatatattctttattcttttgcttttttaaaaaataattttgtttcatatttaaagcacttgtattagtcaatgtttcgtgttccgcattatttgaaccatttgcccttacagaaagagaaatacttgtttgtgttttaaataaaactgatgtaggaaagtc

SEQ ID NO: 53177 - DNA, 6327 bp, Homo sapiens
gttttatatttggaaatttctaattgcctcctcatactggtcagctttataatttcaaattgttgagtgtgatagtgttaccctttagaattggatcttatataaaagggaaatattagaaaacaattaggaaaatatacttttagtctttgaaatgcctgttttaacctttataaaatattataaaaatagattgtgtaggtactttcaaataatttatgggtaaaaacagactaaaatgtttgcaagaattggaaaaggttgaatgggaattgtaatgagagccctttgaacatgcttggaaaaacccagtagacatttcccaaagattgtttctgtaattttaggtaatctttttaaaaacatacttaatgacccattatactgtattaactgtgcggttgttttggccactgaattcttaatgaaaactaagcagtcggtatttttatgtgttaggaatcattggtgaaatgagtgaattgatctcattttaagatccctttctactctgaaagtatgtttctgagattgagtaggaggccagaaaatgatgacttttagtaaaagtctattaaaagtttcagactgaataactaatgtgagatcccaatttttccttttttttcattttagatttggggatattccctgcccaaaaaattcctggaaaattgactagtattaagtgtgagtaaaaggtgtccacttttttttaagttttgattttagttttgtcttggatagtatttggcaagatttagcctagaaattatgtagtatttattacataagaatcaaaattgctttgttactgggctggtttcaaagtttagaactcatttctatgtatcaaaatcgggttttttttggttttgatttttttttttttaaattcttaaatggtaaatatgccattgtgaaatgaaatctcaactccaaaagtttacccttttactaactggagtaaatgtatacttacaaagtctttagctgtagccattagtagtaaagaatttggacctaggctgcgtaagcaagcctttccagggccactatttaatggcaaaccagtgatactggtgttgatacaaaataagaaataaattttcccttagataaagctttctgtgttttgacagtgccagtttagaatggctataatgctgctctgccttctacagcttgctgcaccactctgtagttactctattaccatacgtttctatcttttttggttaaacactccctgatgacgatgatggatatatatacatacatccatattatacataatgatatatgtgtaaggatttaccttcgtctttattttgtgggctgggcaaaatttagtgtaacaataacttcatgatactttggtataagagtaagttctttatttttataatgaacccaaatctaaagtcttttatagtgcattttaaaaggggaaacttatccaaatgttatatttctatacatttttgtgtatatgtgtgtgtgtataagccagttagtatatatctgtatgtatattatatacataaaacactatatttttacatacaagtatgcttttattatacagataataaagatgggggaaggtttctgtttttttcttaataggtgaagaaatcttgaagaccagaaattggatcttactgaaaaactgatgtttttttgttttttttttaaattatattgttcagctatggaagatggatttttttttcatgatcctttaactctcaagttcatctttaaatgaactctttttttttgtttttttttggttttgttttgttttgtttttgaggagataactaaccctagctgtctccagtctgacaaaggttatttgaatggacttaatctcccagtagttgggagatgttttaaaaacacatgctgtgtttgaattgtggctgagaggttttcttggcaatgtgaggaggaaatttttttctgcctcattattattaattcatggattgagtgttggttcgacctacaggcgtaatagattggaactcagtgaagacacagatgttcctgttcagagcaaccagctaatgattacagtttaaagacaatttctgtgatcaagttgtcatttggaagattaaacccatttcacgaggacttggagcctggtccttgctttgaggaagcagtggcttgtttcaagaagccacttctgatctaagaatctacccagcatgcctaatcaaggagaagactgctatttttttttctattccacatgtaccaaaggcgacagctgcccattccgtcactgtgaagctgcaataggaaatgaaactgtttgcacattatggcaagaagggcgctgttttcgacaggtgtgcaggtttcggcacatggagattgataaaaaacgcagtgaaattccttgttattgggaaaatcagccaacaggatgtcaaaaattaaactgcgctttccatcacaatagaggacgatatgttgatggccttttcctacctccgagcaaaactgtgttgcccactgtgcctgagtcaccagaagaggaagtgaaggctagccaactttcagttcagcagaacaaattgtctgtccagtccaatccttcccctcagctgcggagcgttatgaaagtagaaagttccgaaaatgttcctagccccacgcatccaccagttgtaattaatgctgcagatgatgatgaagatgatgatgatcagttttctgaggaaggtgatgaaaccaaaacacctaccctgcaaccaactcctgaagttcacaatggattacgagtgacttctgtccggaaacctgcagtcaatataaagcaaggtgaatgtttgaattttggaataaaaactcttgaggaaattaagtcaaagaaaatgaaggaaaaatctaagaagcaaggtgagggttcttcaggagtttccagtcttttactccaccctgagcccgttccaggtcctgaaaaagaaaatgtcaggactgtggtgaggacagtaactctctccaccaaacaaggagaagaacccttggttagattgagtcttactgagagactggggaaacgaaaattttcagcaggcggtgacagtgatcctccattaaagcgtagcctggcacagaggctagggaagaaagttgaagctccagaaactaacattgacaaaacaccaaagaaagctcaagtttccaagtctcttaaggagcgattaggcatgtcagctgatccagataatgaggatgcaacagataaagttaataaagttggtgagatccatgtgaagacattagaagaaattcttcttgaaagagccagtcagaaacgtggagaattgcaaactaaactcaagacagaaggaccttcaaaaactgatgattctacttcaggagcaagaagctcctccactatccgtatcaaaaccttctctgaggtcctggctgaaaaaaaacatcggcagcaggaagcagagagacaaaaaagcaaaaaggatacaacttgcatcaagctaaagattgatagtgaaattaaaaaaacagtagttttgccacccattgttgccagcagaggacaatcagaggagcctgcaggtaaaacaaagtctatgcaggaggtgcacatcaagacgctggaagaaattaaactggagaaggcactgagggtgcagcagagctctgagagcagcaccagctccccgtctcaacacgaggccactccaggggcaaggcggctgctgcgaatcaccaaaagaacagggatgaaagaagagaagaaccttcaggaaggaaatgaagttgattctcagagcagtattagaacagaagctaaagaggcttcaggtgagaccacaggagttgacatcactaaaattcaagtcaagagatgtgagaccatgagagagaagcacatgcagaaacagcaggagagggatggcagagaaaccagtgctcactgctgtgccaggaatcacacggcacctgaccaagcggcttcccacaaagtcatcccagaaggtggaggtagaaacctcagggattggagactcattattgaatgtgaaatgtgcagcacagaccttggaaaaaaggggtaaagctaaacccaaagtgaacgtgaagccatctgtggttaaagttgtgtcatcccccaaattggccccaaaacgtaaggcagtggagatgcacgctgctgtcattgccgctgtgaagccactcagctccagcagtgtcctacaggaacccccagccaaaaaggcagctgtggctgttgtcccgcttgtctctgaggacaaatcagtcactgtgcctgaagcagaaaatcctagagacagtcttgtgctgcctccaacccagtcctcttcagattcctcacccccggaggtgtctggcccttcctcatcccaaatgagcatgaaaactcgccgactcagctctgcctcaacaggaaagcccccactctctgtggaggatgattttgagaaactaatatgggagatttcaggaggcaaattggaagctgagattgacctggatcctgggaaagatgaagatgaccttctgcttgagctatcagaaatgattgatagctgaaggtggtagtgaggacactttaaaaaaaaaatcgccaaaaaactggacttagtttcatctattgtaacatttacctgagatgatcatttctttagtctagaatttgccccaaatcagaagtatacctctgaattatctgtatgtgtcctggattccttggggtcagatttttaaagttactttataaccattttgtccatttgatgccattgtttatcatcttttgagaaaaaagttctgtcatacccttctctccacaaaaaagagactgagagggagatcaagtgaaagggtgcaagcgaacttagtgactccttgaggtgtttgtcagttttggcttttttcttctttgttgtattctttatgtattgtcttgatgtacttaatattacctgagtttgaaatggatgaagacagctgctaccattaaggaccaaattttatgctaccactaaacaaaaatacccactcagtctgtgttaaattgtatgtctttttaaaggtatttaaagattcaactaagctttaaagagggctgagcagctcaggaagcctgtaatgtgggcataactctttggacctgatcttgatgcttctgctgctctgttagcctctgaagagcaatatctaatttattattactgtaattttttaaaaggctttaaagtgcctcaggggtcccctgaaactaattttctatttctgggattccctggattcattatatgagatggtgacatgattagaggaattcttttttagtatgaaaattgtcccttttcttcttcagtacttgcctccttgctggcattgaattaacacagggacaaaatttggttaattttttatttctaactctcccaacaaacccctgttgcccagtatttgtttggtggcctttaaccacctgagggaaaaaatgagcttattcaagctgccaatatttatctatgggctgtagcagtacactgaattgtactgtgccagggatattgagatgctctgggggtgtattgtatacctgccagttttcttcatttctgaattgagttttcttttcttgatgttggtttccttcatatcacctcaaggtttagatttgtgaaggaataagcatgatggaaataatagtcttgaaaggagatatgttgtatataatcaggaggaagaggaaggaaggacttacccattttgatattttgctgtaggtggccagttttgtttctcatagggaaatctgacccacctgtcatgttggctcctaaggaactgctgttgtaagcggctcatcaagagttgaacttcacgtagccttgttgggaatatggaaaaggaagaaagccacaggactgcccattcagtcttgggaagattgggatgattctgcacaagcaaaaatgactgaagtttatgtatagacacacctctaccaatccatcttcagctgactgaatgttgtatgatagcccttctccaaagcagaggtagaatgttcaggtttcaccatggattttctacttatttcgtttttggaatcaccttacagattccaggtcccttttgtatatattctttattcttttgcttttttaaaaaataattttgtttcatatttaaagcacttgtattagtcaatgtttcgtgttccgcattatttgaaccatttgcccttacagaaagagaaatacttgtttgtgttttaaataaaactgatgtaggaaagtc

SEQ ID NO: 53178 - DNA, 3079 bp, Homo sapiens
gaccggtcccggaattcccgggatatccagtcagaaacgtggagaattgcaaactaaactcaagacagaaggaccttcaaaaactgatgattctacttcaggagcaagaagctcctccactatccgtatcaaaaccttctctgaggtcctggctgaaaaaaaacatcggcagcaggaagcagagagacaaaaaagcaaaaaggatacaacttgcatcaagctaaagattgatagtgaaattaaaaaaacagtagttttgccacccattgttgccagcagaggacaatcagaggagcctgcaggtaaaacaaagtctatgcaggaggtgcacatcaagacgctggaagaaattaaactggagaaggcactgagggtgcagcagagctctgagagcagcaccagctccccgtctcaacacgaggccactccaggggcaaggcggctgctgcgaatcaccaaaagaacagggatgaaagaagagaagaaccttcaggaaggaaatgaagttgattctcagagcagtattagaacagaagctaaagaggcttcaggtgagaccacaggagttgacatcactaaaattcaagtcaagagatgtgagaccatgagagagaagcacatgcagaaacagcaggagagggaaaaatcagtcttgacacctcttcggggagatgtagcctcttgcaatacccaagtggcagagaaaccagtgctcactgctgtgccaggaatcacacggcacctgaccaagcggcttcccacaaagtcatcccagaaggtggaggtagaaacctcagggattggagactcattattgaatgtgaaatgtgcagcacagaccttggaaaaaaggggtaaagctaaacccaaagtgaacgtgaagccatctgtggttaaagttgtgtcatcccccaaattggccccaaaacgtaaggcagtggagatgcacgctgctgtcattgccgctgtgaagccactcagctccagcagtgtcctacaggaacccccagccaaaaaggcagctgtggctgttgtcccgcttgtctctgaggacaaatcagtcactgtgcctgaagcagaaaatcctagagacagtcttgtgctgcctccaacccagtcctcttcagattcctcacccccggaggtgtctggcccttcctcatcccaaatgagcatgaaaactcgccgactcagctctgcctcaacaggaaagcccccactctctgtggaggatgattttgagaaactaatatgggagatttcaggaggcaaattggaagctgagattgacctggatcctgggaaagatgaagatgaccttctgcttgagctatcagaaatgattgatagctgaaggtggtagtgaggacactttaaaaaaaaaatcgccaaaaaactggacttagtttcatctattgtaacatttacctgagatgatcatttctttagtctagaatttgccccaaatcagaagtatacctctgaattatctgtatgtgtcctggattccttggggtcagatttttaaagttactttataaccattttgtccatttgatgccattgtttatcatcttttgagaaaaaagttctgtcatacccttctctccacaaaaaagagactgagagggagatcaagtgaaagggtgcaagcgaacttagtgactccttgaggtgtttgtcagttttggcttttttcttctttgttgtattctttatgtattgtcttgatgtacttaatattacctgagtttgaaatggatgaagacagctgctaccattaaggaccaaattttatgctaccactaaacaaaaatacccactcagtctgtgttaaattgtatgtctttttaaaggtatttaaagattcaactaagctttaaagagggctgagcagctcaggaagcctgtaatgtgggcataactctttggacctgatcttgatgcttctgctgctctgttagcctctgaagagcaatatctaatttattattactgtaattttttaaaaggctttaaagtgcctcaggggtcccctgaaactaattttctatttctgggattccctggattcattatatgagatggtgacatgattagaggaattcttttttagtatgaaaattgtcccttttcttcttcagtacttgcctccttgctggcattgaattaacacagggacaaaatttggttaattttttatttctaactctcccaacaaacccctgttgcccagtatttgtttggtggcctttaaccacctgagggaaaaaatgagcttattcaagctgccaatatttatctatgggctgtagcagtacactgaattgtactgtgccagggatattgagatgctctgggggtgtattgtatacctgccagttttcttcatttctgaattgagttttcttttcttgatgttggtttccttcatatcacctcaaggtttagatttgtgaaggaataagcatgatggaaataatagtcttgaaaggagatatgttgtatataatcaggaggaagaggaaggaaggacttacccattttgatattttgctgtaggtggccagttttgtttctcatagggaaatctgacccacctgtcatgttggctcctaaggaactgctgttgtaagcggctcatcaagagttgaacttcacgtagccttgttgggaatatggaaaaggaagaaagccacaggactgcccattcagtcttgggaagattgggatgattctgcacaagcaaaaatgactgaagtttatgtatagacacacctctaccaatccatcttcagctgactgaatgttgtatgatagcccttctccaaagcagaggtagaatgttcaggtttcaccatggattttctacttatttcgtttttggaatcaccttacagattccaggtcccttttgtatatattctttattcttttgcttttttaaaaaataattttgtttcatatttaaagcacttgtattagtcaatgtttcgtgttccgcattatttgaaccatttgcccttacagaaagagaaatacttgtttgtgttttaaataaaactgatgtaggaaagtc

SEQ ID NO: 53179 - DNA, 2725 bp, Homo sapiens
ccgcgctgcaggaatacggcacgagtgcacatcaagacgctggaagaaattaaactggagaaggcactgagggtgcagcagagctctgagagcagcaccagctccccgtctcaacacgaggccactccaggggcaaggcggctgctgcgaatcaccaaaagaacagggatgaaagaagagaagaaccttcaggaaggaaatgaagttgattctcagagcagtattagaacagaagctaaagaggcttcaggtgagaccacaggagttgacatcactaaaattcaagtcaagagatgtgagaccatgagagagaagcacatgcagaaacagcaggagagggatggcagagaaaccagtgctcactgctgtgccaggaatcacacggcacctgaccaagcggcttcccacaaagtcatcccagaaggtggaggtagaaacctcagggattggagactcattattgaatgtgaaatgtgcagcacagaccttggaaaaaaggggtaaagctaaacccaaagtgaacgtgaagccatctgtggttaaagttgtgtcatcccccaaattggccccaaaacgtaaggcagtggagatgcacgctgctgtcattgccgctgtgaagccactcagctccagcagtgtcctacaggaacccccagccaaaaaggcagctgtggctgttgtcccgcttgtctctgaggacaaatcagtcactgtgcctgaagcagaaaatcctagagacagtcttgtgctgcctccaacccagtcctcttcagattcctcacccccggaggtgtctggcccttcctcatcccaaatgagcatgaaaactcgccgactcagctctgcctcaacaggaaagcccccactctctgtggaggatgattttgagaaactaatatgggagatttcaggaggcaaattggaagctgagattgacctggatcctgggaaagatgaagatgaccttctgcttgagctatcagaaatgattgatagctgaaggtggtagtgaggacactttaaaaaaaaaatcgccaaaaaactggacttagtttcatctattgtaacatttacctgagatgatcatttctttagtctagaatttgccccaaatcagaagtatacctctgaattatctgtatgtgtcctggattccttggggtcagatttttaaagttactttataaccattttgtccatttgatgccattgtttatcatcttttgagaaaaaagttctgtcatacccttctctccacaaaaaagagactgagagggagatcaagtgaaagggtgcaagcgaacttagtgactccttgaggtgtttgtcagttttggcttttttcttctttgttgtattctttatgtattgtcttgatgtacttaatattacctgagtttgaaatggatgaagacagctgctaccattaaggaccaaattttatgctaccactaaacaaaaatacccactcagtctgtgttaaattgtatgtctttttaaaggtatttaaagattcaactaagctttaaagagggctgagcagctcaggaagcctgtaatgtgggcataactctttggacctgatcttgatgcttctgctgctctgttagcctctgaagagcaatatctaatttattattactgtaattttttaaaaggctttaaagtgcctcaggggtcccctgaaactaattttctatttctgggattccctggattcattatatgagatggtgacatgattagaggaattcttttttagtatgaaaattgtcccttttcttcttcagtacttgcctccttgctggcattgaattaacacagggacaaaatttggttaattttttatttctaactctcccaacaaacccctgttgcccagtatttgtttggtggcctttaaccacctgagggaaaaaatgagcttattcaagctgccaatatttatctatgggctgtagcagtacactgaattgtactgtgccagggatattgagatgctctgggggtgtattgtatacctgccagttttcttcatttctgaattgagttttcttttcttgatgttggtttccttcatatcacctcaaggtttagatttgtgaaggaataagcatgatggaaataatagtcttgaaaggagatatgttgtatataatcaggaggaagaggaaggaaggacttacccattttgatattttgctgtaggtggccagttttgtttctcatagggaaatctgacccacctgtcatgttggctcctaaggaactgctgttgtaagcggctcatcaagagttgaacttcacgtagccttgttgggaatatggaaaaggaagaaagccacaggactgcccattcagtcttgggaagattgggatgattctgcacaagcaaaaatgactgaagtttatgtatagacacacctctaccaatccatcttcagctgactgaatgttgtatgatagcccttctccaaagcagaggtagaatgttcaggtttcaccatggattttctacttatttcgtttttggaatcaccttacagattccaggtcccttttgtatatattctttattcttttgcttttttaaaaaataattttgtttcatatttaaagcacttgtattagtcaatgtttcgtgttccgcattatttgaaccatttgcccttacagaaagagaaatacttgtttgtgttttaaataaaactgatgtaggaaagtc

SEQ ID NO: 53180 - DNA, 2593 bp, Homo sapiens
cacaggtagatagtaatatttctgatatttttatacagaggcaaaacgagatgaattcttttctcagaatttaaaattgctatttaaaaagctttgtgtaaaactttctatggtgcatctttcctctggtattgaataaaaacaaggaatagaggaatggtaacaaatttaagtggtattgtatctacatggtgaccacctgtagtgaccaccatgtgaccacaaattgcctttgaatcgttttcagtctctttttaaatgaattatttgtggtatttctagtactgaaggagttttgatattttattctgaattattccccatttaaaagagtctattctcactgcttatcagatattttctgccctttgtagctaaacccaaagtgaacgtgaagccatctgtggttaaagttgtgtcatcccccaaattggccccaaaacgtaaggcagtggagatgcacgctgctgtcattgccgctgtgaagccactcagctccagcagtgtcctacaggaacccccagccaaaaaggcagctgtggctgttgtcccgcttgtctctgaggacaaatcagtcactgtgcctgaagcagaaaatcctagagacagtcttgtgctgcctccaacccagtcctcttcagattcctcacccccggaggtgtctggcccttcctcatcccaaatgagcatgaaaactcgccgactcagctctgcctcaacaggaaagcccccactctctgtggaggatgattttgagaaactaatatgggagatttcaggaggcaaattggaagctgagattgacctggatcctgggaaagatgaagatgaccttctgcttgagctatcagaaatgattgatagctgaaggtggtagtgaggacactttaaaaaaaaaatcgccaaaaaactggacttagtttcatctattgtaacatttacctgagatgatcatttctttagtctagaatttgccccaaatcagaagtatacctctgaattatctgtatgtgtcctggattccttggggtcagatttttaaagttactttataaccattttgtccatttgatgccattgtttatcatcttttgagaaaaaagttctgtcatacccttctctccacaaaaaagagactgagagggagatcaagtgaaagggtgcaagcgaacttagtgactccttgaggtgtttgtcagttttggcttttttcttctttgttgtattctttatgtattgtcttgatgtacttaatattacctgagtttgaaatggatgaagacagctgctaccattaaggaccaaattttatgctaccactaaacaaaaatacccactcagtctgtgttaaattgtatgtctttttaaaggtatttaaagattcaactaagctttaaagagggctgagcagctcaggaagcctgtaatgtgggcataactctttggacctgatcttgatgcttctgctgctctgttagcctctgaagagcaatatctaatttattattactgtaattttttaaaaggctttaaagtgcctcaggggtcccctgaaactaattttctatttctgggattccctggattcattatatgagatggtgacatgattagaggaattcttttttagtatgaaaattgtcccttttcttcttcagtacttgcctccttgctggcattgaattaacacagggacaaaatttggttaattttttatttctaactctcccaacaaacccctgttgcccagtatttgtttggtggcctttaaccacctgagggaaaaaatgagcttattcaagctgccaatatttatctatgggctgtagcagtacactgaattgtactgtgccagggatattgagatgctctgggggtgtattgtatacctgccagttttcttcatttctgaattgagttttcttttcttgatgttggtttccttcatatcacctcaaggtttagatttgtgaaggaataagcatgatggaaataatagtcttgaaaggagatatgttgtatataatcaggaggaagaggaaggaaggacttacccattttgatattttgctgtaggtggccagttttgtttctcatagggaaatctgacccacctgtcatgttggctcctaaggaactgctgttgtaagcggctcatcaagagttgaacttcacgtagccttgttgggaatatggaaaaggaagaaagccacaggactgcccattcagtcttgggaagattgggatgattctgcacaagcaaaaatgactgaagtttatgtatagacacacctctaccaatccatcttcagctgactgaatgttgtatgatagcccttctccaaagcagaggtagaatgttcaggtttcaccatggattttctacttatttcgtttttggaatcaccttacagattccaggtcccttttgtatatattctttattcttttgcttttttaaaaaataattttgtttcatatttaaagcacttgtattagtcaatgtttcgtgttccgcattatttgaaccatttgcccttacagaaagagaaatacttgtttgtgttttaaataaaactgatgtaggaaagtc

SEQ ID NO: 53181 - DNA, 6327 bp, Homo sapiens
gttttatatttggaaatttctaattgcctcctcatactggtcagctttataatttcaaattgttgagtgtgatagtgttaccctttagaattggatcttatataaaagggaaatattagaaaacaattaggaaaatatacttttagtctttgaaatgcctgttttaacctttataaaatattataaaaatagattgtgtaggtactttcaaataatttatgggtaaaaacagactaaaatgtttgcaagaattggaaaaggttgaatgggaattgtaatgagagccctttgaacatgcttggaaaaacccagtagacatttcccaaagattgtttctgtaattttaggtaatctttttaaaaacatacttaatgacccattatactgtattaactgtgcggttgttttggccactgaattcttaatgaaaactaagcagtcggtatttttatgtgttaggaatcattggtgaaatgagtgaattgatctcattttaagatccctttctactctgaaagtatgtttctgagattgagtaggaggccagaaaatgatgacttttagtaaaagtctattaaaagtttcagactgaataactaatgtgagatcccaatttttccttttttttcattttagatttggggatattccctgcccaaaaaattcctggaaaattgactagtattaagtgtgagtaaaaggtgtccacttttttttaagttttgattttagttttgtcttggatagtatttggcaagatttagcctagaaattatgtagtatttattacataagaatcaaaattgctttgttactgggctggtttcaaagtttagaactcatttctatgtatcaaaatcgggttttttttggttttgatttttttttttttaaattcttaaatggtaaatatgccattgtgaaatgaaatctcaactccaaaagtttacccttttactaactggagtaaatgtatacttacaaagtctttagctgtagccattagtagtaaagaatttggacctaggctgcgtaagcaagcctttccagggccactatttaatggcaaaccagtgatactggtgttgatacaaaataagaaataaattttcccttagataaagctttctgtgttttgacagtgccagtttagaatggctataatgctgctctgccttctacagcttgctgcaccactctgtagttactctattaccatacgtttctatcttttttggttaaacactccctgatgacgatgatggatatatatacatacatccatattatacataatgatatatgtgtaaggatttaccttcgtctttattttgtgggctgggcaaaatttagtgtaacaataacttcatgatactttggtataagagtaagttctttatttttataatgaacccaaatctaaagtcttttatagtgcattttaaaaggggaaacttatccaaatgttatatttctatacatttttgtgtatatgtgtgtgtgtataagccagttagtatatatctgtatgtatattatatacataaaacactatatttttacatacaagtatgcttttattatacagataataaagatgggggaaggtttctgtttttttcttaataggtgaagaaatcttgaagaccagaaattggatcttactgaaaaactgatgtttttttgttttttttttaaattatattgttcagctatggaagatggatttttttttcatgatcctttaactctcaagttcatctttaaatgaactctttttttttgtttttttttggttttgttttgttttgtttttgaggagataactaaccctagctgtctccagtctgacaaaggttatttgaatggacttaatctcccagtagttgggagatgttttaaaaacacatgctgtgtttgaattgtggctgagaggttttcttggcaatgtgaggaggaaatttttttctgcctcattattattaattcatggattgagtgttggttcgacctacaggcgtaatagattggaactcagtgaagacacagatgttcctgttcagagcaaccagctaatgattacagtttaaagacaatttctgtgatcaagttgtcatttggaagattaaacccatttcacgaggacttggagcctggtccttgctttgaggaagcagtggcttgtttcaagaagccacttctgatctaagaatctacccagcatgcctaatcaaggagaagactgctatttttttttctattccacatgtaccaaaggcgacagctgcccattccgtcactgtgaagctgcaataggaaatgaaactgtttgcacattatggcaagaagggcgctgttttcgacaggtgtgcaggtttcggcacatggagattgataaaaaacgcagtgaaattccttgttattgggaaaatcagccaacaggatgtcaaaaattaaactgcgctttccatcacaatagaggacgatatgttgatggccttttcctacctccgagcaaaactgtgttgcccactgtgcctgagtcaccagaagaggaagtgaaggctagccaactttcagttcagcagaacaaattgtctgtccagtccaatccttcccctcagctgcggagcgttatgaaagtagaaagttccgaaaatgttcctagccccacgcatccaccagttgtaattaatgctgcagatgatgatgaagatgatgatgatcagttttctgaggaaggtgatgaaaccaaaacacctaccctgcaaccaactcctgaagttcacaatggattacgagtgacttctgtccggaaacctgcagtcaatataaagcaaggtgaatgtttgaattttggaataaaaactcttgaggaaattaagtcaaagaaaatgaaggaaaaatctaagaagcaaggtgagggttcttcaggagtttccagtcttttactccaccctgagcccgttccaggtcctgaaaaagaaaatgtcaggactgtggtgaggacagtaactctctccaccaaacaaggagaagaacccttggttagattgagtcttactgagagactggggaaacgaaaattttcagcaggcggtgacagtgatcctccattaaagcgtagcctggcacagaggctagggaagaaagttgaagctccagaaactaacattgacaaaacaccaaagaaagctcaagtttccaagtctcttaaggagcgattaggcatgtcagctgatccagataatgaggatgcaacagataaagttaataaagttggtgagatccatgtgaagacattagaagaaattcttcttgaaagagccagtcagaaacgtggagaattgcaaactaaactcaagacagaaggaccttcaaaaactgatgattctacttcaggagcaagaagctcctccactatccgtatcaaaaccttctctgaggtcctggctgaaaaaaaacatcggcagcaggaagcagagagacaaaaaagcaaaaaggatacaacttgcatcaagctaaagattgatagtgaaattaaaaaaacagtagttttgccacccattgttgccagcagaggacaatcagaggagcctgcaggtaaaacaaagtctatgcaggaggtgcacatcaagacgctggaagaaattaaactggagaaggcactgagggtgcagcagagctctgagagcagcaccagctccccgtctcaacacgaggccactccaggggcaaggcggctgctgcgaatcaccaaaagaacagggatgaaagaagagaagaaccttcaggaaggaaatgaagttgattctcagagcagtattagaacagaagctaaagaggcttcaggtgagaccacaggagttgacatcactaaaattcaagtcaagagatgtgagaccatgagagagaagcacatgcagaaacagcaggagagggaaaaatcagtcttgacacctcttcggggagatgtagcctcttgcaatacccaagtggcagagaaaccagtgctcactgctgtgccaggaatcacacggcacctgaccaagcggcttcccacaaagtcatcccagaaggtggaggtagaaacctcagggattggagactcattattgaatgtgaaatgtgcagcacagaccttggaaaaaaggggtaaagctaaacccaaagtgaacgtgaagccatctgtggttaaagttgtgtcatcccccaaattggccccaaaacgtaaggcagtggagatgcacgctgctgtcattgccgctgtgaagccactcagctccagcagtgtcctacaggaacccccagccaaaaaggcagctgtggctgttgtcccgcttgtctctgaggacaaatcagtcactgtgcctgaagcagaaaatcctagagacagtcttgtgctgcctccaacccagtcctcttcagattcctcacccccggaggtgtctggcccttcctcatcccaaatgagcatgaaaactcgccgactcagctctgcctcaacaggaaagcccccactctctgtggaggatgattttgagaaactaatatgggagatttcaggaggcaaattggaagctgagattgacctggatcctgggaaagatgaagatgaccttctgcttgagctatcagaaatgattgatagctgaaggtggtagtgaggacactttaaaaaaaaaatcgccaaaaaactggacttagtttcatctattgtaacatttacctgagatgatcatttctttagtctagaatttgccccaaatcagaagtatacctctgaattatctgtatgtgtcctggattccttggggtcagatttttaaagttactttataaccattttgtccatttgatgccattgtttatcatcttttgagaaaaaagttctgtcatacccttctctccacaaaaaagagactgagagggagatcaagtgaaagggtgcaagcgaacttagtgactccttgaggtgtttgtcagttttggcttttttcttctttgttgtattctttatgtattgtcttgatgtacttaatattacctgagtttgaaatggatgaagacagctgctaccattaaggaccaaattttatgctaccactaaacaaaaatacccactcagtctgtgttaaattgtatgtctttttaaaggtatttaaagattcaactaagctttaaagagggctgagcagctcaggaagcctgtaatgtgggcataactctttggacctgatcttgatgcttctgctgctctgttagcctctgaagagcaatatctaatttattattactgtaattttttaaaaggctttaaagtgcctcaggggtcccctgaaactaattttctatttctgggattccctggattcattatatgagatggtgacatgattagaggaattcttttttagtatgaaaattgtcccttttcttcttcagtacttgcctccttgctggcattgaattaacacagggacaaaatttggttaattttttatttctaactctcccaacaaacccctgttgcccagtatttgtttggtggcctttaaccacctgagggaatgaattgtactgtgccagggatattgagatgctctgggggtgtattgtatacctgccagttttcttcatttctgaattgagttttcttttcttgatgttggtttccttcatatcacctcaaggtttagatttgtgaaggaataagcatgatggaaataatagtcttgaaaggagatatgttgtatataatcaggaggaagaggaaggaaggacttacccattttgatattttgctgtaggtggccagttttgtttctcatagggaaatctgacccacctgtcatgttggctcctaaggaactgctgttgtaagcggctcatcaagagttgaacttcacgtagccttgttgggaatatggaaaaggaagaaagccacaggactgcccattcagtcttgggaagattgggatgattctgcacaagcaaaaatgactgaagtttatgtatagacacacctctaccaatccatcttcagctgactgaatgttgtatgatagcccttctccaaagcagaggtagaatgttcaggtttcaccatggattttctacttatttcgtttttggaatcaccttacagattccaggtcccttttgtatatattctttattcttttgcttttttaaaaaataattttgtttcatatttaaagcacttgtattagtcaatgtttcgtgttccgcattatttgaaccatttgcccttacagaaagagaaatacttgtttgtgttttaaataaaactgatgtaggaaagtc

SEQ ID NO: 53182 - DNA, 2128 bp, Homo sapiens
cttgatcccaaatcagtaaaagaattatttctttatgtatgttcttaaaaacaaatttttgctcactttgtgtccatgagactaggtgattcagccaactatttttaaaacggcagttttctaataatcttttttttcttacagtcttgtgctgcctccaacccagtcctcttcagattcctcacccccggaggtgtctggcccttcctcatcccaaatgagcatgaaaactcgccgactcagctctgcctcaacaggaaagcccccactctctgtggaggatgattttgagaaactaatatgggagatttcaggaggcaaattggaagctgagattgacctggatcctgggaaagatgaagatgaccttctgcttgagctatcagaaatgattgatagctgaaggtggtagtgaggacactttaaaaaaaaaatcgccaaaaaactggacttagtttcatctattgtaacatttacctgagatgatcatttctttagtctagaatttgccccaaatcagaagtatacctctgaattatctgtatgtgtcctggattccttggggtcagatttttaaagttactttataaccattttgtccatttgatgccattgtttatcatcttttgagaaaaaagttctgtcatacccttctctccacaaaaaagagactgagagggagatcaagtgaaagggtgcaagcgaacttagtgactccttgaggtgtttgtcagttttggcttttttcttctttgttgtattctttatgtattgtcttgatgtacttaatattacctgagtttgaaatggatgaagacagctgctaccattaaggaccaaattttatgctaccactaaacaaaaatacccactcagtctgtgttaaattgtatgtctttttaaaggtatttaaagattcaactaagctttaaagagggctgagcagctcaggaagcctgtaatgtgggcataactctttggacctgatcttgatgcttctgctgctctgttagcctctgaagagcaatatctaatttattattactgtaattttttaaaaggctttaaagtgcctcaggggtcccctgaaactaattttctatttctgggattccctggattcattatatgagatggtgacatgattagaggaattcttttttagtatgaaaattgtcccttttcttcttcagtacttgcctccttgctggcattgaattaacacagggacaaaatttggttaattttttatttctaactctcccaacaaacccctgttgcccagtatttgtttggtggcctttaaccacctgagggaaaaaatgagcttattcaagctgccaatatttatctatgggctgtagcagtacactgaattgtactgtgccagggatattgagatgctctgggggtgtattgtatacctgccagttttcttcatttctgaattgagttttcttttcttgatgttggtttccttcatatcacctcaaggtttagatttgtgaaggaataagcatgatggaaataatagtcttgaaaggagatatgttgtatataatcaggaggaagaggaaggaaggacttacccattttgatattttgctgtaggtggccagttttgtttctcatagggaaatctgacccacctgtcatgttggctcctaaggaactgctgttgtaagcggctcatcaagagttgaacttcacgtagccttgttgggaatatggaaaaggaagaaagccacaggactgcccattcagtcttgggaagattgggatgattctgcacaagcaaaaatgactgaagtttatgtatagacacacctctaccaatccatcttcagctgactgaatgttgtatgatagcccttctccaaagcagaggtagaatgttcaggtttcaccatggattttctacttatttcgtttttggaatcaccttacagattccaggtcccttttgtatatattctttattcttttgcttttttaaaaaataattttgtttcatatttaaagcacttgtattagtcaatgtttcgtgttccgcattatttgaaccatttgcccttacagaaagagaaatacttgtttgtgttttaaataaaactgatgtaggaaagtc

SEQ ID NO: 53183 - DNA, 2074 bp, Homo sapiens
cttgatcccaaatcagtaaaagaattatttctttatgtatgttcttaaaaacaaatttttgctcactttgtgtccatgagactaggtgattcagccaactatttttaaaacggcagttttctaataatcttttttttcttacagtcttgtgctgcctccaacccagtcctcttcagattcctcacccccggaggtgtctggcccttcctcatcccaaatgagcatggatgattttgagaaactaatatgggagatttcaggaggcaaattggaagctgagattgacctggatcctgggaaagatgaagatgaccttctgcttgagctatcagaaatgattgatagctgaaggtggtagtgaggacactttaaaaaaaaaatcgccaaaaaactggacttagtttcatctattgtaacatttacctgagatgatcatttctttagtctagaatttgccccaaatcagaagtatacctctgaattatctgtatgtgtcctggattccttggggtcagatttttaaagttactttataaccattttgtccatttgatgccattgtttatcatcttttgagaaaaaagttctgtcatacccttctctccacaaaaaagagactgagagggagatcaagtgaaagggtgcaagcgaacttagtgactccttgaggtgtttgtcagttttggcttttttcttctttgttgtattctttatgtattgtcttgatgtacttaatattacctgagtttgaaatggatgaagacagctgctaccattaaggaccaaattttatgctaccactaaacaaaaatacccactcagtctgtgttaaattgtatgtctttttaaaggtatttaaagattcaactaagctttaaagagggctgagcagctcaggaagcctgtaatgtgggcataactctttggacctgatcttgatgcttctgctgctctgttagcctctgaagagcaatatctaatttattattactgtaattttttaaaaggctttaaagtgcctcaggggtcccctgaaactaattttctatttctgggattccctggattcattatatgagatggtgacatgattagaggaattcttttttagtatgaaaattgtcccttttcttcttcagtacttgcctccttgctggcattgaattaacacagggacaaaatttggttaattttttatttctaactctcccaacaaacccctgttgcccagtatttgtttggtggcctttaaccacctgagggaaaaaatgagcttattcaagctgccaatatttatctatgggctgtagcagtacactgaattgtactgtgccagggatattgagatgctctgggggtgtattgtatacctgccagttttcttcatttctgaattgagttttcttttcttgatgttggtttccttcatatcacctcaaggtttagatttgtgaaggaataagcatgatggaaataatagtcttgaaaggagatatgttgtatataatcaggaggaagaggaaggaaggacttacccattttgatattttgctgtaggtggccagttttgtttctcatagggaaatctgacccacctgtcatgttggctcctaaggaactgctgttgtaagcggctcatcaagagttgaacttcacgtagccttgttgggaatatggaaaaggaagaaagccacaggactgcccattcagtcttgggaagattgggatgattctgcacaagcaaaaatgactgaagtttatgtatagacacacctctaccaatccatcttcagctgactgaatgttgtatgatagcccttctccaaagcagaggtagaatgttcaggtttcaccatggattttctacttatttcgtttttggaatcaccttacagattccaggtcccttttgtatatattctttattcttttgcttttttaaaaaataattttgtttcatatttaaagcacttgtattagtcaatgtttcgtgttccgcattatttgaaccatttgcccttacagaaagagaaatacttgtttgtgttttaaataaaactgatgtaggaaagtc

SEQ ID NO: 53184 - DNA, 6567 bp, Homo sapiens
gttttatatttggaaatttctaattgcctcctcatactggtcagctttataatttcaaattgttgagtgtgatagtgttaccctttagaattggatcttatataaaagggaaatattagaaaacaattaggaaaatatacttttagtctttgaaatgcctgttttaacctttataaaatattataaaaatagattgtgtaggtactttcaaataatttatgggtaaaaacagactaaaatgtttgcaagaattggaaaaggttgaatgggaattgtaatgagagccctttgaacatgcttggaaaaacccagtagacatttcccaaagattgtttctgtaattttaggtaatctttttaaaaacatacttaatgacccattatactgtattaactgtgcggttgttttggccactgaattcttaatgaaaactaagcagtcggtatttttatgtgttaggaatcattggtgaaatgagtgaattgatctcattttaagatccctttctactctgaaagtatgtttctgagattgagtaggaggccagaaaatgatgacttttagtaaaagtctattaaaagtttcagactgaataactaatgtgagatcccaatttttccttttttttcattttagatttggggatattccctgcccaaaaaattcctggaaaattgactagtattaagtgtgagtaaaaggtgtccacttttttttaagttttgattttagttttgtcttggatagtatttggcaagatttagcctagaaattatgtagtatttattacataagaatcaaaattgctttgttactgggctggtttcaaagtttagaactcatttctatgtatcaaaatcgggttttttttggttttgatttttttttttttaaattcttaaatggtaaatatgccattgtgaaatgaaatctcaactccaaaagtttacccttttactaactggagtaaatgtatacttacaaagtctttagctgtagccattagtagtaaagaatttggacctaggctgcgtaagcaagcctttccagggccactatttaatggcaaaccagtgatactggtgttgatacaaaataagaaataaattttcccttagataaagctttctgtgttttgacagtgccagtttagaatggctataatgctgctctgccttctacagcttgctgcaccactctgtagttactctattaccatacgtttctatcttttttggttaaacactccctgatgacgatgatggatatatatacatacatccatattatacataatgatatatgtgtaaggatttaccttcgtctttattttgtgggctgggcaaaatttagtgtaacaataacttcatgatactttggtataagagtaagttctttatttttataatgaacccaaatctaaagtcttttatagtgcattttaaaaggggaaacttatccaaatgttatatttctatacatttttgtgtatatgtgtgtgtgtataagccagttagtatatatctgtatgtatattatatacataaaacactatatttttacatacaagtatgcttttattatacagataataaagatgggggaaggtttctgtttttttcttaataggtgaagaaatcttgaagaccagaaattggatcttactgaaaaactgatgtttttttgttttttttttaaattatattgttcagctatggaagatggatttttttttcatgatcctttaactctcaagttcatctttaaatgaactctttttttttgtttttttttggttttgttttgttttgtttttgaggagataactaaccctagctgtctccagtctgacaaaggttatttgaatggacttaatctcccagtagttgggagatgttttaaaaacacatgctgtgtttgaattgtggctgagaggttttcttggcaatgtgaggaggaaatttttttctgcctcattattattaattcatggattgagtgttggttcgacctacaggcgtaatagattggaactcagtgaagacacagatgttcctgttcagagcaaccagctaatgattacagtttaaagacaatttctgtgatcaagttgtcatttggaagattaaacccatttcacgaggacttggagcctggtccttgctttgaggaagcagtggcttgtttcaagaagccacttctgatctaagaatctacccagcatgcctaatcaaggagaagactgctatttttttttctattccacatgtaccaaaggcgacagctgcccattccgtcactgtgaagctgcaataggaaatgaaactgtttgcacattatggcaagaagggcgctgttttcgacaggtgtgcaggtttcggcacatggagattgataaaaaacgcagtgaaattccttgttattgggaaaatcagccaacaggatgtcaaaaattaaactgcgctttccatcacaatagaggacgatatgttgatggccttttcctacctccgagcaaaactgtgttgcccactgtgcctgagtcaccagaagaggaagtgaaggctagccaactttcagttcagcagaacaaattgtctgtccagtccaatccttcccctcagctgcggagcgttatgaaagtagaaagttccgaaaatgttcctagccccacgcatccaccagttgtaattaatgctgcagatgatgatgaagatgatgatgatcagttttctgaggaaggtgatgaaaccaaaacacctaccctgcaaccaactcctgaagttcacaatggattacgagtgacttctgtccggaaacctgcagtcaatataaagcaaggtgaatgtttgaattttggaataaaaactcttgaggaaattaagtcaaagaaaatgaaggaaaaatctaagaagcaaggtgagggttcttcaggagtttccagtcttttactccaccctgagcccgttccaggtcctgaaaaagaaaatgtcaggactgtggtgaggacagtaactctctccaccaaacaaggagaagaacccttggttagattgagtcttactgagagactggggaaacgaaaattttcagcaggcggtgacagtgatcctccattaaagcgtagcctggcacagaggctagggaagaaagttgaagctccagaaactaacattgacaaaacaccaaagaaagctcaagtttccaagtctcttaaggagcgattaggcatgtcagctgatccagataatgaggatgcaacagataaagttaataaagttggtgagatccatgtgaagacattagaagaaattcttcttgaaagagccagtcagaaacgtggagaattgcaaactaaactcaagacagaaggaccttcaaaaactgatgattctacttcaggagcaagaagctcctccactatccgtatcaaaaccttctctgaggtcctggctgaaaaaaaacatcggcagcaggaagcagagagacaaaaaagcaaaaaggatacaacttgcatcaagctaaagattgatagtgaaattaaaaaaacagtagttttgccacccattgttgccagcagaggacaatcagaggagcctgcaggtaaaacaaagtctatgcaggaggtgcacatcaagacgctggaagaaattaaactggagaaggcactgagggtgcagcagagctctgagagcagcaccagctccccgtctcaacacgaggccactccaggggcaaggcggctgctgcgaatcaccaaaagaacagggatgaaagaagagaagaaccttcaggaaggaaatgaagttgattctcagagcagtattagaacagaagctaaagaggcttcaggtgagaccacaggagttgacatcactaaaattcaagtcaagagatgtgagaccatgagagagaagcacatgcagaaacagcaggagagggaaaaatcagtcttgacacctcttcggggagatgtagcctcttgcaatacccaagtggcagagaaaccagtgctcactgctgtgccaggaatcacacggcacctgaccaagcggcttcccacaaagtcatcccagaaggtggaggtagaaacctcagggattggagactcattattgaatgtgaaatgtgcagcacagaccttggaaaaaaggggtaaagctaaacccaaagtgaacgtgaagccatctgtggttaaagttgtgtcatcccccaaattggccccaaaacgtaaggcagtggagatgcacgctgctgtcattgccgctgtgaagccactcagctccagcagtgtcctacaggaacccccagccaaaaaggcagctgtggctgttgtcccgcttgtctctgaggacaaatcagtcactgtgcctgaagcagaaaatcctagagacagtcttgtgctgcctccaacccagtcctcttcagattcctcacccccggaggtgtctggcccttcctcatcccaaatgagcatgaaaactcgccgactcagctctgcctcaacaggaaagcccccactctctgtggaggatgattttgagaaactaatatgggagatttcaggaggcaaattggaagctgagattgacctggatcctgggaaagatgaagatgaccttctgcttgagctatcagaaatgattgatagctgaaggtggtagtgaggacactttaaaaaaaaaatcgccaaaaaactggacttagtttcatctattgtaacatttacctgagatgatcatttctttagtctagaatttgccccaaatcagaagtatacctctgaattatctgtatgtgtcctggattccttggggtcagatttttaaagttactttataaccattttgtccatttgatgccattgtttatcatcttttgagaaaaaagttctgtcatacccttctctccacaaaaaagagactgagagggagatcaagtgaaagggtgcaagcgaacttagtgactccttgaggtgtttgtcagttttggcttttttcttctttgttgtattctttatgtattgtcttgatgtacttaatattacctgagtttgaaatggatgaagacagctgctaccattaaggaccaaattttatgctaccactaaacaaaaatacccactcagtctgtgttaaattgtatgtctttttaaaggtatttaaagattcaactaagctttaaagagggctgagcagctcaggaagcctgtaatgtgggcataactctttggacctgatcttgatgcttctgctgctctgttagcctctgaagagcaatatctaatttattattactgtaattttttaaaaggctttaaagtgcctcaggggtcccctgaaactaattttctatttctgggattccctggattcattatatgagatggtgacatgattagaggaattcttttttagtatgaaaattgtcccttttcttcttcagtacttgcctccttgctggcattgaattaacacagggacaaaatttggttaattttttatttctaactctcccaacaaacccctgttgcccagtatttgtttggtggcctttaaccacctgagggaaaaaatgagcttattcaagctgccaatatttatctatgggctgtagcagtacactgaattgtactgtgccagggatattgagatgctctgggggtgtattgtatacctgccagttttcttcatttctgaattgagttttcttttcttgatgttggtttccttcatatcacctcaaggtttagatttgtgaaggaataagcatgatggaaataatagtcttgaaaggagatatgttgtatataatcaggaggaagaggaaggaaggacttacccattttgatattttgctgtaggtggccagttttgtttctcatagggaaatctgacccacctgtcatgttggctcctaaggaactgctgttgtaagcggctcatcaagagttgaacttcacgtagccttgttgggaatatggaaaaggaagaaagccacaggactgcccattcagtcttgggaagattgggatgattctgcacaagcaaaaatgactgaagtttatgtatagacacacctctaccaatccatcttcagctgactgaatgttgtatgatagcccttctccaaagcagaggtagaatgttcaggtttcaccatggattttctacttatttcgtttttggaatcaccttacagattccaggtcccttttgtatatattctttattcttttgcttttttaaaaaataattttgtttcatatttaaagcacttgtattagtcaatgtttcgtgttccgcattatttgaaccatttgcccttacagaaagagaaatacttgtttgtgttttaaataaaactgatgtaggaaagtcaaaaaaaaaaaaaaaacaaacaaagcaaacaagaaaaaaaaaacaaaaggaaaagaagaaaaagaagacaacagcaagaaagaagaaaaagaacggaaggcaagaagaggagagaagcacagaaaagaaacaaaaaggcaaagggcaagaaaagcgcaaccgcgggagagggaccggaaggagagag

SEQ ID NO: 53185 - DNA, 6326 bp, Homo sapiens
gttttatatttggaaatttctaattgcctcctcatactggtcagctttataatttcaaattgttgagtgtgatagtgttaccctttagaattggatcttatataaaagggaaatattagaaaacaattaggaaaatatacttttagtctttgaaatgcctgttttaacctttataaaatattataaaaatagattgtgtaggtactttcaaataatttatgggtaaaaacagactaaaatgtttgcaagaattggaaaaggttgaatgggaattgtaatgagagccctttgaacatgcttggaaaaacccagtagacatttcccaaagattgtttctgtaattttaggtaatctttttaaaaacatacttaatgacccattatactgtattaactgtgcggttgttttggccactgaattcttaatgaaaactaagcagtcggtatttttatgtgttaggaatcattggtgaaatgagtgaattgatctcattttaagatccctttctactctgaaagtatgtttctgagattgagtaggaggccagaaaatgatgacttttagtaaaagtctattaaaagtttcagactgaataactaatgtgagatcccaatttttccttttttttcattttagatttggggatattccctgcccaaaaaattcctggaaaattgactagtattaagtgtgagtaaaaggtgtccacttttttttaagttttgattttagttttgtcttggatagtatttggcaagatttagcctagaaattatgtagtatttattacataagaatcaaaattgctttgttactgggctggtttcaaagtttagaactcatttctatgtatcaaaatcgggttttttttggttttgatttttttttttttaaattcttaaatggtaaatatgccattgtgaaatgaaatctcaactccaaaagtttacccttttactaactggagtaaatgtatacttacaaagtctttagctgtagccattagtagtaaagaatttggacctaggctgcgtaagcaagcctttccagggccactatttaatggcaaaccagtgatactggtgttgatacaaaataagaaataaattttcccttagataaagctttctgtgttttgacagtgccagtttagaatggctataatgctgctctgccttctacagcttgctgcaccactctgtagttactctattaccatacgtttctatcttttttggttaaacactccctgatgacgatgatggatatatatacatacatccatattatacataatgatatatgtgtaaggatttaccttcgtctttattttgtgggctgggcaaaatttagtgtaacaataacttcatgatactttggtataagagtaagttctttatttttataatgaacccaaatctaaagtcttttatagtgcattttaaaaggggaaacttatccaaatgttatatttctatacatttttgtgtatatgtgtgtgtgtataagccagttagtatatatctgtatgtatattatatacataaaacactatatttttacatacaagtatgcttttattatacagataataaagatgggggaaggtttctgtttttttcttaataggtgaagaaatcttgaagaccagaaattggatcttactgaaaaactgatgtttttttgttttttttttaaattatattgttcagctatggaagatggatttttttttcatgatcctttaactctcaagttcatctttaaatgaactctttttttttgtttttttttggttttgttttgttttgtttttgaggagataactaaccctagctgtctccagtctgacaaaggttatttgaatggacttaatctcccagtagttgggagatgttttaaaaacacatgctgtgtttgaattgtggctgagaggttttcttggcaatgtgaggaggaaatttttttctgcctcattattattaattcatggattgagtgttggttcgacctacaggcgtaatagattggaactcagtgaagacacagatgttcctgttcagagcaaccagctaatgattacagtttaaagacaatttctgtgatcaagttgtcatttggaagattaaacccatttcacgaggacttggagcctggtccttgctttgaggaagcagtggcttgtttcaagaagccacttctgatctaagaatctacccagcatgcctaatcaaggagaagactgctatttttttttctattccacatgtaccaaaggcgacagctgcccattccgtcactgtgaagctgcaataggaaatgaaactgtttgcacattatggcaagaagggcgctgttttcgacaggtgtgcaggtttcggcacatggagattgataaaaaacgcagtgaaattccttgttattgggaaaatcagccaacaggatgtcaaaaattaaactgcgctttccatcacaatagaggacgatatgttgatggccttttcctacctccgagcaaaactgtgttgcccactgtgcctgagtcaccagaagaggaagtgaaggctagccaactttcagttcagcagaacaaattgtctgtccagtccaatccttcccctcagctgcggagcgttatgaaagtagaaagttccgaaaatgttcctagccccacgcatccaccagttgtaattaatgctgcagatgatgatgaagatgatgatgatcagttttctgaggaaggtgatgaaaccaaaacacctaccctgcaaccaactcctgaagttcacaatggattacgagtgacttctgtccggaaacctgcagtcaatataaagcaaggtgaatgtttgaattttggaataaaaactcttgaggaaattaagtcaaagaaaatgaaggaaaaatctaagaagcaaggtgagggttcttcaggagtttccagtcttttactccaccctgagcccgttccaggtcctgaaaaagaaaatgtcaggactgtggtgaggacagtaactctctccaccaaacaaggagaagaacccttggttagattgagtcttactgagagactggggaaacgaaaattttcagcaggcggtgacagtgatcctccattaaagcgtagcctggcacagaggctagggaagaaagttgaagctccagaaactaacattgacaaaacaccaaagaaagctcaagtttccaagtctcttaaggagcgattaggcatgtcagctgatccagataatgaggatgcaacagataaagttaataaagttggtgagatccatgtgaagacattagaagaaattcttcttgaaagagccagtcagaaacgtggagaattgcaaactaaactcaagacagaaggaccttcaaaaactgatgattctacttcaggagcaagaagctcctccactatccgtatcaaaaccttctctgaggtcctggctgaaaaaaaacatcggcagcaggaagcagagagacaaaaaagcaaaaaggatacaacttgcatcaagctaaagattgatagtgaaattaaaaaaacagtagttttgccacccattgttgccagcagaggacaatcagaggagcctgcaggtaaaacaaagtctatgcaggaggtgcacatcaagacgctggaagaaattaaactggagaaggcactgagggtgcagcagagctctgagagcagcaccagctccccgtctcaacacgaggccactccaggggcaaggcggctgctgcgaatcaccaaaagaacagggatgaaagaagagaagaaccttcaggaaggaaatgaagttgattctcagagcagtattagaacagaagctaaagaggcttcaggtgagaccacaggagttgacatcactaaaattcaagtcaagagatgtgagaccatgagagagaagcacatgcagaaacagcaggagagggaaaaatcagtcttgacacctcttcggggagatgtagcctcttgcaatacccaagtggcagagaaaccagtgctcactgctgtgccaggaatcacacggcacctgaccaagcggcttcccacaaagtcatcccagaaggtggaggtagaaacctcagggattggagactcattattgaatgtgaaatgtgcagcacagaccttggaaaaaaggggtaaagctaaacccaaagtgaacgtgaagccatctgtggttaaagttgtgtcatcccccaaattggccccaaaacgtaaggcagtggagatgcacgctgctgtcattgccgctgtgaagccactcagctccagcagtgtcctacaggaacccccagccaaaaaggcagctgtggctgttgtcccgcttgtctctgaggacaaatcagtcactgtgcctgaagcagaaaatcctagagacagtcttgtgctgcctccaacccagtcctcttcagattcctcacccccggaggtgtctggcccttcctcatcccaaatgagcatgaaaactcgccgactcagctctgcctcaacaggaaagcccccactctctgtggaggatgattttgagaaactaatatgggagatttcaggaggcaaattggaagctgagattgacctggatcctgggaaagatgaagatgaccttctgcttgagctatcagaaatgattgatagctgaaggtggtagtgaggacactttaaaaaaaaaatcgccaaaaaactggacttagtttcatctattgtaacatttacctgagatgatcatttctttagtctagaatttgccccaaatcagaagtatacctctgaattatctgtatgtgtcctggattccttggggtcagatttttaaagttactttataaccattttgtccatttgatgccattgtttatcatcttttgagaaaaaagttctgtcatacccttctctccacaaaaaagagactgagagggagatcaagtgaaagggtgcaagcgaacttagtgactccttgaggtgtttgtcagttttggcttttttcttctttgttgtattctttatgtattgtcttgatgtacttaatattacctgagtttgaaatggatgaagacagctgctaccattaaggaccaaattttatgctaccactaaacaaaaatacccactcagtctgtgttaaattgtatgtctttttaaaggtatttaaagattcaactaagctttaaagagggctgagcagctcaggaagcctgtaatgtgggcataactctttggacctgatcttgatgcttctgctgctctgttagcctctgaagagcaatatctaatttattattactgtaattttttaaaaggctttaaagtgcctcaggggtcccctgaaactaattttctatttctgggattccctggattcattatatgagatggtgacatgattagaggaattcttttttagtatgaaaattgtcccttttcttcttcagtacttgcctccttgctggcattgaattaacacagggacaaaatttggttaattttttatttctaactctcccaacaaacccctgttgcccagtatttgtttggtggcctttaaccacctgagggaaaaaatgagcttattcaagctgccaatatttatctatgggctgtagcagtacactgaattgtactgtgccagggatattgagatgctctgggggtgtattgtatacctgccagttttcttcatttctgaattgagttttcttttcttgatgttggtttccttcatatcacctcaaggtttagatttgtgaaggaataagcatgatggaaataatagtcttgaaaggagatatgttgtatataatcaggaggaagaggaaggaaggacttacccattttgatattttgctgtaggtggccagttttgtttctcatagggaaatctgacccacctgtcatgttggctcctaaggaactgctgttgtaagcggctcatcaagagttgaacttcacgtagccttgttgggaatatggaaaaggaagaaagccacaggactgcccattcagtcttgggaagattgggatgattctgcacaagcaaaaatgactgaagtttatgtatagacacacctctaccaatccatcttcagctgactgaatgttgtatgatagcccttctccaaagcagaggtagaatgttcaggtttcaccatggattttctacttatttcgtttttggaatcaccttacagattccaggtcccttttgtatatattctttattcttttgcttttttaacgcattatttgaaccatttgcccttacagaaagagaaatacttgtttgtgttttaaataaaactgatgtaggaaagtc

SEQ ID NO: 53186 - DNA, 5931 bp, Homo sapiens
gttttatatttggaaatttctaattgcctcctcatactggtcagctttataatttcaaattgttgagtgtgatagtgttaccctttagaattggatcttatataaaagggaaatattagaaaacaattaggaaaatatacttttagtctttgaaatgcctgttttaacctttataaaatattataaaaatagattgtgtaggtactttcaaataatttatgggtaaaaacagactaaaatgtttgcaagaattggaaaaggttgaatgggaattgtaatgagagccctttgaacatgcttggaaaaacccagtagacatttcccaaagattgtttctgtaattttaggtaatctttttaaaaacatacttaatgacccattatactgtattaactgtgcggttgttttggccactgaattcttaatgaaaactaagcagtcggtatttttatgtgttaggaatcattggtgaaatgagtgaattgatctcattttaagatccctttctactctgaaagtatgtttctgagattgagtaggaggccagaaaatgatgacttttagtaaaagtctattaaaagtttcagactgaataactaatgtgagatcccaatttttccttttttttcattttagatttggggatattccctgcccaaaaaattcctggaaaattgactagtattaagtgtgagtaaaaggtgtccacttttttttaagttttgattttagttttgtcttggatagtatttggcaagatttagcctagaaattatgtagtatttattacataagaatcaaaattgctttgttactgggctggtttcaaagtttagaactcatttctatgtatcaaaatcgggttttttttggttttgatttttttttttttaaattcttaaatggtaaatatgccattgtgaaatgaaatctcaactccaaaagtttacccttttactaactggagtaaatgtatacttacaaagtctttagctgtagccattagtagtaaagaatttggacctaggctgcgtaagcaagcctttccagggccactatttaatggcaaaccagtgatactggtgttgatacaaaataagaaataaattttcccttagataaagctttctgtgttttgacagtgccagtttagaatggctataatgctgctctgccttctacagcttgctgcaccactctgtagttactctattaccatacgtttctatcttttttggttaaacactccctgatgacgatgatggatatatatacatacatccatattatacataatgatatatgtgtaaggatttaccttcgtctttattttgtgggctgggcaaaatttagtgtaacaataacttcatgatactttggtataagagtaagttctttatttttataatgaacccaaatctaaagtcttttatagtgcattttaaaaggggaaacttatccaaatgttatatttctatacatttttgtgtatatgtgtgtgtgtataagccagttagtatatatctgtatgtatattatatacataaaacactatatttttacatacaagtatgcttttattatacagataataaagatgggggaaggtttctgtttttttcttaataggtgaagaaatcttgaagaccagaaattggatcttactgaaaaactgatgtttttttgttttttttttaaattatattgttcagctatggaagatggatttttttttcatgatcctttaactctcaagttcatctttaaatgaactctttttttttgtttttttttggttttgttttgttttgtttttgaggagataactaaccctagctgtctccagtctgacaaaggttatttgaatggacttaatctcccagtagttgggagatgttttaaaaacacatgctgtgtttgaattgtggctgagaggttttcttggcaatgtgaggaggaaatttttttctgcctcattattattaattcatggattgagtgttggttcgacctacaggcgtaatagattggaactcagtgaagacacagatgttcctgttcagagcaaccagctaatgattacagtttaaagacaatttctgtgatcaagttgtcatttggaagattaaacccatttcacgaggacttggagcctggtccttgctttgaggaagcagtggcttgtttcaagaagccacttctgatctaagaatctacccagcatgcctaatcaaggagaagactgctatttttttttctattccacatgtaccaaaggcgacagctgcccattccgtcactgtgaagctgcaataggaaatgaaactgtttgcacattatggcaagaagggcgctgttttcgacaggtgtgcaggtttcggcacatggagattgataaaaaacgcagtgaaattccttgttattgggaaaatcagccaacaggatgtcaaaaattaaactgcgctttccatcacaatagaggacgatatgttgatggccttttcctacctccgagcaaaactgtgttgcccactgtgcctgagtcaccagaagaggaagtgaaggctagccaactttcagttcagcagaacaaattgtctgtccagtccaatccttcccctcagctgcggagcgttatgaaagtagaaagttccgaaaatgttcctagccccacgcatccaccagttgtaattaatgctgcagatgatgatgaagatgatgatgatcagttttctgaggaaggtgatgaaaccaaaacacctaccctgcaaccaactcctgaagttcacaatggattacgagtgacttctgtccggaaacctgcagtcaatataaagcaaggtgaatgtttgaattttggaataaaaactcttgaggaaattaagtcaaagaaaatgaaggaaaaatctaagaagcaaggtgagggttcttcaggagtttccagtcttttactccaccctgagcccgttccaggtcctgaaaaagaaaatgtcaggactgtggtgaggacagtaactctctccaccaaacaaggagaagaacccttggttagattgagtcttactgagagactggggaaacgaaaattttcagcaggcggtgacagtgatcctccattaaagcgtagcctggcacagaggctagggaagaaagttgaagctccagaaactaacattgacaaaacaccaaagaaagctcaagtttccaagtctcttaaggagcgattaggcatgtcagctgatccagataatgaggatgcaacagataaagttaataaagttggtgagatccatgtgaagacattagaagaaattcttcttgaaagagccagtcagaaacgtggagaattgcaaactaaactcaagacagaaggaccttcaaaaactgatgattctacttcaggagcaagaagctcctccactatccgtatcaaaaccttctctgaggtcctggctgaaaaaaaacatcggcagcaggaagcagagagacaaaaaagcaaaaaggatacaacttgcatcaagctaaagattgatagtgaaattaaaaaaacagtagttttgccacccattgttgccagcagaggacaatcagaggagcctgcaggtaaaacaaagtctatgcaggaggtgcacatcaagacgctggaagaaattaaactggagaaggcactgagggtgcagcagagctctgagagcagcaccagctccccgtctcaacacgaggccactccaggggcaaggcggctgctgcgaatcaccaaaagaacagggatgaaagaagagaagaaccttcaggaaggaaatgaagttgattctcagagcagtattagaacagaagctaaagaggcttcaggtgagaccacaggagttgacatcactaaaattcaagtcaagagatgtgagaccatgagagagaagcacatgcagaaacagcaggagagggaaaaatcagtcttgacacctcttcggggagatgtagcctcttgcaatacccaagtggcagagaaaccagtgctcactgctgtgccaggaatcacacggcacctgaccaagcggcttcccacaaagtcatcccagaaggtggaggtagaaacctcagggattggagactcattattgaatgtgaaatgtgcagcacagaccttggaaaaaaggggtaaagctaaacccaaagtgaacgtgaagccatctgtggttaaagttgtgtcatcccccaaattggccccaaaacgtaaggcagtggagatgcacgctgctgtcattgccgctgtgaagccactcagctccagcagtgtcctacaggaacccccagccaaaaaggcagctgtggctgttgtcccgcttgtctctgaggacaaatcagtcactgtgcctgaagcagaaaatcctagagacagtcttgtgctgcctccaacccagtcctcttcagattcctcacccccggaggtgtctggcccttcctcatcccaaatgagcatgaaaactcgccgactcagctctgcctcaacaggaaagcccccactctctgtggaggatgattttgagaaactaatatgggagatttcaggaggcaaattggaagctgagattgacctggatcctgggaaagatgaagatgaccttctgcttgagctatcagaaatgattgatagctgaaggtggtagtgaggacactttaaaaaaaaaatcgccaaaaaactggacttagtttcatctattgtaacatttacctgagatgatcatttctttagtctagaatttgccccaaatcagaagtatacctctgaattatctgtatgtgtcctggattccttggggtcagatttttaaagttactttataaccattttgtccatttgatgccattgtttatcatcttttgagaaaaaagttctgtcatacccttctctccacaaaaaagagactgagagggagatcaagtgaaagggtgcaagcgaacttagtgactccttgaggtgtttgtcagttttggcttttttcttctttgttgtattctttatgtattgtcttgatgtacttaatattacctgagtttgaaatggatgaagacagctgctaccattaaggaccaaattttatgctaccactaaacaaaaatacccactcagtctgtgttaaattgtatgtctttttaaaggtatttaaagattcaactaagctttaaagagggctgagcagctcaggaagcctgtaatgtgggcataactctttggacctgatcttgatgcttctgctgctctgttagcctctgaagagcaatatctaatttattattactgtaattttttaaaaggctttaaagtgcctcaggggtcccctgaaactaattttctatttctgggattccctggattcattatatgagatggtgacatgattagaggaattcttttttagtatgaaaattgtcccttttcttcttcagtacttgcctccttgctggcattgaattaacacagggacaaaatttggttaattttttatttctaactctcccaacaaacccctgttgcccagtatttgtttggtggcctttaaccacctgagggaaaaaatgagcttattcaagctgccaatatttatctatgggctgtagcagtacactgaattgtactgtgccagggatattgagatgctctgggggtgtattgtatacctgccagttttcttcatttctgaattgagttttcttttcttgatgttggtttccttcatatcacctcaaggttcgataggtgagggcatacctgctgggacaacaatctgaacgggcacgtgggtcagacggaaggagcaaggctaccactggacacgcggacgtgcgcaggtccaaagggactggccccgtcgaggccaagaccgcgagacggcccgaataatcgaccgcggaatcccgccgagcccatggcgg

SEQ ID NO: 53187 - DNA, 810 bp, Homo sapiens
tgtagccaggcgccatctttgacgctggcagtcttggttttctgctagtgctgctgctgctgggaggacgacggacggcagcggccaagcaagaagaaagacgtggcagcaagcgggagtcggggatagtgtcatcggttcgcttaaatgttgatatatagatcagttttctgaggaaggtgatgaaaccaaaacacctaccctgcaaccaactcctgaagttcacaatggattacgagtgacttctgtccggaaacctgcagtcaatataaagcaaggtgaatgtttgaattttggaataaaaactcttgaggaaattaagtcaaagaaaatgaaggaaaaatctaagaagcaaggctgttgtaagcggctcatcaagagttgaacttcacgtagccttgttgggaatatggaaaaggaagaaagccacaggactgcccattcagtcttgggaagattgggatgattctgcacaagcaaaaatgactgaagtttatgtatagacacacctctaccaatccatcttcagctgactgaatgttgtatgatagcccttctccaaagcagaggtagaatgttcaggtttcaccatggattttctacttatttcgtttttggaatcaccttacagattccaggtcccttttgtatatattctttattcttttgcttttttaaaaaataattttgtttcatatttaaagcacttgtattagtcaatgtttcgtgttccgcattatttgaaccatttgcccttacagaaagagaaatacttgtttgtgttttaaataaaactgatgtaggaaagtc

SEQ ID NO: 53188 - DNA, 502 bp, Homo sapiens
tcagtaagcggagcatcagtaagggagctcagtaagcggagcagtaaggctgttgtaagcggctcatcaagagttgaacttcacgtagccttgttgggaatatggaaaaggaagaaagccacaggactgcccattcagtcttgggaagattgggatgattctgcacaagcaaaaatgactgaagtttatgtatagacacacctctaccaatccatcttcagctgactgaatgttgtatgatagcccttctccaaagcagaggtagaatgttcaggtttcaccatggattttctacttatttcgtttttggaatcaccttacagattccaggtcccttttgtatatattctttattcttttgcttttttaaaaaataattttgtttcatatttaaagcacttgtattagtcaatgtttcgtgttccgcattatttgaaccatttgcccttacagaaagagaaatacttgtttgtgttttaaataaaactgatgtaggaaagtc

SEQ ID NO: 53189 - DNA, 4695 bp, Homo sapiens
gttttatatttggaaatttctaattgcctcctcatactggtcagctttataatttcaaattgttgagtgtgatagtgttaccctttagaattggatcttatataaaagggaaatattagaaaacaattaggaaaatatacttttagtctttgaaatgcctgttttaacctttataaaatattataaaaatagattgtgtaggtactttcaaataatttatgggtaaaaacagactaaaatgtttgcaagaattggaaaaggttgaatgggaattgtaatgagagccctttgaacatgcttggaaaaacccagtagacatttcccaaagattgtttctgtaattttaggtaatctttttaaaaacatacttaatgacccattatactgtattaactgtgcggttgttttggccactgaattcttaatgaaaactaagcagtcggtatttttatgtgttaggaatcattggtgaaatgagtgaattgatctcattttaagatccctttctactctgaaagtatgtttctgagattgagtaggaggccagaaaatgatgacttttagtaaaagtctattaaaagtttcagactgaataactaatgtgagatcccaatttttccttttttttcattttagatttggggatattccctgcccaaaaaattcctggaaaattgactagtattaagtgtgagtaaaaggtgtccacttttttttaagttttgattttagttttgtcttggatagtatttggcaagatttagcctagaaattatgtagtatttattacataagaatcaaaattgctttgttactgggctggtttcaaagtttagaactcatttctatgtatcaaaatcgggttttttttggttttgatttttttttttttaaattcttaaatggtaaatatgccattgtgaaatgaaatctcaactccaaaagtttacccttttactaactggagtaaatgtatacttacaaagtctttagctgtagccattagtagtaaagaatttggacctaggctgcgtaagcaagcctttccagggccactatttaatggcaaaccagtgatactggtgttgatacaaaataagaaataaattttcccttagataaagctttctgtgttttgacagtgccagtttagaatggctataatgctgctctgccttctacagcttgctgcaccactctgtagttactctattaccatacgtttctatcttttttggttaaacactccctgatgacgatgatggatatatatacatacatccatattatacataatgatatatgtgtaaggatttaccttcgtctttattttgtgggctgggcaaaatttagtgtaacaataacttcatgatactttggtataagagtaagttctttatttttataatgaacccaaatctaaagtcttttatagtgcattttaaaaggggaaacttatccaaatgttatatttctatacatttttgtgtatatgtgtgtgtgtataagccagttagtatatatctgtatgtatattatatacataaaacactatatttttacatacaagtatgcttttattatacagataataaagatgggggaaggtttctgtttttttcttaataggtgaagaaatcttgaagaccagaaattggatcttactgaaaaactgatgtttttttgttttttttttaaattatattgttcagctatggaagatggatttttttttcatgatcctttaactctcaagttcatctttaaatgaactctttttttttgtttttttttggttttgttttgttttgtttttgaggagataactaaccctagctgtctccagtctgacaaaggttatttgaatggacttaatctcccagtagttgggagatgttttaaaaacacatgctgtgtttgaattgtggctgagaggttttcttggcaatgtgaggaggaaatttttttctgcctcattattattaattcatggattgagtgttggttcgacctacaggcgtaatagattggaactcagtgaagacacagatgttcctgttcagagcaaccagctaatgattacagtttaaagacaatttctgtgatcaagttgtcatttggaagattaaacccatttcacgaggacttggagcctggtccttgctttgaggaagcagtggcttgtttcaagaagccacttctgatctaagaatctacccagcatgcctaatcaaggagaagactgctatttttttttctattccacatgtaccaaaggcgacagctgcccattccgtcactgtgaagctgcaataggaaatgaaactgtttgcacattatggcaagaagggcgctgttttcgacaggtgtgcaggtttcggcacatggagattgataaaaaacgcagtgaaattccttgttattgggaaaatcagccaacaggatgtcaaaaattaaactgcgctttccatcacaatagaggacgatatgttgatggccttttcctacctccgagcaaaactgtgttgcccactgtgcctgagtcaccagaagaggaagtgaaggctagccaactttcagttcagcagaacaaattgtctgtccagtccaatccttcccctcagctgcggagcgttatgaaagtagaaagttccgaaaatgttcctagccccacgcatccaccagttgtaattaatgctgcagatgatgatgaagatgatgatgatcagttttctgaggaaggtgatgaaaccaaaacacctaccctgcaaccaactcctgaagttcacaatggattacgagtgacttctgtccggaaacctgcagtcaatataaagcaaggtgaatgtttgaattttggaataaaaactcttgaggaaattaagtcaaagaaaatgaaggaaaaatctaagaagcaaggtgagggttcttcaggagtttccagtcttttactccaccctgagcccgttccaggtcctgaaaaagaaaatgtcaggactgtggtgaggacagtaactctctccaccaaacaaggagaagaacccttggttagattgagtcttactgagagactggggaaacgaaaattttcagcaggcggtgacagtgatcctccattaaagcgtagcctggcacagaggctagggaagaaagttgaagctccagaaactaacattgacaaaacaccaaagaaagctcaagtttccaagtctcttaaggagcgattaggcatgtcagctgatccagataatgaggatgcaacagataaagttaataaagttggtgagatccatgtgaagacattagaagaaattcttcttgaaagagccagtcagaaacgtggagaattgcaaactaaactcaagacagaaggaccttcaaaaactgatgattctacttcaggagcaagaagctcctccactatccgtatcaaaaccttctctgaggtcctggctgaaaaaaaacatcggcagcaggaagcagagagacaaaaaagcaaaaaggatacaacttgcatcaagctaaagattgatagtgaaattaaaaaaacagtagttttgccacccattgttgccagcagaggacaatcagaggagcctgcaggtaaaacaaagtctatgcaggaggtgcacatcaagacgctggaagaaattaaactggagaaggcactgagggtgcagcagagctctgagagcagcaccagctccccgtctcaacacgaggccactccaggggcaaggcggctgctgcgaatcaccaaaagaacagggcatgcaacagcacacgcagcacagcaacccttccaggcacagtgcaacatgaaagttcgcatctctccacgagccagtcataccacgcacaccagacagcatcaaccagcagtgcctctccacggtgcagaaccaccagcgcagtgtcgaccatccactacacaatatcaacgtcaacgcagcactgtgagcaccactgagcagaccgcaagcaccatgcacgacaacagcaacggaacacggcaacaccatcaactcttgaacacacctcttccgcgggcagatgtcgccatctcttcgcaataccccacagctggcacgcagataaaacagatgctaccaacatgcatgtagccagagaaatcacacaggcaccatgaccaaagacggcatacacaacacaacagtcatcccaacgaacggctgggagcgtacgacaccctccaggcgcatacgcgaggcaaactcaatccactcacgaaccctgctcgcccaccaatccgtcggccacgccaccaaacaccacaaccgcgcacacaaaacacgcaggcgagttaaacagactgacaacccgcacaacgtcagacaccacacacaaacgcaatcaaagtccgacccacaaccaacgcaggacacaaccacaccaacacaacgcgaccacaaaaacacaacctcaaaaggccaaagtcaggaagcacatagtcagcccatgccccagcacgactctgccccgcttgccggcgaagaccacagttccacgctaccacaccaacatcgaacccacacccggcacaaaccagccacaacaacaccaacagacaacacctaaggacaagacacgccccagaccgtaaccaccgcgccaaccaaaaagaaacccaaccgaccgccctcaaaacaccgagcaaaaaatcacaaaaccccg

SEQ ID NO: 53190 - DNA, 915 bp, Homo sapiens
tgtagccaggcgccatctttgacgctggcagtcttggttttctgctagtgctgctgctgctgggaggacgacggacggcagcggccaagcaagaagaaagacgtggcagcaagcgggagtcggggatagtgtcatcggttcggtaaagtttctgttctctgggtcccggtactttggagcttgtctcaaactccacatacagaaagccaccgaccttattccggtatcctacacccattccccactctcattacactcccacccctggccctcagcgtcggagtcaagagcaacagggacacttccgttctccttgtaggactggtgaaaccgtaatgaagaacacccctaaactcccataatcggtgcggattcctatggggaaggcctatattgttgacatcttccaggccttggttctggaccttgagaaagaggctgtggaactagagatagcgatgctttttagggtaaatgtatgtaggtattgggggaaggggagggatcaatcgaaaaatggaagtggtttaaagttcatatttcactttttgctatctctatagcgtacaacttgtgagttacttacaggctgtaaaagcttctcaagtctaaaaatatctgaaaactaaacttgaattaactcttaatacaaacagtactttgaaaatgcagcatttaaccttgttttaaaatttttttctcaaagcatttttttccagccactcacattttaaaaggttgtattacttttagttagaactgaaagggctcaactagcatttgctgtgaccagtatgcggagtctgtgttggctttccagaattgactttttgggttgtattggcaaatcacagtcctaaatgatgaatgttgaatgatgcactatgtttttgtttaaatgagatttcctgaaaa

SEQ ID NO: 53191 - DNA, 447 bp, Homo sapiens
atttgcccttacagaaagagaaatacttgtttgtgttttaaataaaactgatgtaggaaagtcttgatgttgtgagctaagtaatcttacatcatcatatcagcctgggatccatcttgacaagagaccccagacagaatgctattggcctttcgtgtaagtgcccgaatttcagttattatttggcttagaaacctttcatctggatatattgccaaatttacaagtgtgctcaattttagctgcatatgctttaggtaagaatttatattattataatgtgaggattttttttctgacacggatacttactccttagtgttgtaactcaagcaatgccattaagtttttaaaaggagggagggtttaaaagtgatcttagggagtctctctgggcctactctggctcaagaggctgataaaaaataaataaatgaataaacttga

SEQ ID NO: 53192 - DNA, 426 bp, Homo sapiens
aggctcccgttcctcataaaatttctatttgaattttcaggtgaatgtttgaattttggaataaaaactcttgaggaaattaagtcaaagaaaatgaaggaaaaatctaagaagcaaggtggtaagtcatcacgttttggcatggatagttgtatgttgctagggaagaatactaaggacgcttctagaagcaacagccaaaatgagcaaatagattttcatttccatggcctgtttgaagtaaaacacagacttatttaaattgtggttgcttttaattcactgcagctgtgtttcagtccctaacttttcagagctgggtacaataaagaatctgaaagaacttgtatatcttgaaaaatatagctctgaagaacatcatataagaactatattaattctgtaagttcttatagtggttaaaaa

SEQ ID NO: 53193 - DNA, 5905 bp, Homo sapiens
tgtagccaggcgccatctttgacgctggcagtcttggttttctgctagtgctgctgctgctgggaggacgacggacggcagcggccaagcaagaagaaagacgtggcagcaagcgggagtcggggatagtgtcatcggttcggtaaagtttctgttctctgatttggggatattccctgcccaaaaaattcctggaaaattgactagtattaagtgtgagtaaaaggtgtccacttttttttaagttttgattttagttttgtcttggatagtatttggcaagatttagcctagaaattatgtagtatttattacataagaatcaaaattgctttgttactgggctggtttcaaagtttagaactcatttctatgtatcaaaatcgggttttttttggttttgatttttttttttttaaattcttaaatggtaaatatgccattgtgaaatgaaatctcaactccaaaagtttacccttttactaactggagtaaatgtatacttacaaagtctttagctgtagccattagtagtaaagaatttggacctaggctgcgtaagcaagcctttccagggccactatttaatggcaaaccagtgatactggtgttgatacaaaataagaaataaattttcccttagataaagctttctgtgttttgacagtgccagtttagaatggctataatgctgctctgccttctacagcttgctgcaccactctgtagttactctattaccatacgtttctatcttttttggttaaacactccctgatgacgatgatggatatatatacatacatccatattatacataatgatatatgtgtaaggatttaccttcgtctttattttgtgggctgggcaaaatttagtgtaacaataacttcatgatactttggtataagagtaagttctttatttttataatgaacccaaatctaaagtcttttatagtgcattttaaaaggggaaacttatccaaatgttatatttctatacatttttgtgtatatgtgtgtgtgtataagccagttagtatatatctgtatgtatattatatacataaaacactatatttttacatacaagtatgcttttattatacagataataaagatgggggaaggtttctgtttttttcttaataggtgaagaaatcttgaagaccagaaattggatcttactgaaaaactgatgtttttttgttttttttttaaattatattgttcagctatggaagatggatttttttttcatgatcctttaactctcaagttcatctttaaatgaactctttttttttgtttttttttggttttgttttgttttgtttttgaggagataactaaccctagctgtctccagtctgacaaaggttatttgaatggacttaatctcccagtagttgggagatgttttaaaaacacatgctgtgtttgaattgtggctgagaggttttcttggcaatgtgaggaggaaatttttttctgcctcattattattaattcatggattgagtgttggttcgacctacaggcgtaatagattggaactcagtgaagacacagatgttcctgttcagagcaaccagctaatgattacagtttaaagacaatttctgtgatcaagttgtcatttggaagattaaacccatttcacgaggacttggagcctggtccttgctttgaggaagcagtggcttgtttcaagaagccacttctgatctaagaatctacccagcatgcctaatcaaggagaagactgctatttttttttctattccacatgtaccaaaggcgacagctgcccattccgtcactgtgaagctgcaataggaaatgaaactgtttgcacattatggcaagaagggcgctgttttcgacaggtgtgcaggtttcggcacatggagattgataaaaaacgcagtgaaattccttgttattgggaaaatcagccaacaggatgtcaaaaattaaactgcgctttccatcacaatagaggacgatatgttgatggccttttcctacctccgagcaaaactgtgttgcccactgtgcctgagtcaccagaagaggaagtgaaggctagccaactttcagttcagcagaacaaattgtctgtccagtccaatccttcccctcagctgcggagcgttatgaaagtagaaagttccgaaaatgttcctagccccacgcatccaccagttgtaattaatgctgcagatgatgatgaagatgatgatgatcagttttctgaggaaggtgatgaaaccaaaacacctaccctgcaaccaactcctgaagttcacaatggattacgagtgacttctgtccggaaacctgcagtcaatataaagcaaggtgaatgtttgaattttggaataaaaactcttgaggaaattaagtcaaagaaaatgaaggaaaaatctaagaagcaaggtgagggttcttcaggagtttccagtcttttactccaccctgagcccgttccaggtcctgaaaaagaaaatgtcaggactgtggtgaggacagtaactctctccaccaaacaaggagaagaacccttggttagattgagtcttactgagagactggggaaacgaaaattttcagcaggcggtgacagtgatcctccattaaagcgtagcctggcacagaggctagggaagaaagttgaagctccagaaactaacattgacaaaacaccaaagaaagctcaagtttccaagtctcttaaggagcgattaggcatgtcagctgatccagataatgaggatgcaacagataaagttaataaagttggtgagatccatgtgaagacattagaagaaattcttcttgaaagagccagtcagaaacgtggagaattgcaaactaaactcaagacagaaggaccttcaaaaactgatgattctacttcaggagcaagaagctcctccactatccgtatcaaaaccttctctgaggtcctggctgaaaaaaaacatcggcagcaggaagcagagagacaaaaaagcaaaaaggatacaacttgcatcaagctaaagattgatagtgaaattaaaaaaacagtagttttgccacccattgttgccagcagaggacaatcagaggagcctgcaggtaaaacaaagtctatgcaggaggtgcacatcaagacgctggaagaaattaaactggagaaggcactgagggtgcagcagagctctgagagcagcaccagctccccgtctcaacacgaggccactccaggggcaaggcggctgctgcgaatcaccaaaagaacagggatgaaagaagagaagaaccttcaggaaggaaatgaagttgattctcagagcagtattagaacagaagctaaagaggcttcaggtgagaccacaggagttgacatcactaaaattcaagtcaagagatgtgagaccatgagagagaagcacatgcagaaacagcaggagagggaaaaatcagtcttgacacctcttcggggagatgtagcctcttgcaatacccaagtggcagagaaaccagtgctcactgctgtgccaggaatcacacggcacctgaccaagcggcttcccacaaagtcatcccagaaggtggaggtagaaacctcagggattggagactcattattgaatgtgaaatgtgcagcacagaccttggaaaaaaggggtaaagctaaacccaaagtgaacgtgaagccatctgtggttaaagttgtgtcatcccccaaattggccccaaaacgtaaggcagtggagatgcacgctgctgtcattgccgctgtgaagccactcagctccagcagtgtcctacaggaacccccagccaaaaaggcagctgtggctgttgtcccgcttgtctctgaggacaaatcagtcactgtgcctgaagcagaaaatcctagagacagtcttgtgctgcctccaacccagtcctcttcagattcctcacccccggaggtgtctggcccttcctcatcccaaatgagcatgaaaactcgccgactcagctctgcctcaacaggaaagcccccactctctgtggaggatgattttgagaaactaatatgggagatttcaggaggcaaattggaagctgagattgacctggatcctgggaaagatgaagatgaccttctgcttgagctatcagaaatgattgatagctgaaggtggtagtgaggacactttaaaaaaaaaatcgccaaaaaactggacttagtttcatctattgtaacatttacctgagatgatcatttctttagtctagaatttgccccaaatcagaagtatacctctgaattatctgtatgtgtcctggattccttggggtcagatttttaaagttactttataaccattttgtccatttgatgccattgtttatcatcttttgagaaaaaagttctgtcatacccttctctccacaaaaaagagactgagagggagatcaagtgaaagggtgcaagcgaacttagtgactccttgaggtgtttgtcagttttggcttttttcttctttgttgtattctttatgtattgtcttgatgtacttaatattacctgagtttgaaatggatgaagacagctgctaccattaaggaccaaattttatgctaccactaaacaaaaatacccactcagtctgtgttaaattgtatgtctttttaaaggtatttaaagattcaactaagctttaaagagggctgagcagctcaggaagcctgtaatgtgggcataactctttggacctgatcttgatgcttctgctgctctgttagcctctgaagagcaatatctaatttattattactgtaattttttaaaaggctttaaagtgcctcaggggtcccctgaaactaattttctatttctgggattccctggattcattatatgagatggtgacatgattagaggaattcttttttagtatgaaaattgtcccttttcttcttcagtacttgcctccttgctggcattgaattaacacagggacaaaatttggttaattttttatttctaactctcccaacaaacccctgttgcccagtatttgtttggtggcctttaaccacctgagggaaaaaatgagcttattcaagctgccaatatttatctatgggctgtagcagtacactgaattgtactgtgccagggatattgagatgctctgggggtgtattgtatacctgccagttttcttcatttctgaattgagttttcttttcttgatgttggtttccttcatatcacctcaaggtttagatttgtgaaggaataagcatgatggaaataatagtcttgaaaggagatatgttgtatataatcaggaggaagaggaaggaaggacttacccattttgatattttgctgtaggtggccagttttgtttctcatagggaaatctgacccacctgtcatgttggctcctaaggaactgctgttgtaagcggctcatcaagagttgaacttcacgtagccttgttgggaatatggaaaaggaagaaagccacaggactgcccattcagtcttgggaagattgggatgattctgcacaagcaaaaatgactgaagtttatgtatagacacacctctaccaatccatcttcagctgactgaatgttgtatgatagcccttctccaaagcagaggtagaatgttcaggtttcaccatggattttctacttatttcgtttttggaatcaccttacagattccaggtcccttttgtatatattctttattcttttgcttttttaaaaaataattttgtttcatatttaaagcacttgtattagtcaatgtttcgtgttccgcattatttgaaccatttgcccttacagaaagagaaatacttgtttgtgttttaaataaaactgatgtaggaaagtc

SEQ ID NO: 53194 - DNA, 6056 bp, Homo sapiens
tgtagccaggcgccatctttgacgctggcagtcttggttttctgctagtgctgctgctgctgggaggacgacggacggcagcggccaagcaagaagaaagacgtggcagcaagcgggagtcggggatagtgtcatcggttcggtaaagtttctgttctctggactggtgaaaccgtaatgaagaacacccctaaactcccataatcggtgcggattcctatggggaaggcctatattgttgacatcttccaggccttggttctggaccttgagaaagaggctgtggaactagagatagcgatgctttttaggatttggggatattccctgcccaaaaaattcctggaaaattgactagtattaagtgtgagtaaaaggtgtccacttttttttaagttttgattttagttttgtcttggatagtatttggcaagatttagcctagaaattatgtagtatttattacataagaatcaaaattgctttgttactgggctggtttcaaagtttagaactcatttctatgtatcaaaatcgggttttttttggttttgatttttttttttttaaattcttaaatggtaaatatgccattgtgaaatgaaatctcaactccaaaagtttacccttttactaactggagtaaatgtatacttacaaagtctttagctgtagccattagtagtaaagaatttggacctaggctgcgtaagcaagcctttccagggccactatttaatggcaaaccagtgatactggtgttgatacaaaataagaaataaattttcccttagataaagctttctgtgttttgacagtgccagtttagaatggctataatgctgctctgccttctacagcttgctgcaccactctgtagttactctattaccatacgtttctatcttttttggttaaacactccctgatgacgatgatggatatatatacatacatccatattatacataatgatatatgtgtaaggatttaccttcgtctttattttgtgggctgggcaaaatttagtgtaacaataacttcatgatactttggtataagagtaagttctttatttttataatgaacccaaatctaaagtcttttatagtgcattttaaaaggggaaacttatccaaatgttatatttctatacatttttgtgtatatgtgtgtgtgtataagccagttagtatatatctgtatgtatattatatacataaaacactatatttttacatacaagtatgcttttattatacagataataaagatgggggaaggtttctgtttttttcttaataggtgaagaaatcttgaagaccagaaattggatcttactgaaaaactgatgtttttttgttttttttttaaattatattgttcagctatggaagatggatttttttttcatgatcctttaactctcaagttcatctttaaatgaactctttttttttgtttttttttggttttgttttgttttgtttttgaggagataactaaccctagctgtctccagtctgacaaaggttatttgaatggacttaatctcccagtagttgggagatgttttaaaaacacatgctgtgtttgaattgtggctgagaggttttcttggcaatgtgaggaggaaatttttttctgcctcattattattaattcatggattgagtgttggttcgacctacaggcgtaatagattggaactcagtgaagacacagatgttcctgttcagagcaaccagctaatgattacagtttaaagacaatttctgtgatcaagttgtcatttggaagattaaacccatttcacgaggacttggagcctggtccttgctttgaggaagcagtggcttgtttcaagaagccacttctgatctaagaatctacccagcatgcctaatcaaggagaagactgctatttttttttctattccacatgtaccaaaggcgacagctgcccattccgtcactgtgaagctgcaataggaaatgaaactgtttgcacattatggcaagaagggcgctgttttcgacaggtgtgcaggtttcggcacatggagattgataaaaaacgcagtgaaattccttgttattgggaaaatcagccaacaggatgtcaaaaattaaactgcgctttccatcacaatagaggacgatatgttgatggccttttcctacctccgagcaaaactgtgttgcccactgtgcctgagtcaccagaagaggaagtgaaggctagccaactttcagttcagcagaacaaattgtctgtccagtccaatccttcccctcagctgcggagcgttatgaaagtagaaagttccgaaaatgttcctagccccacgcatccaccagttgtaattaatgctgcagatgatgatgaagatgatgatgatcagttttctgaggaaggtgatgaaaccaaaacacctaccctgcaaccaactcctgaagttcacaatggattacgagtgacttctgtccggaaacctgcagtcaatataaagcaaggtgaatgtttgaattttggaataaaaactcttgaggaaattaagtcaaagaaaatgaaggaaaaatctaagaagcaaggtgagggttcttcaggagtttccagtcttttactccaccctgagcccgttccaggtcctgaaaaagaaaatgtcaggactgtggtgaggacagtaactctctccaccaaacaaggagaagaacccttggttagattgagtcttactgagagactggggaaacgaaaattttcagcaggcggtgacagtgatcctccattaaagcgtagcctggcacagaggctagggaagaaagttgaagctccagaaactaacattgacaaaacaccaaagaaagctcaagtttccaagtctcttaaggagcgattaggcatgtcagctgatccagataatgaggatgcaacagataaagttaataaagttggtgagatccatgtgaagacattagaagaaattcttcttgaaagagccagtcagaaacgtggagaattgcaaactaaactcaagacagaaggaccttcaaaaactgatgattctacttcaggagcaagaagctcctccactatccgtatcaaaaccttctctgaggtcctggctgaaaaaaaacatcggcagcaggaagcagagagacaaaaaagcaaaaaggatacaacttgcatcaagctaaagattgatagtgaaattaaaaaaacagtagttttgccacccattgttgccagcagaggacaatcagaggagcctgcaggtaaaacaaagtctatgcaggaggtgcacatcaagacgctggaagaaattaaactggagaaggcactgagggtgcagcagagctctgagagcagcaccagctccccgtctcaacacgaggccactccaggggcaaggcggctgctgcgaatcaccaaaagaacagggatgaaagaagagaagaaccttcaggaaggaaatgaagttgattctcagagcagtattagaacagaagctaaagaggcttcaggtgagaccacaggagttgacatcactaaaattcaagtcaagagatgtgagaccatgagagagaagcacatgcagaaacagcaggagagggaaaaatcagtcttgacacctcttcggggagatgtagcctcttgcaatacccaagtggcagagaaaccagtgctcactgctgtgccaggaatcacacggcacctgaccaagcggcttcccacaaagtcatcccagaaggtggaggtagaaacctcagggattggagactcattattgaatgtgaaatgtgcagcacagaccttggaaaaaaggggtaaagctaaacccaaagtgaacgtgaagccatctgtggttaaagttgtgtcatcccccaaattggccccaaaacgtaaggcagtggagatgcacgctgctgtcattgccgctgtgaagccactcagctccagcagtgtcctacaggaacccccagccaaaaaggcagctgtggctgttgtcccgcttgtctctgaggacaaatcagtcactgtgcctgaagcagaaaatcctagagacagtcttgtgctgcctccaacccagtcctcttcagattcctcacccccggaggtgtctggcccttcctcatcccaaatgagcatgaaaactcgccgactcagctctgcctcaacaggaaagcccccactctctgtggaggatgattttgagaaactaatatgggagatttcaggaggcaaattggaagctgagattgacctggatcctgggaaagatgaagatgaccttctgcttgagctatcagaaatgattgatagctgaaggtggtagtgaggacactttaaaaaaaaaatcgccaaaaaactggacttagtttcatctattgtaacatttacctgagatgatcatttctttagtctagaatttgccccaaatcagaagtatacctctgaattatctgtatgtgtcctggattccttggggtcagatttttaaagttactttataaccattttgtccatttgatgccattgtttatcatcttttgagaaaaaagttctgtcatacccttctctccacaaaaaagagactgagagggagatcaagtgaaagggtgcaagcgaacttagtgactccttgaggtgtttgtcagttttggcttttttcttctttgttgtattctttatgtattgtcttgatgtacttaatattacctgagtttgaaatggatgaagacagctgctaccattaaggaccaaattttatgctaccactaaacaaaaatacccactcagtctgtgttaaattgtatgtctttttaaaggtatttaaagattcaactaagctttaaagagggctgagcagctcaggaagcctgtaatgtgggcataactctttggacctgatcttgatgcttctgctgctctgttagcctctgaagagcaatatctaatttattattactgtaattttttaaaaggctttaaagtgcctcaggggtcccctgaaactaattttctatttctgggattccctggattcattatatgagatggtgacatgattagaggaattcttttttagtatgaaaattgtcccttttcttcttcagtacttgcctccttgctggcattgaattaacacagggacaaaatttggttaattttttatttctaactctcccaacaaacccctgttgcccagtatttgtttggtggcctttaaccacctgagggaaaaaatgagcttattcaagctgccaatatttatctatgggctgtagcagtacactgaattgtactgtgccagggatattgagatgctctgggggtgtattgtatacctgccagttttcttcatttctgaattgagttttcttttcttgatgttggtttccttcatatcacctcaaggtttagatttgtgaaggaataagcatgatggaaataatagtcttgaaaggagatatgttgtatataatcaggaggaagaggaaggaaggacttacccattttgatattttgctgtaggtggccagttttgtttctcatagggaaatctgacccacctgtcatgttggctcctaaggaactgctgttgtaagcggctcatcaagagttgaacttcacgtagccttgttgggaatatggaaaaggaagaaagccacaggactgcccattcagtcttgggaagattgggatgattctgcacaagcaaaaatgactgaagtttatgtatagacacacctctaccaatccatcttcagctgactgaatgttgtatgatagcccttctccaaagcagaggtagaatgttcaggtttcaccatggattttctacttatttcgtttttggaatcaccttacagattccaggtcccttttgtatatattctttattcttttgcttttttaaaaaataattttgtttcatatttaaagcacttgtattagtcaatgtttcgtgttccgcattatttgaaccatttgcccttacagaaagagaaatacttgtttgtgttttaaataaaactgatgtaggaaagtc

SEQ ID NO: 53195 - DNA, 5087 bp, Homo sapiens
tgtagccaggcgccatctttgacgctggcagtcttggttttctgctagtgctgctgctgctgggaggacgacggacggcagcggccaagcaagaagaaagacgtggcagcaagcgggagtcggggatagtgtcatcggttcggtaaagtttctgttctctgggtcccggtactttggagcttgtctcaaactccacatacagaaagccaccgaccttattccggtatcctacacccattccccactctcattacactcccacccctggccctcagcgtcggagtcaagagcaacagggacacttccgttctccttgtaggactggtgaaaccgtaatgaagaacacccctaaactcccataatcgatttggggatattccctgcccaaaaaattcctggaaaattgactagtattaagtctatggaagatggatttttttttcatgatcctttaactctcaagttcatctttaaatgaactctttttttttgtttttttttggttttgttttgttttgtttttgaggagataactaaccctagctgtctccagtctgacaaaggttatttgaatggacttaatctcccagtagttgggagatgttttaaaaacacatgctgtgtttgaattgtggctgagaggttttcttggcaatgtgaggaggaaatttttttctgcctcattattattaattcatggattgagtgttggttcgacctacaggcgtaatagattggaactcagtgaagacacagatgttcctgttcagagcaaccagctaatgattacagtttaaagacaatttctgtgatcaagttgtcatttggaagattaaacccatttcacgaggacttggagcctggtccttgctttgaggaagcagtggcttgtttcaagaagccacttctgatctaagaatctacccagcatgcctaatcaaggagaagactgctatttttttttctattccacatgtaccaaaggcgacagctgcccattccgtcactgtgaagctgcaataggaaatgaaactgtttgcacattatggcaagaagggcgctgttttcgacaggtgtgcaggtttcggcacatggagattgataaaaaacgcagtgaaattccttgttattgggaaaatcagccaacaggatgtcaaaaattaaactgcgctttccatcacaatagaggacgatatgttgatggccttttcctacctccgagcaaaactgtgttgcccactgtgcctgagtcaccagaagaggaagtgaaggctagccaactttcagttcagcagaacaaattgtctgtccagtccaatccttcccctcagctgcggagcgttatgaaagtagaaagttccgaaaatgttcctagccccacgcatccaccagttgtaattaatgctgcagatgatgatgaagatgatgatgatcagttttctgaggaaggtgatgaaaccaaaacacctaccctgcaaccaactcctgaagttcacaatggattacgagtgacttctgtccggaaacctgcagtcaatataaagcaaggtgaatgtttgaattttggaataaaaactcttgaggaaattaagtcaaagaaaatgaaggaaaaatctaagaagcaaggtgagggttcttcaggagtttccagtcttttactccaccctgagcccgttccaggtcctgaaaaagaaaatgtcaggactgtggtgaggacagtaactctctccaccaaacaaggagaagaacccttggttagattgagtcttactgagagactggggaaacgaaaattttcagcaggcggtgacagtgatcctccattaaagcgtagcctggcacagaggctagggaagaaagttgaagctccagaaactaacattgacaaaacaccaaagaaagctcaagtttccaagtctcttaaggagcgattaggcatgtcagctgatccagataatgaggatgcaacagataaagttaataaagttggtgagatccatgtgaagacattagaagaaattcttcttgaaagagccagtcagaaacgtggagaattgcaaactaaactcaagacagaaggaccttcaaaaactgatgattctacttcaggagcaagaagctcctccactatccgtatcaaaaccttctctgaggtcctggctgaaaaaaaacatcggcagcaggaagcagagagacaaaaaagcaaaaaggatacaacttgcatcaagctaaagattgatagtgaaattaaaaaaacagtagttttgccacccattgttgccagcagaggacaatcagaggagcctgcaggtaaaacaaagtctatgcaggaggtgcacatcaagacgctggaagaaattaaactggagaaggcactgagggtgcagcagagctctgagagcagcaccagctccccgtctcaacacgaggccactccaggggcaaggcggctgctgcgaatcaccaaaagaacagggatgaaagaagagaagaaccttcaggaaggaaatgaagttgattctcagagcagtattagaacagaagctaaagaggcttcaggtgagaccacaggagttgacatcactaaaattcaagtcaagagatgtgagaccatgagagagaagcacatgcagaaacagcaggagagggaaaaatcagtcttgacacctcttcggggagatgtagcctcttgcaatacccaagtggcagagaaaccagtgctcactgctgtgccaggaatcacacggcacctgaccaagcggcttcccacaaagtcatcccagaaggtggaggtagaaacctcagggattggagactcattattgaatgtgaaatgtgcagcacagaccttggaaaaaaggggtaaagctaaacccaaagtgaacgtgaagccatctgtggttaaagttgtgtcatcccccaaattggccccaaaacgtaaggcagtggagatgcacgctgctgtcattgccgctgtgaagccactcagctccagcagtgtcctacaggaacccccagccaaaaaggcagctgtggctgttgtcccgcttgtctctgaggacaaatcagtcactgtgcctgaagcagaaaatcctagagacagtcttgtgctgcctccaacccagtcctcttcagattcctcacccccggaggtgtctggcccttcctcatcccaaatgagcatgaaaactcgccgactcagctctgcctcaacaggaaagcccccactctctgtggaggatgattttgagaaactaatatgggagatttcaggaggcaaattggaagctgagattgacctggatcctgggaaagatgaagatgaccttctgcttgagctatcagaaatgattgatagctgaaggtggtagtgaggacactttaaaaaaaaaatcgccaaaaaactggacttagtttcatctattgtaacatttacctgagatgatcatttctttagtctagaatttgccccaaatcagaagtatacctctgaattatctgtatgtgtcctggattccttggggtcagatttttaaagttactttataaccattttgtccatttgatgccattgtttatcatcttttgagaaaaaagttctgtcatacccttctctccacaaaaaagagactgagagggagatcaagtgaaagggtgcaagcgaacttagtgactccttgaggtgtttgtcagttttggcttttttcttctttgttgtattctttatgtattgtcttgatgtacttaatattacctgagtttgaaatggatgaagacagctgctaccattaaggaccaaattttatgctaccactaaacaaaaatacccactcagtctgtgttaaattgtatgtctttttaaaggtatttaaagattcaactaagctttaaagagggctgagcagctcaggaagcctgtaatgtgggcataactctttggacctgatcttgatgcttctgctgctctgttagcctctgaagagcaatatctaatttattattactgtaattttttaaaaggctttaaagtgcctcaggggtcccctgaaactaattttctatttctgggattccctggattcattatatgagatggtgacatgattagaggaattcttttttagtatgaaaattgtcccttttcttcttcagtacttgcctccttgctggcattgaattaacacagggacaaaatttggttaattttttatttctaactctcccaacaaacccctgttgcccagtatttgtttggtggcctttaaccacctgagggaaaaaatgagcttattcaagctgccaatatttatctatgggctgtagcagtacactgaattgtactgtgccagggatattgagatgctctgggggtgtattgtatacctgccagttttcttcatttctgaattgagttttcttttcttgatgttggtttccttcatatcacctcaaggtttagatttgtgaaggaataagcatgatggaaataatagtcttgaaaggagatatgttgtatataatcaggaggaagaggaaggaaggacttacccattttgatattttgctgtaggtggccagttttgtttctcatagggaaatctgacccacctgtcatgttggctcctaaggaactgctgttgtaagcggctcatcaagagttgaacttcacgtagccttgttgggaatatggaaaaggaagaaagccacaggactgcccattcagtcttgggaagattgggatgattctgcacaagcaaaaatgactgaagtttatgtatagacacacctctaccaatccatcttcagctgactgaatgttgtatgatagcccttctccaaagcagaggtagaatgttcaggtttcaccatggattttctacttatttcgtttttggaatcaccttacagattccaggtcccttttgtatatattctttattcttttgcttttttaaaaaataattttgtttcatatttaaagcacttgtattagtcaatgtttcgtgttccgcattatttgaaccatttgcccttacagaaagagaaatacttgtttgtgttttaaataaaactgatgtaggaaagtc

SEQ ID NO: 53196 - DNA, 4782 bp, Homo sapiens
tgtagccaggcgccatctttgacgctggcagtcttggttttctgctagtgctgctgctgctgggaggacgacggacggcagcggccaagcaagaagaaagacgtggcagcaagcgggagtcggggatagtgtcatcggttcggtaaagtttctgttctctgggtcccggtactttggagcttgtctcaaactccacatacagaaagccaccgaccttattccggtatcctacacccattccccactctcattacactcccacccctggccctcagcgtcggagtcaagagcaacagggacacttccgttctccttgtaggactggtgaaaccgtaatgaagaacacccctaaactcccataatcgatttggggatattccctgcccaaaaaattcctggaaaattgactagtattaagtgcgtaatagattggaactcagtgaagacacagatgttcctgttcagagcaaccagctaatgattacagtttaaagacaatttctgtgatcaagttgtcatttggaagattaaacccatttcacgaggacttggagcctggtccttgctttgaggaagcagtggcttgtttcaagaagccacttctgatctaagaatctacccagcatgcctaatcaaggagaagactgctatttttttttctattccacatgtaccaaaggcgacagctgcccattccgtcactgtgaagctgcaataggaaatgaaactgtttgcacattatggcaagaagggcgctgttttcgacaggtgtgcaggtttcggcacatggagattgataaaaaacgcagtgaaattccttgttattgggaaaatcagccaacaggatgtcaaaaattaaactgcgctttccatcacaatagaggacgatatgttgatggccttttcctacctccgagcaaaactgtgttgcccactgtgcctgagtcaccagaagaggaagtgaaggctagccaactttcagttcagcagaacaaattgtctgtccagtccaatccttcccctcagctgcggagcgttatgaaagtagaaagttccgaaaatgttcctagccccacgcatccaccagttgtaattaatgctgcagatgatgatgaagatgatgatgatcagttttctgaggaaggtgatgaaaccaaaacacctaccctgcaaccaactcctgaagttcacaatggattacgagtgacttctgtccggaaacctgcagtcaatataaagcaaggtgaatgtttgaattttggaataaaaactcttgaggaaattaagtcaaagaaaatgaaggaaaaatctaagaagcaaggtgagggttcttcaggagtttccagtcttttactccaccctgagcccgttccaggtcctgaaaaagaaaatgtcaggactgtggtgaggacagtaactctctccaccaaacaaggagaagaacccttggttagattgagtcttactgagagactggggaaacgaaaattttcagcaggcggtgacagtgatcctccattaaagcgtagcctggcacagaggctagggaagaaagttgaagctccagaaactaacattgacaaaacaccaaagaaagctcaagtttccaagtctcttaaggagcgattaggcatgtcagctgatccagataatgaggatgcaacagataaagttaataaagttggtgagatccatgtgaagacattagaagaaattcttcttgaaagagccagtcagaaacgtggagaattgcaaactaaactcaagacagaaggaccttcaaaaactgatgattctacttcaggagcaagaagctcctccactatccgtatcaaaaccttctctgaggtcctggctgaaaaaaaacatcggcagcaggaagcagagagacaaaaaagcaaaaaggatacaacttgcatcaagctaaagattgatagtgaaattaaaaaaacagtagttttgccacccattgttgccagcagaggacaatcagaggagcctgcaggtaaaacaaagtctatgcaggaggtgcacatcaagacgctggaagaaattaaactggagaaggcactgagggtgcagcagagctctgagagcagcaccagctccccgtctcaacacgaggccactccaggggcaaggcggctgctgcgaatcaccaaaagaacagggatgaaagaagagaagaaccttcaggaaggaaatgaagttgattctcagagcagtattagaacagaagctaaagaggcttcaggtgagaccacaggagttgacatcactaaaattcaagtcaagagatgtgagaccatgagagagaagcacatgcagaaacagcaggagagggaaaaatcagtcttgacacctcttcggggagatgtagcctcttgcaatacccaagtggcagagaaaccagtgctcactgctgtgccaggaatcacacggcacctgaccaagcggcttcccacaaagtcatcccagaaggtggaggtagaaacctcagggattggagactcattattgaatgtgaaatgtgcagcacagaccttggaaaaaaggggtaaagctaaacccaaagtgaacgtgaagccatctgtggttaaagttgtgtcatcccccaaattggccccaaaacgtaaggcagtggagatgcacgctgctgtcattgccgctgtgaagccactcagctccagcagtgtcctacaggaacccccagccaaaaaggcagctgtggctgttgtcccgcttgtctctgaggacaaatcagtcactgtgcctgaagcagaaaatcctagagacagtcttgtgctgcctccaacccagtcctcttcagattcctcacccccggaggtgtctggcccttcctcatcccaaatgagcatgaaaactcgccgactcagctctgcctcaacaggaaagcccccactctctgtggaggatgattttgagaaactaatatgggagatttcaggaggcaaattggaagctgagattgacctggatcctgggaaagatgaagatgaccttctgcttgagctatcagaaatgattgatagctgaaggtggtagtgaggacactttaaaaaaaaaatcgccaaaaaactggacttagtttcatctattgtaacatttacctgagatgatcatttctttagtctagaatttgccccaaatcagaagtatacctctgaattatctgtatgtgtcctggattccttggggtcagatttttaaagttactttataaccattttgtccatttgatgccattgtttatcatcttttgagaaaaaagttctgtcatacccttctctccacaaaaaagagactgagagggagatcaagtgaaagggtgcaagcgaacttagtgactccttgaggtgtttgtcagttttggcttttttcttctttgttgtattctttatgtattgtcttgatgtacttaatattacctgagtttgaaatggatgaagacagctgctaccattaaggaccaaattttatgctaccactaaacaaaaatacccactcagtctgtgttaaattgtatgtctttttaaaggtatttaaagattcaactaagctttaaagagggctgagcagctcaggaagcctgtaatgtgggcataactctttggacctgatcttgatgcttctgctgctctgttagcctctgaagagcaatatctaatttattattactgtaattttttaaaaggctttaaagtgcctcaggggtcccctgaaactaattttctatttctgggattccctggattcattatatgagatggtgacatgattagaggaattcttttttagtatgaaaattgtcccttttcttcttcagtacttgcctccttgctggcattgaattaacacagggacaaaatttggttaattttttatttctaactctcccaacaaacccctgttgcccagtatttgtttggtggcctttaaccacctgagggaaaaaatgagcttattcaagctgccaatatttatctatgggctgtagcagtacactgaattgtactgtgccagggatattgagatgctctgggggtgtattgtatacctgccagttttcttcatttctgaattgagttttcttttcttgatgttggtttccttcatatcacctcaaggtttagatttgtgaaggaataagcatgatggaaataatagtcttgaaaggagatatgttgtatataatcaggaggaagaggaaggaaggacttacccattttgatattttgctgtaggtggccagttttgtttctcatagggaaatctgacccacctgtcatgttggctcctaaggaactgctgttgtaagcggctcatcaagagttgaacttcacgtagccttgttgggaatatggaaaaggaagaaagccacaggactgcccattcagtcttgggaagattgggatgattctgcacaagcaaaaatgactgaagtttatgtatagacacacctctaccaatccatcttcagctgactgaatgttgtatgatagcccttctccaaagcagaggtagaatgttcaggtttcaccatggattttctacttatttcgtttttggaatcaccttacagattccaggtcccttttgtatatattctttattcttttgcttttttaaaaaataattttgtttcatatttaaagcacttgtattagtcaatgtttcgtgttccgcattatttgaaccatttgcccttacagaaagagaaatacttgtttgtgttttaaataaaactgatgtaggaaagtc

SEQ ID NO: 53197 - DNA, 4458 bp, Homo sapiens
acagatcttctcccatcagtgtgtttacaaggctctgtataagcaaggtcgtattaataaaatttgactctagcaatacgatctcattagccatggtgatttgaaggaggaagaatttacctgaaatattttaattcattgtctcctcattttaggattacagtttaaagacaatttctgtgatcaagttgtcatttggaagattaaacccatttcacgaggacttggagcctggtccttgctttgaggaagcagtggcttgtttcaagaagccacttctgatctaagaatctacccagcatgcctaatcaaggagaagactgctatttttttttctattccacatgtaccaaaggcgacagctgcccattccgtcactgtgaagctgcaataggaaatgaaactgtttgcacattatggcaagaagggcgctgttttcgacaggtgtgcaggtttcggcacatggagattgataaaaaacgcagtgaaattccttgttattgggaaaatcagccaacaggatgtcaaaaattaaactgcgctttccatcacaatagaggacgatatgttgatggccttttcctacctccgagcaaaactgtgttgcccactgtgcctgagtcaccagaagaggaagtgaaggctagccaactttcagttcagcagaacaaattgtctgtccagtccaatccttcccctcagctgcggagcgttatgaaagtagaaagttccgaaaatgttcctagccccacgcatccaccagttgtaattaatgctgcagatgatgatgaagatgatgatgatcagttttctgaggaaggtgatgaaaccaaaacacctaccctgcaaccaactcctgaagttcacaatggattacgagtgacttctgtccggaaacctgcagtcaatataaagcaaggtgaatgtttgaattttggaataaaaactcttgaggaaattaagtcaaagaaaatgaaggaaaaatctaagaagcaaggtgagggttcttcaggagtttccagtcttttactccaccctgagcccgttccaggtcctgaaaaagaaaatgtcaggactgtggtgaggacagtaactctctccaccaaacaaggagaagaacccttggttagattgagtcttactgagagactggggaaacgaaaattttcagcaggcggtgacagtgatcctccattaaagcgtagcctggcacagaggctagggaagaaagttgaagctccagaaactaacattgacaaaacaccaaagaaagctcaagtttccaagtctcttaaggagcgattaggcatgtcagctgatccagataatgaggatgcaacagataaagttaataaagttggtgagatccatgtgaagacattagaagaaattcttcttgaaagagccagtcagaaacgtggagaattgcaaactaaactcaagacagaaggaccttcaaaaactgatgattctacttcaggagcaagaagctcctccactatccgtatcaaaaccttctctgaggtcctggctgaaaaaaaacatcggcagcaggaagcagagagacaaaaaagcaaaaaggatacaacttgcatcaagctaaagattgatagtgaaattaaaaaaacagtagttttgccacccattgttgccagcagaggacaatcagaggagcctgcaggtaaaacaaagtctatgcaggaggtgcacatcaagacgctggaagaaattaaactggagaaggcactgagggtgcagcagagctctgagagcagcaccagctccccgtctcaacacgaggccactccaggggcaaggcggctgctgcgaatcaccaaaagaacagggatgaaagaagagaagaaccttcaggaaggaaatgaagttgattctcagagcagtattagaacagaagctaaagaggcttcaggtgagaccacaggagttgacatcactaaaattcaagtcaagagatgtgagaccatgagagagaagcacatgcagaaacagcaggagagggaaaaatcagtcttgacacctcttcggggagatgtagcctcttgcaatacccaagtggcagagaaaccagtgctcactgctgtgccaggaatcacacggcacctgaccaagcggcttcccacaaagtcatcccagaaggtggaggtagaaacctcagggattggagactcattattgaatgtgaaatgtgcagcacagaccttggaaaaaaggggtaaagctaaacccaaagtgaacgtgaagccatctgtggttaaagttgtgtcatcccccaaattggccccaaaacgtaaggcagtggagatgcacgctgctgtcattgccgctgtgaagccactcagctccagcagtgtcctacaggaacccccagccaaaaaggcagctgtggctgttgtcccgcttgtctctgaggacaaatcagtcactgtgcctgaagcagaaaatcctagagacagtcttgtgctgcctccaacccagtcctcttcagattcctcacccccggaggtgtctggcccttcctcatcccaaatgagcatgaaaactcgccgactcagctctgcctcaacaggaaagcccccactctctgtggaggatgattttgagaaactaatatgggagatttcaggaggcaaattggaagctgagattgacctggatcctgggaaagatgaagatgaccttctgcttgagctatcagaaatgattgatagctgaaggtggtagtgaggacactttaaaaaaaaaatcgccaaaaaactggacttagtttcatctattgtaacatttacctgagatgatcatttctttagtctagaatttgccccaaatcagaagtatacctctgaattatctgtatgtgtcctggattccttggggtcagatttttaaagttactttataaccattttgtccatttgatgccattgtttatcatcttttgagaaaaaagttctgtcatacccttctctccacaaaaaagagactgagagggagatcaagtgaaagggtgcaagcgaacttagtgactccttgaggtgtttgtcagttttggcttttttcttctttgttgtattctttatgtattgtcttgatgtacttaatattacctgagtttgaaatggatgaagacagctgctaccattaaggaccaaattttatgctaccactaaacaaaaatacccactcagtctgtgttaaattgtatgtctttttaaaggtatttaaagattcaactaagctttaaagagggctgagcagctcaggaagcctgtaatgtgggcataactctttggacctgatcttgatgcttctgctgctctgttagcctctgaagagcaatatctaatttattattactgtaattttttaaaaggctttaaagtgcctcaggggtcccctgaaactaattttctatttctgggattccctggattcattatatgagatggtgacatgattagaggaattcttttttagtatgaaaattgtcccttttcttcttcagtacttgcctccttgctggcattgaattaacacagggacaaaatttggttaattttttatttctaactctcccaacaaacccctgttgcccagtatttgtttggtggcctttaaccacctgagggaaaaaatgagcttattcaagctgccaatatttatctatgggctgtagcagtacactgaattgtactgtgccagggatattgagatgctctgggggtgtattgtatacctgccagttttcttcatttctgaattgagttttcttttcttgatgttggtttccttcatatcacctcaaggtttagatttgtgaaggaataagcatgatggaaataatagtcttgaaaggagatatgttgtatataatcaggaggaagaggaaggaaggacttacccattttgatattttgctgtaggtggccagttttgtttctcatagggaaatctgacccacctgtcatgttggctcctaaggaactgctgttgtaagcggctcatcaagagttgaacttcacgtagccttgttgggaatatggaaaaggaagaaagccacaggactgcccattcagtcttgggaagattgggatgattctgcacaagcaaaaatgactgaagtttatgtatagacacacctctaccaatccatcttcagctgactgaatgttgtatgatagcccttctccaaagcagaggtagaatgttcaggtttcaccatggattttctacttatttcgtttttggaatcaccttacagattccaggtcccttttgtatatattctttattcttttgcttttttaaaaaataattttgtttcatatttaaagcacttgtattagtcaatgtttcgtgttccgcattatttgaaccatttgcccttacagaaagagaaatacttgtttgtgttttaaataaaactgatgtaggaaagtc

SEQ ID NO: 53198 - DNA, 4355 bp, Homo sapiens
tagaggcatgaattatccaaggccacctggccaataagtaacataatagagattcagaccgttatctttgatttcataaacttaaactactgtatcatcctgcttctctaaattaagtgtagacattttaggggttccaggatgagggtaaaaagggaaagaataacataaactactctcctgctccattcagctctccatcatgcctaagttatgttattttcagcaatctctcttccttctaaaaatcatctcatctcacatgcctcggatttttgaaccctgtatgaactttgtctagaaaacaaactgccacatgaatatacgtatcactgttttatttgaaagcaatgtgtttttccctcttacagaaaaaacgcagtgaaattccttgttattgggaaaatcagccaacaggatgtcaaaaattaaactgcgctttccatcacaatagaggacgatatgttgatggccttttcctacctccgagcaaaactgtgttgcccactgtgcctgagtcaccagaagaggaagtgaaggctagccaactttcagttcagcagaacaaattgtctgtccagtccaatccttcccctcagctgcggagcgttatgaaagtagaaagttccgaaaatgttcctagccccacgcatccaccagttgtaattaatgctgcagatgatgatgaagatgatgatgatcagttttctgaggaaggtgatgaaaccaaaacacctaccctgcaaccaactcctgaagttcacaatggattacgagtgacttctgtccggaaacctgcagtcaatataaagcaaggtgaatgtttgaattttggaataaaaactcttgaggaaattaagtcaaagaaaatgaaggaaaaatctaagaagcaaggtgagggttcttcaggagtttccagtcttttactccaccctgagcccgttccaggtcctgaaaaagaaaatgtcaggactgtggtgaggacagtaactctctccaccaaacaaggagaagaacccttggttagattgagtcttactgagagactggggaaacgaaaattttcagcaggcggtgacagtgatcctccattaaagcgtagcctggcacagaggctagggaagaaagttgaagctccagaaactaacattgacaaaacaccaaagaaagctcaagtttccaagtctcttaaggagcgattaggcatgtcagctgatccagataatgaggatgcaacagataaagttaataaagttggtgagatccatgtgaagacattagaagaaattcttcttgaaagagccagtcagaaacgtggagaattgcaaactaaactcaagacagaaggaccttcaaaaactgatgattctacttcaggagcaagaagctcctccactatccgtatcaaaaccttctctgaggtcctggctgaaaaaaaacatcggcagcaggaagcagagagacaaaaaagcaaaaaggatacaacttgcatcaagctaaagattgatagtgaaattaaaaaaacagtagttttgccacccattgttgccagcagaggacaatcagaggagcctgcaggtaaaacaaagtctatgcaggaggtgcacatcaagacgctggaagaaattaaactggagaaggcactgagggtgcagcagagctctgagagcagcaccagctccccgtctcaacacgaggccactccaggggcaaggcggctgctgcgaatcaccaaaagaacagggatgaaagaagagaagaaccttcaggaaggaaatgaagttgattctcagagcagtattagaacagaagctaaagaggcttcaggtgagaccacaggagttgacatcactaaaattcaagtcaagagatgtgagaccatgagagagaagcacatgcagaaacagcaggagagggaaaaatcagtcttgacacctcttcggggagatgtagcctcttgcaatacccaagtggcagagaaaccagtgctcactgctgtgccaggaatcacacggcacctgaccaagcggcttcccacaaagtcatcccagaaggtggaggtagaaacctcagggattggagactcattattgaatgtgaaatgtgcagcacagaccttggaaaaaaggggtaaagctaaacccaaagtgaacgtgaagccatctgtggttaaagttgtgtcatcccccaaattggccccaaaacgtaaggcagtggagatgcacgctgctgtcattgccgctgtgaagccactcagctccagcagtgtcctacaggaacccccagccaaaaaggcagctgtggctgttgtcccgcttgtctctgaggacaaatcagtcactgtgcctgaagcagaaaatcctagagacagtcttgtgctgcctccaacccagtcctcttcagattcctcacccccggaggtgtctggcccttcctcatcccaaatgagcatgaaaactcgccgactcagctctgcctcaacaggaaagcccccactctctgtggaggatgattttgagaaactaatatgggagatttcaggaggcaaattggaagctgagattgacctggatcctgggaaagatgaagatgaccttctgcttgagctatcagaaatgattgatagctgaaggtggtagtgaggacactttaaaaaaaaaatcgccaaaaaactggacttagtttcatctattgtaacatttacctgagatgatcatttctttagtctagaatttgccccaaatcagaagtatacctctgaattatctgtatgtgtcctggattccttggggtcagatttttaaagttactttataaccattttgtccatttgatgccattgtttatcatcttttgagaaaaaagttctgtcatacccttctctccacaaaaaagagactgagagggagatcaagtgaaagggtgcaagcgaacttagtgactccttgaggtgtttgtcagttttggcttttttcttctttgttgtattctttatgtattgtcttgatgtacttaatattacctgagtttgaaatggatgaagacagctgctaccattaaggaccaaattttatgctaccactaaacaaaaatacccactcagtctgtgttaaattgtatgtctttttaaaggtatttaaagattcaactaagctttaaagagggctgagcagctcaggaagcctgtaatgtgggcataactctttggacctgatcttgatgcttctgctgctctgttagcctctgaagagcaatatctaatttattattactgtaattttttaaaaggctttaaagtgcctcaggggtcccctgaaactaattttctatttctgggattccctggattcattatatgagatggtgacatgattagaggaattcttttttagtatgaaaattgtcccttttcttcttcagtacttgcctccttgctggcattgaattaacacagggacaaaatttggttaattttttatttctaactctcccaacaaacccctgttgcccagtatttgtttggtggcctttaaccacctgagggaaaaaatgagcttattcaagctgccaatatttatctatgggctgtagcagtacactgaattgtactgtgccagggatattgagatgctctgggggtgtattgtatacctgccagttttcttcatttctgaattgagttttcttttcttgatgttggtttccttcatatcacctcaaggtttagatttgtgaaggaataagcatgatggaaataatagtcttgaaaggagatatgttgtatataatcaggaggaagaggaaggaaggacttacccattttgatattttgctgtaggtggccagttttgtttctcatagggaaatctgacccacctgtcatgttggctcctaaggaactgctgttgtaagcggctcatcaagagttgaacttcacgtagccttgttgggaatatggaaaaggaagaaagccacaggactgcccattcagtcttgggaagattgggatgattctgcacaagcaaaaatgactgaagtttatgtatagacacacctctaccaatccatcttcagctgactgaatgttgtatgatagcccttctccaaagcagaggtagaatgttcaggtttcaccatggattttctacttatttcgtttttggaatcaccttacagattccaggtcccttttgtatatattctttattcttttgcttttttaaaaaataattttgtttcatatttaaagcacttgtattagtcaatgtttcgtgttccgcattatttgaaccatttgcccttacagaaagagaaatacttgtttgtgttttaaataaaactgatgtaggaaagtc

SEQ ID NO: 53199 - DNA, 6326 bp, Homo sapiens
gttttatatttggaaatttctaattgcctcctcatactggtcagctttataatttcaaattgttgagtgtgatagtgttaccctttagaattggatcttatataaaagggaaatattagaaaacaattaggaaaatatacttttagtctttgaaatgcctgttttaacctttataaaatattataaaaatagattgtgtaggtactttcaaataatttatgggtaaaaacagactaaaatgtttgcaagaattggaaaaggttgaatgggaattgtaatgagagccctttgaacatgcttggaaaaacccagtagacatttcccaaagattgtttctgtaattttaggtaatctttttaaaaacatacttaatgacccattatactgtattaactgtgcggttgttttggccactgaattcttaatgaaaactaagcagtcggtatttttatgtgttaggaatcattggtgaaatgagtgaattgatctcattttaagatccctttctactctgaaagtatgtttctgagattgagtaggaggccagaaaatgatgacttttagtaaaagtctattaaaagtttcagactgaataactaatgtgagatcccaatttttccttttttttcattttagatttggggatattccctgcccaaaaaattcctggaaaattgactagtattaagtgtgagtaaaaggtgtccacttttttttaagttttgattttagttttgtcttggatagtatttggcaagatttagcctagaaattatgtagtatttattacataagaatcaaaattgctttgttactgggctggtttcaaagtttagaactcatttctatgtatcaaaatcgggttttttttggttttgatttttttttttttaaattcttaaatggtaaatatgccattgtgaaatgaaatctcaactccaaaagtttacccttttactaactggagtaaatgtatacttacaaagtctttagctgtagccattagtagtaaagaatttggacctaggctgcgtaagcaagcctttccagggccactatttaatggcaaaccagtgatactggtgttgatacaaaataagaaataaattttcccttagataaagctttctgtgttttgacagtgccagtttagaatggctataatgctgctctgccttctacagcttgctgcaccactctgtagttactctattaccatacgtttctatcttttttggttaaacactccctgatgacgatgatggatatatatacatacatccatattatacataatgatatatgtgtaaggatttaccttcgtctttattttgtgggctgggcaaaatttagtgtaacaataacttcatgatactttggtataagagtaagttctttatttttataatgaacccaaatctaaagtcttttatagtgcattttaaaaggggaaacttatccaaatgttatatttctatacatttttgtgtatatgtgtgtgtgtataagccagttagtatatatctgtatgtatattatatacataaaacactatatttttacatacaagtatgcttttattatacagataataaagatgggggaaggtttctgtttttttcttaataggtgaagaaatcttgaagaccagaaattggatcttactgaaaaactgatgtttttttgttttttttttaaattatattgttcagctatggaagatggatttttttttcatgatcctttaactctcaagttcatctttaaatgaactctttttttttgtttttttttggttttgttttgttttgtttttgaggagataactaaccctagctgtctccagtctgacaaaggttatttgaatggacttaatctcccagtagttgggagatgttttaaaaacacatgctgtgtttgaattgtggctgagaggttttcttggcaatgtgaggaggaaatttttttctgcctcattattattaattcatggattgagtgttggttcgacctacaggcgtaatagattggaactcagtgaagacacagatgttcctgttcagagcaaccagctaatgattacagtttaaagacaatttctgtgatcaagttgtcatttggaagattaaacccatttcacgaggacttggagcctggtccttgctttgaggaagcagtggcttgtttcaagaagccacttctgatctaagaatctacccagcatgcctaatcaaggagaagactgctatttttttttctattccacatgtaccaaaggcgacagctgcccattccgtcactgtgaagctgcaataggaaatgaaactgtttgcacattatggcaagaagggcgctgttttcgacaggtgtgcaggtttcggcacatggagattgataaaaaacgcagtgaaattccttgttattgggaaaatcagccaacaggatgtcaaaaattaaactgcgctttccatcacaatagaggacgatatgttgatggccttttcctacctccgagcaaaactgtgttgcccactgtgcctgagtcaccagaagaggaagtgaaggctagccaactttcagttcagcagaacaaattgtctgtccagtccaatccttcccctcagctgcggagcgttatgaaagtagaaagttccgaaaatgttcctagccccacgcatccaccagttgtaattaatgctgcagatgatgatgaagatgatgatgatcagttttctgaggaaggtgatgaaaccaaaacacctaccctgcaaccaactcctgaagttcacaatggattacgagtgacttctgtccggaaacctgcagtcaatataaagcaaggtgaatgtttgaattttggaataaaaactcttgaggaaattaagtcaaagaaaatgaaggaaaaatctaagaagcaaggtgagggttcttcaggagtttccagtcttttactccaccctgagcccgttccaggtcctgaaaaagaaaatgtcaggactgtggtgaggacagtaactctctccaccaaacaaggagaagaacccttggttagattgagtcttactgagagactggggaaacgaaaattttcagcaggcggtgacagtgatcctccattaaagcgtagcctggcacagaggctagggaagaaagttgaagctccagaaactaacattgacaaaacaccaaagaaagctcaagtttccaagtctcttaaggagcgattaggcatgtcagctgatccagataatgaggatgcaacagataaagttaataaagttggtgagatccatgtgaagacattagaagaaattcttcttgaaagagccagtcagaaacgtggagaattgcaaactaaactcaagacagaaggaccttcaaaaactgatgattctacttcaggagcaagaagctcctccactatccgtatcaaaaccttctctgaggtcctggctgaaaaaaaacatcggcagcaggaagcagagagacaaaaaagcaaaaaggatacaacttgcatcaagctaaagattgatagtgaaattaaaaaaacagtagttttgccacccattgttgccagcagaggacaatcagaggagcctgcaggtaaaacaaagtctatgcaggaggtgcacatcaagacgctggaagaaattaaactggagaaggcactgagggtgcagcagagctctgagagcagcaccagctccccgtctcaacacgaggccactccaggggcaaggcggctgctgcgaatcaccaaaagaacagggatgaaagaagagaagaaccttcaggaaggaaatgaagttgattctcagagcagtattagaacagaagctaaagaggcttcaggtgagaccacaggagttgacatcactaaaattcaagtcaagagatgtgagaccatgagagagaagcacatgcagaaacagcaggagagggaaaaatcagtcttgacacctcttcggggagatgtagcctcttgcaatacccaagtggcagagaaaccagtgctcactgctgtgccaggaatcacacggcacctgaccaagcggcttcccacaaagtcatcccagaaggtggaggtagaaacctcagggattggagactcattattgaatgtgaaatgtgcagcacagaccttggaaaaaaggggtaaagctaaacccaaagtgaacgtgaagccatctgtggttaaagttgtgtcatcccccaaattggccccaaaacgtaaggcagtggagatgcacgctgctgtcattgccgctgtgaagccactcagctccagcagtgtcctacaggaacccccagccaaaaaggcagctgtggctgttgtcccgcttgtctctgaggacaaatcagtcactgtgcctgaagcagaaaatcctagagacagtcttgtgctgcctccaacccagtcctcttcagattcctcacccccggaggtgtctggcccttcctcatcccaaatgagcatgaaaactcgccgactcagctctgcctcaacaggaaagcccccactctctgtggaggatgattttgagaaactaatatgggagatttcaggaggcaaattggaagctgagattgacctggatcctgggaaagatgaagatgaccttctgcttgagctatcagaaatgattgatagctgaaggtggtagtgaggacactttaaaaaaaaaatcgccaaaaaactggacttagtttcatctattgtaacatttacctgagatgatcatttctttagtctagaatttgccccaaatcagaagtatacctctgaattatctgtatgtgtcctggattccttggggtcagatttttaaagttactttataaccattttgtccatttgatgccattgtttatcatcttttgagaaaaaagttctgtcatacccttctctccacaaaaaagagactgagagggagatcaagtgaaagggtgcaagcgaacttagtgactccttgaggtgtttgtcagttttggcttttttcttctttgttgtattctttatgtattgtcttgatgtacttaatattacctgagtttgaaatggatgaagacagctgctaccattaaggaccaaattttatgctaccactaaacaattcaactaagctttaaagagggctgagcagctcaggaagcctgtaatgtgggcataactctttggacctgatcttgatgcttctgctgctctgttagcctctgaagagcaatatctaatttattattactgtaattttttaaaaggctttaaagtgcctcaggggtcccctgaaactaattttctatttctgggattccctggattcattatatgagatggtgacatgattagaggaattcttttttagtatgaaaattgtcccttttcttcttcagtacttgcctccttgctggcattgaattaacacagggacaaaatttggttaattttttatttctaactctcccaacaaacccctgttgcccagtatttgtttggtggcctttaaccacctgagggaaaaaatgagcttattcaagctgccaatatttatctatgggctgtagcagtacactgaattgtactgtgccagggatattgagatgctctgggggtgtattgtatacctgccagttttcttcatttctgaattgagttttcttttcttgatgttggtttccttcatatcacctcaaggtttagatttgtgaaggaataagcatgatggaaataatagtcttgaaaggagatatgttgtatataatcaggaggaagaggaaggaaggacttacccattttgatattttgctgtaggtggccagttttgtttctcatagggaaatctgacccacctgtcatgttggctcctaaggaactgctgttgtaagcggctcatcaagagttgaacttcacgtagccttgttgggaatatggaaaaggaagaaagccacaggactgcccattcagtcttgggaagattgggatgattctgcacaagcaaaaatgactgaagtttatgtatagacacacctctaccaatccatcttcagctgactgaatgttgtatgatagcccttctccaaagcagaggtagaatgttcaggtttcaccatggattttctacttatttcgtttttggaatcaccttacagattccaggtcccttttgtatatattctttattcttttgcttttttaaaaaataattttgtttcatatttaaagcacttgtattagtcaatgtttcgtgttccgcattatttgaaccatttgcccttacagaaagagaaatacttgtttgtgttttaaataaaactgatgtaggaaagtc

SEQ ID NO: 53200 - DNA, 6174 bp, Homo sapiens
gttttatatttggaaatttctaattgcctcctcatactggtcagctttataatttcaaattgttgagtgtgatagtgttaccctttagaattggatcttatataaaagggaaatattagaaaacaattaggaaaatatacttttagtctttgaaatgcctgttttaacctttataaaatattataaaaatagattgtgtaggtactttcaaataatttatgggtaaaaacagactaaaatgtttgcaagaattggaaaaggttgaatgggaattgtaatgagagccctttgaacatgcttggaaaaacccagtagacatttcccaaagattgtttctgtaattttaggtaatctttttaaaaacatacttaatgacccattatactgtattaactgtgcggttgttttggccactgaattcttaatgaaaactaagcagtcggtatttttatgtgttaggaatcattggtgaaatgagtgaattgatctcattttaagatccctttctactctgaaagtatgtttctgagattgagtaggaggccagaaaatgatgacttttagtaaaagtctattaaaagtttcagactgaataactaatgtgagatcccaatttttccttttttttcattttagatttggggatattccctgcccaaaaaattcctggaaaattgactagtattaagtgtgagtaaaaggtgtccacttttttttaagttttgattttagttttgtcttggatagtatttggcaagatttagcctagaaattatgtagtatttattacataagaatcaaaattgctttgttactgggctggtttcaaagtttagaactcatttctatgtatcaaaatcgggttttttttggttttgatttttttttttttaaattcttaaatggtaaatatgccattgtgaaatgaaatctcaactccaaaagtttacccttttactaactggagtaaatgtatacttacaaagtctttagctgtagccattagtagtaaagaatttggacctaggctgcgtaagcaagcctttccagggccactatttaatggcaaaccagtgatactggtgttgatacaaaataagaaataaattttcccttagataaagctttctgtgttttgacagtgccagtttagaatggctataatgctgctctgccttctacagcttgctgcaccactctgtagttactctattaccatacgtttctatcttttttggttaaacactccctgatgacgatgatggatatatatacatacatccatattatacataatgatatatgtgtaaggatttaccttcgtctttattttgtgggctgggcaaaatttagtgtaacaataacttcatgatactttggtataagagtaagttctttatttttataatgaacccaaatctaaagtcttttatagtgcattttaaaaggggaaacttatccaaatgttatatttctatacatttttgtgtatatgtgtgtgtgtataagccagttagtatatatctgtatgtatattatatacataaaacactatatttttacatacaagtatgcttttattatacagataataaagatgggggaaggtttctgtttttttcttaataggtgaagaaatcttgaagaccagaaattggatcttactgaaaaactgatgtttttttgttttttttttaaattatattgttcagctatggaagatggatttttttttcatgatcctttaactctcaagttcatctttaaatgaactctttttttttgtttttttttggttttgttttgttttgtttttgaggagataactaaccctagctgtctccagtctgacaaaggttatttgaatggacttaatctcccagtagttgggagatgttttaaaaacacatgctgtgtttgaattgtggctgagaggttttcttggcaatgtgaggaggaaatttttttctgcctcattattattaattcatggattgagtgttggttcgacctacaggcgtaatagattggaactcagtgaagacacagatgttcctgttcagagcaaccagctaatgattacagtttaaagacaatttctgtgatcaagttgtcatttggaagattaaacccatttcacgaggacttggagcctggtccttgctttgaggaagcagtggcttgtttcaagaagccacttctgatctaagaatctacccagcatgcctaatcaaggagaagactgctatttttttttctattccacatgtaccaaaggcgacagctgcccattccgtcactgtgaagctgcaataggaaatgaaactgtttgcacattatggcaagaagggcgctgttttcgacaggtgtgcaggtttcggcacatggagattgataaaaaacgcagtgaaattccttgttattgggaaaatcagccaacaggatgtcaaaaattaaactgcgctttccatcacaatagaggacgatatgttgatggccttttcctacctccgagcaaaactgtgttgcccactgtgcctgagtcaccagaagaggaagtgaaggctagccaactttcagttcagcagaacaaattgtctgtccagtccaatccttcccctcagctgcggagcgttatgaaagtagaaagttccgaaaatgttcctagccccacgcatccaccagttgtaattaatgctgcagatgatgatgaagatgatgatgatcagttttctgaggaaggtgatgaaaccaaaacacctaccctgcaaccaactcctgaagttcacaatggattacgagtgacttctgtccggaaacctgcagtcaatataaagcaaggtgaatgtttgaattttggaataaaaactcttgaggaaattaagtcaaagaaaatgaaggaaaaatctaagaagcaaggtgagggttcttcaggagtttccagtcttttactccaccctgagcccgttccaggtcctgaaaaagaaaatgtcaggactgtggtgaggacagtaactctctccaccaaacaaggagaagaacccttggttagattgagtcttactgagagactggggaaacgaaaattttcagcaggcggtgacagtgatcctccattaaagcgtagcctggcacagaggctagggaagaaagttgaagctccagaaactaacattgacaaaacaccaaagaaagctcaagtttccaagtctcttaaggagcgattaggcatgtcagctgatccagataatgaggatgcaacagataaagttaataaagttggtgagatccatgtgaagacattagaagaaattcttcttgaaagagccagtcagaaacgtggagaattgcaaactaaactcaagacagaaggaccttcaaaaactgatgattctacttcaggagcaagaagctcctccactatccgtatcaaaaccttctctgaggtcctggctgaaaaaaaacatcggcagcaggaagcagagagacaaaaaagcaaaaaggatacaacttgcatcaagctaaagattgatagtgaaattaaaaaaacagtagttttgccacccattgttgccagcagaggacaatcagaggagcctgcaggtaaaacaaagtctatgcaggaggtgcacatcaagacgctggaagaaattaaactggagaaggcactgagggtgcagcagagctctgagagcagcaccagctccccgtctcaacacgaggccactccaggggcaaggcggctgctgcgaatcaccaaaagaacagggatgaaagaagagaagaaccttcaggaaggaaatgaagttgattctcagagcagtattagaacagaagctaaagaggcttcaggtgagaccacaggagttgacatcactaaaattcaagtcaagagatgtgagaccatgagagagaagcacatgcagaaacagcaggagagggaaaaatcagtcttgacacctcttcggggagatgtagcctcttgcaatacccaagtggcagagaaaccagtgctcactgctgtgccaggaatcacacggcacctgaccaagcggcttcccacaaagtcatcccagaaggtggaggtagaaacctcagggattggagactcattattgaatgtgaaatgtgcagcacagaccttggaaaaaaggggtaaagctaaacccaaagtgaacgtgaagccatctgtggttaaagttgtgtcatcccccaaattggccccaaaacgtaaggcagtggagatgcacgctgctgtcattgccgctgtgaagccactcagctccagcagtgtcctacaggaacccccagccaaaaaggcagctgtggctgttgtcccgcttgtctctgaggacaaatcagtcactgtgcctgaagcagaaaatcctagagacagtcttgtgctgcctccaacccagtcctcttcagattcctcacccccggaggtgtctggcccttcctcatcccaaatgagcatgaaaactcgccgactcagctctgcctcaacaggaaagcccccactctctgtggaggatgattttgagaaactaatatgggagatttcaggaggcaaattggaagctgagattgacctggatcctgggaaagatgaagatgaccttctgcttgagctatcagaaatgattgatagctgaaggtggtagtgaggacactttaaaaaaaaaatcgccaaaaaactggacttagtttcatctattgtaacatttacctgagatgatcatttctttagtctagaatttgccccaaatcagaagtatacctctgaattatctgtatgtgtcctggattccttggggtcagatttttaaagttactttataaccattttgtccatttgatgccattgtttatcatcttttgagaaaaaagttctgtcatacccttctctccacaaaaaagagactgagagggagatcaagtgaaagggtgcaagcgaacttagtgactccttgaggtgtttgtcagttttggcttttttcttctttgttgtattctttatgtattgtcttgatgtacttaatattacctgagtttgaaatggatgaagagcaatatctaatttattattactgtaattttttaaaaggctttaaagtgcctcaggggtcccctgaaactaattttctatttctgggattccctggattcattatatgagatggtgacatgattagaggaattcttttttagtatgaaaattgtcccttttcttcttcagtacttgcctccttgctggcattgaattaacacagggacaaaatttggttaattttttatttctaactctcccaacaaacccctgttgcccagtatttgtttggtggcctttaaccacctgagggaaaaaatgagcttattcaagctgccaatatttatctatgggctgtagcagtacactgaattgtactgtgccagggatattgagatgctctgggggtgtattgtatacctgccagttttcttcatttctgaattgagttttcttttcttgatgttggtttccttcatatcacctcaaggtttagatttgtgaaggaataagcatgatggaaataatagtcttgaaaggagatatgttgtatataatcaggaggaagaggaaggaaggacttacccattttgatattttgctgtaggtggccagttttgtttctcatagggaaatctgacccacctgtcatgttggctcctaaggaactgctgttgtaagcggctcatcaagagttgaacttcacgtagccttgttgggaatatggaaaaggaagaaagccacaggactgcccattcagtcttgggaagattgggatgattctgcacaagcaaaaatgactgaagtttatgtatagacacacctctaccaatccatcttcagctgactgaatgttgtatgatagcccttctccaaagcagaggtagaatgttcaggtttcaccatggattttctacttatttcgtttttggaatcaccttacagattccaggtcccttttgtatatattctttattcttttgcttttttaaaaaataattttgtttcatatttaaagcacttgtattagtcaatgtttcgtgttccgcattatttgaaccatttgcccttacagaaagagaaatacttgtttgtgttttaaataaaactgatgtaggaaagtc

SEQ ID NO: 53201 - DNA, 5111 bp, Homo sapiens
gttttatatttggaaatttctaattgcctcctcatactggtcagctttataatttcaaattgttgagtgtgatagtgttaccctttagaattggatcttatataaaagggaaatattagaaaacaattaggaaaatatacttttagtctttgaaatgcctgttttaacctttataaaatattataaaaatagattgtgtaggtactttcaaataatttatgggtaaaaacagactaaaatgtttgcaagaattggaaaaggttgaatgggaattgtaatgagagccctttgaacatgcttggaaaaacccagtagacatttcccaaagattgtttctgtaattttaggtaatctttttaaaaacatacttaatgacccattatactgtattaactgtgcggttgttttggccactgaattcttaatgaaaactaagcagtcggtatttttatgtgttaggaatcattggtgaaatgagtgaattgatctcattttaagatccctttctactctgaaagtatgtttctgagattgagtaggaggccagaaaatgatgacttttagtaaaagtctattaaaagtttcagactgaataactaatgtgagatcccaatttttccttttttttcattttagatttggggatattccctgcccaaaaaattcctggaaaattgactagtattaagtgtgagtaaaaggtgtccacttttttttaagttttgattttagttttgtcttggatagtatttggcaagatttagcctagaaattatgtagtatttattacataagaatcaaaattgctttgttactgggctggtttcaaagtttagaactcatttctatgtatcaaaatcgggttttttttggttttgatttttttttttttaaattcttaaatggtaaatatgccattgtgaaatgaaatctcaactccaaaagtttacccttttactaactggagtaaatgtatacttacaaagtctttagctgtagccattagtagtaaagaatttggacctaggctgcgtaagcaagcctttccagggccactatttaatggcaaaccagtgatactggtgttgatacaaaataagaaataaattttcccttagataaagctttctgtgttttgacagtgccagtttagaatggctataatgctgctctgccttctacagcttgctgcaccactctgtagttactctattaccatacgtttctatcttttttggttaaacactccctgatgacgatgatggatatatatacatacatccatattatacataatgatatatgtgtaaggatttaccttcgtctttattttgtgggctgggcaaaatttagtgtaacaataacttcatgatactttggtataagagtaagttctttatttttataatgaacccaaatctaaagtcttttatagtgcattttaaaaggggaaacttatccaaatgttatatttctatacatttttgtgtatatgtgtgtgtgtataagccagttagtatatatctgtatgtatattatatacataaaacactatatttttacatacaagtatgcttttattatacagataataaagatgggggaaggtttctgtttttttcttaataggtgaagaaatcttgaagaccagaaattggatcttactgaaaaactgatgtttttttgttttttttttaaattatattgttcagctatggaagatggatttttttttcatgatcctttaactctcaagttcatctttaaatgaactctttttttttgtttttttttggttttgttttgttttgtttttgaggagataactaaccctagctgtctccagtctgacaaaggttatttgaatggacttaatctcccagtagttgggagatgttttaaaaacacatgctgtgtttgaattgtggctgagaggttttcttggcaatgtgaggaggaaatttttttctgcctcattattattaattcatggattgagtgttggttcgacctacaggcgtaatagattggaactcagtgaagacacagatgttcctgttcagagcaaccagctaatgattacagtttaaagacaatttctgtgatcaagttgtcatttggaagattaaacccatttcacgaggacttggagcctggtccttgctttgaggaagcagtggcttgtttcaagaagccacttctgatctaagaatctacccagcatgcctaatcaaggagaagactgctatttttttttctattccacatgtaccaaaggcgacagctgcccattccgtcactgtgaagctgcaataggaaatgaaactgtttgcacattatggcaagaagggcgctgttttcgacaggtgtgcaggtttcggcacatggagattgataaaaaacgcagtgaaattccttgttattgggaaaatcagccaacaggatgtcaaaaattaaactgcgctttccatcacaatagaggacgatatgttgatggccttttcctacctccgagcaaaactgtgttgcccactgtgcctgagtcaccagaagaggaagtgaaggctagccaactttcagttcagcagaacaaattgtctgtccagtccaatccttcccctcagctgcggagcgttatgaaagtagaaagttccgaaaatgttcctagccccacgcatccaccagttgtaattaatgctgcagatgatgatgaagatgatgatgatcagttttctgaggaaggtgatgaaaccaaaacacctaccctgcaaccaactcctgaagttcacaatggattacgagtgacttctgtccggaaacctgcagtcaatataaagcaaggtgaatgtttgaattttggaataaaaactcttgaggaaattaagtcaaagaaaatgaaggaaaaatctaagaagcaaggtgagggttcttcaggagtttccagtcttttactccaccctgagcccgttccaggtcctgaaaaagaaaatgtcaggactgtggtgaggacagtaactctctccaccaaacaaggagaagaacccttggttagattgagtcttactgagagactggggaaacgaaaattttcagcaggcggtgacagtgatcctccattaaagcgtagcctggcacagaggctagggaagaaagttgaagctccagaaactaacattgacaaaacaccaaagaaagctcaagtttccaagtctcttaaggagcgattaggcatgtcagctgatccagataatgaggatgcaacagataaagttaataaagttggtgagatccatgtgaagacattagaagaaattcttcttgaaagagccagtcagaaacgtggagaattgcaaactaaactcaagacagaaggaccttcaaaaactgatgattctacttcaggagcaagaagctcctccactatccgtatcaaaaccttctctgaggtcctggctgaaaaaaaacatcggcagcaggaagcagagagacaaaaaagcaaaaaggatacaacttgcatcaagctaaagattgatagtgaaattaaaaaaacagtagttttgccacccattgttgccagcagaggacaatcagaggagcctgcaggtaaaacaaagtctatgcaggaggtgcacatcaagacgctggaagaaattaaactggagaaggcactgagggtgcagcagagctctgagagcagcaccagctccccgtctcaacacgaggccactccaggggcaaggcggctgctgcgaatcaccaaaagaacagggatgaaagaagagaagaaccttcaggaaggaaatgaagttgattctcagagcagtattagaacagaagctaaagaggcttcaggtgagaccacaggagttgacatcactaaaattcaagtcaagagatgtgagaccatgagagagaagcacatgcagaaacagcaggagagggaaaaatcagtcttgacacctcttcggggagatgtagcctcttgcaatacccaagtggcagagaaaccagtgctcactgctgtgccaggaatcacacggcacctgaccaagcggcttcccacaaagtcatcccagaaggtggaggtagaaacctcagggattggagactcattattgaatgtgaaatgtgcagcacagaccttggaaaaaaggggtaaagctaaacccaaagtgaacgtgaagccatctgtggttaaagttgtgtcatcccccaaattggccccaaaacgtaaggcagtggagatgcacgctgctgtcattgccgctgtgaagccactcagctccagcagtgtcctacaggaacccccagccaaaaaggcagctgtggctgttgtcccgcttgtctctgaggacaaatcagtcactgtgcctgaagcagaaaatcctagagacagtcttgtgctgcctccaacccagtcctcttcagattcctcacccccggaggtgtctggcccttcctcatcccaaatgagcatgaaaactcgccgactcagctctgcctcaacaggaaagcccccactctctgtggaggatgattttgagaaactaatatgggagatttcaggaggcaaattggaagctgagattgacctggatcctgggaaagatgaagatgaccttctgcttgagctatcagaaatgattgatagctgaaggctgttgtaagcggctcatcaagagttgaacttcacgtagccttgttgggaatatggaaaaggaagaaagccacaggactgcccattcagtcttgggaagattgggatgattctgcacaagcaaaaatgactgaagtttatgtatagacacacctctaccaatccatcttcagctgactgaatgttgtatgatagcccttctccaaagcagaggtagaatgttcaggtttcaccatggattttctacttatttcgtttttggaatcaccttacagattccaggtcccttttgtatatattctttattcttttgcttttttaaaaaataattttgtttcatatttaaagcacttgtattagtcaatgtttcgtgttccgcattatttgaaccatttgcccttacagaaagagaaatacttgtttgtgttttaaataaaactgatgtaggaaagtc

SEQ ID NO: 53202 - DNA, 997 bp, Homo sapiens
tgtagccaggcgccatctttgacgctggcagtcttggttttctgctagtgctgctgctgctgggaggacgacggacggcagcggccaagcaagaagaaagacgtggcagcaagcgggagtcggggatagtgtcatcggttcgcttaaatgttgatatatagatcagttttctgaggaaggtgatgaaaccaaaacacctaccctgcaaccaactcctgaagttcacaatggattacgagtgacttctgtccggaaacctgcagtcaatataaagcaaggtgaatgtttgaattttggaataaaaactcttgaggaaattaagtcaaagaaaatgaaggaaaaatctaagaagcaaggctgttgtaagcggctcatcaagagttgaacttcacgtagccttgttgggaatatggaaaaggaagaaagccacaggactgcccattcagtcttgggaagattgggatgattctgcacaagcaaaaatgactgaagtttatgtatagacacacctctaccaatccatcttcagctgactgaatgttgtatgatagcccttctccaaagcagaggtagaatgttcaggtttcaccatggattttctacttatttcgtttttggaatcaccttacagattccaggtcccttttgtatatattctttattcttttgcttttttaaaaaataattttgtttcatatttaaagcacttgtattagtcaatgtttcgtgttccgcattatttgaaccatttgcccttacagaaagagaaatacttgtttgtgttttaaataaaactgatgtaggaaagtcaaaaaaaaaaaaaaaacaaacaaagcaaacaagaaaaaaaaaacaaaaggaaaagaagaaaaagaagacaacagcaagaaagaagaaaaagaacggaaggcaagaagaggagagaagcacagaaaagaaacaaaaaggcaaagggcaagaaaagcgcaaccgcgggagagggaccggaaggagagag

SEQ ID NO: 53203 - DNA, 4574 bp, Homo sapiens
ccggggccctacacgccagacctggctcggggtgggagtgcagaggcaaccaaaaaggaacccacacctccctccagggcccggggcgctgtcagacggggcagcaaccaggagattccctgggcctgcaggaagcccttccgcggaccgaaagattgttccccattttggagatgaagaaactgagactcaaagcagctgagtgaccttcccaaggacacacactgaactgggcggtgatcaggatctgaatgcacagggcgggtgttcagcgattgtttactacgttgaacgtgacctccaggaaagcagttctggccgagatcccctgacaacgcaaagcaagaagtaacgtggaaggaggctccccaagctggctggccattttgctgctgtgtgtggaggtgctgtcagtggcatgcccaaacccaaagctggaagaggaataaattacaagtggtcaaggttgcatccttttgagcccaggacctgcttgtaagccgagagggttctctggccctaatctagccaagcaccatggagagaatcagtgccttcttcagctctatctgggacaccatcttgaccaaacaccaagaaggcatctacaacaccatctgcctgggagtcctcctgggcctgccactcttggtgatcatcacactcctcttcatctgttgccattgctgctggagcccaccaggcaagaggggccagcagccagagaagaacaagaagaagaagaagaagaagaagaagaaggatgaagaagacctctggatctctgctcaacccaagcttctccagatggagaagagaccatcactgcctgtttagttaggcaggaagcagaggtgtttcctttctggggctaagcctccttctgaccacacacagacatttcaggaacccctgaaataatgcactatgtccatgtccacagagtaactactcaaccaaggaacaaacctcagactaagtgtcccagtggagggcagtcccagggaccacgtggacaattcttggatactgtcttggcagctatgtgtccaatagcaatgctccttactgcagacccaggcatgcctcccacctgtctctggcataccccacatgcaaagcacaaagaacatttatccatacatctcaatatggttcccaagtgtgtgcacatgcacgtaacacacacacacacaaattcaggtagcaggtacgtgggcaagtatattctgctcatcaaatggtcattggctatgtactttgtgcagggaagtacattatctacagtcacaaaaatgtctcatgggaaagccttgccagattcagacacatatatacaatttcctaaccagcaaggcccccatacaccatctattccataaaccactcaggttacagatgcatgctttcctatttctaactctacacataaacttttactggaagtactcataattggacattccagcaacctgctacagtccccacccttgtgtgtcttgatacagacacaccaagtttctgtgcctctgacccctcacctgtgccaagatgtttaaagtgtgatggttcaaaattcattgaaagctcttttcttgtaactcatgacaaagtccgtcctcattgccactgagaggtgtttaatgtgatccaagacctctctgtgaaacattacccccgcaaaccactcagcaaagtgcctttctccaagcaagaacaaagagctcttggtggtgactgctagaaaattatggaagcccactcatttatgtcagtggactgcaactgtgtacctgtgcaatgtttacagatggaaagggtgaggagatgctacacctgagctaggtatctcctatataaccaaagtttccagcagggaaggaactagacaatcatcagtgcagtctcacagaaggcaacactggaagtgatgtcataaggttgtgatgtgtgcacggtatggcacaggtgggatgcagaggtaacagagtttaaatgaaagtaggatgaagctataaagaggtttatttatatttatattgaagctcaggcaagtgccttgcacacagtaggtacttataactaactgtggttactgttggatatgtgatgttgttaagggtaagcttgtaatacctcaccagttctccccgagtgatcttctcttctaagtgagcccactaattgctgcaatggatgaaattgggtgtttaatgctggagagcacatgtaggtgacacatgtgccttgaggtatgtgaggacatgtaaattagatccacagtgagctgaggagggctttccccgccagagtgaggttgggaagcagagttaatccacttataggatgaactgcttggtatttttattgtattgtgactgtattacaaagatggacaattcactccttgggagcaagttatgctctagaagtttatttacaaatatgctgggcagctctcttgaaatattttcccaaggaagctattctacacagtggcaaaattgctatctaattaataatgtagctaaactatgatatttatagtagcaaaaaactaaattctataagattgcattaaaggaaagatatattctatttgctcacttgggctgcttggtactcacctgccctccaggtgtactttaggcctgtggagggtgggcatttagtggtgacccttgcaccagggttttctaacagatgaccctgtgaatcataatttaaacctgcatatattttatagccagtcacatttgccctctcaccctatatggccataaactgcctaagcactcaggcctcccactcatcaacccctttgaccagagaaagaagcactctggttctctatccccttgtcacatagagagtttgtcatggggcctctggctgtgcccttcacataacagaatgacttgccatctgcctgcaccaaacccagggatgtggaagacatctccccacaactgccactgctcaccaggacaagctgcccttcctgtctccacctctcagtccccctagaatggatggctggggagaggtggaggctgacagctgagacgtagtgtcagatatgatctaggagggcggatcaccgggatccgggaccatacaagtaacatggtttccatggcaactgcttgctcctttgaattaagacagcagtcagttgtcattgccatgacaaggcctctatctccaggcacaatgtccctgctgtctcctaatccaatggacttgctctcaccccagggatgaaacacccagaaactcacttctcagtcacttccacagccgatgactcagaagagccaaacccagaatggggcctctcttttccccatcacagactcccctgacaacctttcctggcgtaactagaggagtcccagtgcaggataggccctaaacgttttgttaaataaacaggtgcatgaaaggagcctaaggccattgttgatatccactctcttctttccacttccttctcatctttttctccatgttttatgcttctctgattccctcttctgcctgcaccagaccagccccagccctttattcctctccattttcactccttccagcctctgtccctgaactgccactggcaacccatgggacctcaggaccagagactgcttgactcatctggggagggtaagttcacgggggacaaaaaaatgattcctaaagaagaggcttcctagaccagcacaggctcgagaaagacatcccctaggcctggacttctgagcagctttagccaggctccggacggcagccagaggaggcctttccccattgctcctttccccattgctcaatggattccatgtttctttttcttggggggagcagggagggagaaaggtagaaaaatggcagccacctttccaagaaaaatataaagggtccaagctgtatagtatttgtcagtatttttttctgtaaaattcgaacacacacaaaagaaaaatttatttaaataaaatactttgaaaatgaaaagtcttgatgtagtcagatggttactctcttaacattaggtattacccccactcagacatcactcagaaatgatcaatgcagggactctttctgtgacacaaatgtcccagccctccctggtcaccgccttcgccatggtagagtcataggtctgaggatgaggaatgtggctgtctcacccttgcttgcaaaacagatggccttggagaccagactccctcaaaggtgccagctacaggaaaaatacactgatgttccttggcaacacttacagaactttccatcaatgaggtccatcaatggcttcttaaaggaaaaggggggaaatagcaaaaacctaaggaagaatggacctttgagttaaatccagtgtttgttgggaaaggagggatcaaaaacctctatagtagccactagggcaaaaactgtgtgtatgtgtgtgtgtatgtgtgtgtacactgttcaatatggttcaatatggtaccaatagccacatgtgactatttaaattcattgcaatgaaataaaattaaaggtatactagctcaaatatgtct

SEQ ID NO: 53204 - DNA, 4378 bp, Homo sapiens
ccggggccctacacgccagacctggctcggggtgggagtgcagaggcaaccaaaaaggaacccacacctccctccagggcccggggcgctgtcagacggggcagcaaccaggagattccctgggcctgcaggaagcccttccgcggaccgaaagattgttccccattttggagatgaagaaactgagactcaaagcagctgagtgaccttcccaaggacacacactgaactgggcggtgatcaggatctgaatgcacagggcgggtgttcagcgattgtttactacgttgaacgtgacctccaggaaagcagttctggccgagatcccctgacaacgcaaagcaagaagtaacgtggaaggaggctccccaagctggctggccattttgctgctgtgtgtggaggtgctgtcagtggcatgcccaaacccaaagctggaagaggaataaattacaagtggtcaaggttgcatccttttgagcccaggacctgcttgtaagccgagagggttctctggccctaatctagccaagcaccatggagagaatcagtgccttcttcagctctatctgggacaccatcttgaccaaacaccaagaaggcatctacaacaccatctgcctgggagtcctcctgggcctgccactcttggtgatcatcacactcctcttcatctgttgccattgctgctggagcccaccaggcaagaggggccagcagccagagaagaacaagaagaagaagaagaagaagaagaagaaggatgaagaagacctctggatctctgctcaacccaagcttctccagatggagaagagaccatcactgcctgtttagttaggcaggaagcagaggtgtttcctttctggggctaagcctccttctgaccacacacagacatttcaggaacccctgaaataatgcactatgtccatgtccacagagtaactactcaaccaaggaacaaacctcagactaagtgtcccagtggagggcagtcccagggaccacgtggacaattcttggatactgtcttggcagctatgtgtccaatagcaatgctccttactgcagacccaggcatgcctcccacctgtctctggcataccccacatgcaaagcacaaagaacatttatccatacatctcaatatggttcccaagtgtgtgcacatgcacgtaacacacacacacacaaattcaggtagcaggtacgtgggcaagtatattctgctcatcaaatggtcattggctatgtactttgtgcagggaagtacattatctacagtcacaaaaatgtctcatgggaaagccttgccagattcagacacatatatacaatttcctaaccagcaaggcccccatacaccatctattccataaaccactcaggttacagatgcatgctttcctatttctaactctacacataaacttttactggaagtactcataattggacattccagcaacctgctacagtccccacccttgtgtgtcttgatacagacacaccaagtttctgtgcctctgacccctcacctgtgccaagatgtttaaagtgtgatggttcaaaattcattgaaagctcttttcttgtaactcatgacaaagtccgtcctcattgccactgagaggtgtttaatgtgatccaagacctctctgtgaaacattacccccgcaaaccactcagcaaagtgcctttctccaagcaagaacaaagagctcttggtggtgactgctagaaaattatggaagcccactcatttatgtcagtggactgcaactgtgtacctgtgcaatgtttacagatggaaagggtgaggagatgctacacctgagctaggtatctcctatataaccaaagtttccagcagggaaggaactagacaatcatcagtgcagtctcacagaaggcaacactggaagtgatgtcataaggttgtgatgtgtgcacggtatggcacaggtgggatgcagaggtaacagagtttaaatgaaagtaggatgaagctataaagaggtttatttatatttatattgaagctcaggcaagtgccttgcacacagtaggtacttataactaactgtggttactgttggatatgtgatgttgttaagggtaagcttgtaatacctcaccagttctccccgagtgatcttctcttctaagtgagcccactaattgctgcaatggatgaaattgggtgtttaatgctggagagcacatgtaggtgacacatgtgccttgaggtatgtgaggacatgtaaattagatccacagtgagctgaggagggctttccccgccagagtgaggttgggaagcagagttaatccacttataggatgaactgcttggtatttttattgtattgtgactgtattacaaagatggacaattcactccttgggagcaagttatgctctagaagtttatttacaaatatgctgggcagctctcttgaaatattttcccaaggaagctattctacacagtggcaaaattgctatctaattaataatgtagctaaactatgatatttatagtagcaaaaaactaaattctataagattgcattaaaggaaagatatattctatttgctcacttgggctgcttggtactcacctgccctccaggtgtactttaggcctgtggagggtgggcatttagtggtgacccttgcaccagggttttctaacagatgaccctgtgaatcataatttaaacctgcatatattttatagccagtcacatttgccctctcaccctatatggccataaactgcctaagcactcaggcctcccactcatcaacccctttgaccagagaaagaagcactctggttctctatccccttgtcacatagagagtttgtcatggggcctctggctgtgcccttcacataacagaatgacttgccatctgcctgcaccaaacccagggatgtggaagacatctccccacaactgccactgctcaccaggacaagctgcccttcctgtctccacctctcagtccccctagaatggatggctggggagaggtggaggctgacagctgagacgtagtgtcagatatgatctaggagggcggatcaccgggatccgggaccatacaagtaacatggtttccatggcaactgcttgctcctttgaattaagacagcagtcagttgtcattgccatgacaaggcctctatctccaggcacaatgtccctgctgtctcctaatccaatggacttgctctcaccccagggatgaaacacccagaaactcacttctcagtcattccttctcatctttttctccatgttttatgcttctctgattccctcttctgcctgcaccagaccagccccagccctttattcctctccattttcactccttccagcctctgtccctgaactgccactggcaacccatgggacctcaggaccagagactgcttgactcatctggggagggtaagttcacgggggacaaaaaaatgattcctaaagaagaggcttcctagaccagcacaggctcgagaaagacatcccctaggcctggacttctgagcagctttagccaggctccggacggcagccagaggaggcctttccccattgctcctttccccattgctcaatggattccatgtttctttttcttggggggagcagggagggagaaaggtagaaaaatggcagccacctttccaagaaaaatataaagggtccaagctgtatagtatttgtcagtatttttttctgtaaaattcgaacacacacaaaagaaaaatttatttaaataaaatactttgaaaatgaaaagtcttgatgtagtcagatggttactctcttaacattaggtattacccccactcagacatcactcagaaatgatcaatgcagggactctttctgtgacacaaatgtcccagccctccctggtcaccgccttcgccatggtagagtcataggtctgaggatgaggaatgtggctgtctcacccttgcttgcaaaacagatggccttggagaccagactccctcaaaggtgccagctacaggaaaaatacactgatgttccttggcaacacttacagaactttccatcaatgaggtccatcaatggcttcttaaaggaaaaggggggaaatagcaaaaacctaaggaagaatggacctttgagttaaatccagtgtttgttgggaaaggagggatcaaaaacctctatagtagccactagggcaaaaactgtgtgtatgtgtgtgtgtatgtgtgtgtacactgttcaatatggttcaatatggtaccaatagccacatgtgactatttaaattcattgcaatgaaataaaattaaaggtatactagctcaaatatgtct

SEQ ID NO: 53205 - DNA, 2289 bp, Homo sapiens
ccggggccctacacgccagacctggctcggggtgggagtgcagagttaatccacttataggatgaactgcttggtatttttattgtattgtgactgtattacaaagatggacaattcactccttgggagcaagttatgctctagaagtttatttacaaatatgctgggcagctctcttgaaatattttcccaaggaagctattctacacagtggcaaaattgctatctaattaataatgtagctaaactatgatatttatagtagcaaaaaactaaattctataagattgcattaaaggaaagatatattctatttgctcacttgggctgcttggtactcacctgccctccaggtgtactttaggcctgtggagggtgggcatttagtggtgacccttgcaccagggttttctaacagatgaccctgtgaatcataatttaaacctgcatatattttatagccagtcacatttgccctctcaccctatatggccataaactgcctaagcactcaggcctcccactcatcaacccctttgaccagagaaagaagcactctggttctctatccccttgtcacatagagagtttgtcatggggcctctggctgtgcccttcacataacagaatgacttgccatctgcctgcaccaaacccagggatgtggaagacatctccccacaactgccactgctcaccaggacaagctgcccttcctgtctccacctctcagtccccctagaatggatggctggggagaggtggaggctgacagctgagacgtagtgtcagatatgatctaggagggcggatcaccgggatccgggaccatacaagtaacatggtttccatggcaactgcttgctcctttgaattaagacagcagtcagttgtcattgccatgacaaggcctctatctccaggcacaatgtccctgctgtctcctaatccaatggacttgctctcaccccagggatgaaacacccagaaactcacttctcagtcacttccacagccgatgactcagaagagccaaacccagaatggggcctctcttttccccatcacagactcccctgacaacctttcctggcgtaactagaggagtcccagtgcaggataggccctaaacgttttgttaaataaacaggtgcatgaaaggagcctaaggccattgttgatatccactctcttctttccacttccttctcatctttttctccatgttttatgcttctctgattccctcttctgcctgcaccagaccagccccagccctttattcctctccattttcactccttccagcctctgtccctgaactgccactggcaacccatgggacctcaggaccagagactgcttgactcatctggggagggtaagttcacgggggacaaaaaaatgattcctaaagaagaggcttcctagaccagcacaggctcgagaaagacatcccctaggcctggacttctgagcagctttagccaggctccggacggcagccagaggaggcctttccccattgctcctttccccattgctcaatggattccatgtttctttttcttggggggagcagggagggagaaaggtagaaaaatggcagccacctttccaagaaaaatataaagggtccaagctgtatagtatttgtcagtatttttttctgtaaaattcgaacacacacaaaagaaaaatttatttaaataaaatactttgaaaatgaaaagtcttgatgtagtcagatggttactctcttaacattaggtattacccccactcagacatcactcagaaatgatcaatgcagggactctttctgtgacacaaatgtcccagccctccctggtcaccgccttcgccatggtagagtcataggtctgaggatgaggaatgtggctgtctcacccttgcttgcaaaacagatggccttggagaccagactccctcaaaggtgccagctacaggaaaaatacactgatgttccttggcaacacttacagaactttccatcaatgaggtccatcaatggcttcttaaaggaaaaggggggaaatagcaaaaacctaaggaagaatggacctttgagttaaatccagtgtttgttgggaaaggagggatcaaaaacctctatagtagccactagggcaaaaactgtgtgtatgtgtgtgtgtatgtgtgtgtacactgttcaatatggttcaatatggtaccaatagccacatgtgactatttaaattcattgcaatgaaataaaattaaaggtatactagctcaaatatgtct

SEQ ID NO: 53206 - DNA, 4504 bp, Homo sapiens
tggagcgaaacctcaactatgccaggcgtcggcccgtaggaaggcagggaacacagagggcgctgccctcggcggcagcggcagattgttccccattttggagatgaagaaactgagactcaaagcagctgagtgaccttcccaaggacacacactgaactgggcggtgatcaggatctgaatgcacagggcgggtgttcagcgattgtttactacgttgaacgtgacctccaggaaagcagttctggccgagatcccctgacaacgcaaagcaagaagtaacgtggaaggaggctccccaagctggctggccattttgctgctgtgtgtggaggtgctgtcagtggcatgcccaaacccaaagctggaagaggaataaattacaagtggtcaaggttgcatccttttgagcccaggacctgcttgtaagccgagagggttctctggccctaatctagccaagcaccatggagagaatcagtgccttcttcagctctatctgggacaccatcttgaccaaacaccaagaaggcatctacaacaccatctgcctgggagtcctcctgggcctgccactcttggtgatcatcacactcctcttcatctgttgccattgctgctggagcccaccaggcaagaggggccagcagccagagaagaacaagaagaagaagaagaagaagaagaagaaggatgaagaagacctctggatctctgctcaacccaagcttctccagatggagaagagaccatcactgcctgtttagttaggcaggaagcagaggtgtttcctttctggggctaagcctccttctgaccacacacagacatttcaggaacccctgaaataatgcactatgtccatgtccacagagtaactactcaaccaaggaacaaacctcagactaagtgtcccagtggagggcagtcccagggaccacgtggacaattcttggatactgtcttggcagctatgtgtccaatagcaatgctccttactgcagacccaggcatgcctcccacctgtctctggcataccccacatgcaaagcacaaagaacatttatccatacatctcaatatggttcccaagtgtgtgcacatgcacgtaacacacacacacacaaattcaggtagcaggtacgtgggcaagtatattctgctcatcaaatggtcattggctatgtactttgtgcagggaagtacattatctacagtcacaaaaatgtctcatgggaaagccttgccagattcagacacatatatacaatttcctaaccagcaaggcccccatacaccatctattccataaaccactcaggttacagatgcatgctttcctatttctaactctacacataaacttttactggaagtactcataattggacattccagcaacctgctacagtccccacccttgtgtgtcttgatacagacacaccaagtttctgtgcctctgacccctcacctgtgccaagatgtttaaagtgtgatggttcaaaattcattgaaagctcttttcttgtaactcatgacaaagtccgtcctcattgccactgagaggtgtttaatgtgatccaagacctctctgtgaaacattacccccgcaaaccactcagcaaagtgcctttctccaagcaagaacaaagagctcttggtggtgactgctagaaaattatggaagcccactcatttatgtcagtggactgcaactgtgtacctgtgcaatgtttacagatggaaagggtgaggagatgctacacctgagctaggtatctcctatataaccaaagtttccagcagggaaggaactagacaatcatcagtgcagtctcacagaaggcaacactggaagtgatgtcataaggttgtgatgtgtgcacggtatggcacaggtgggatgcagaggtaacagagtttaaatgaaagtaggatgaagctataaagaggtttatttatatttatattgaagctcaggcaagtgccttgcacacagtaggtacttataactaactgtggttactgttggatatgtgatgttgttaagggtaagcttgtaatacctcaccagttctccccgagtgatcttctcttctaagtgagcccactaattgctgcaatggatgaaattgggtgtttaatgctggagagcacatgtaggtgacacatgtgccttgaggtatgtgaggacatgtaaattagatccacagtgagctgaggagggctttccccgccagagtgaggttgggaagcagagttaatccacttataggatgaactgcttggtatttttattgtattgtgactgtattacaaagatggacaattcactccttgggagcaagttatgctctagaagtttatttacaaatatgctgggcagctctcttgaaatattttcccaaggaagctattctacacagtggcaaaattgctatctaattaataatgtagctaaactatgatatttatagtagcaaaaaactaaattctataagattgcattaaaggaaagatatattctatttgctcacttgggctgcttggtactcacctgccctccaggtgtactttaggcctgtggagggtgggcatttagtggtgacccttgcaccagggttttctaacagatgaccctgtgaatcataatttaaacctgcatatattttatagccagtcacatttgccctctcaccctatatggccataaactgcctaagcactcaggcctcccactcatcaacccctttgaccagagaaagaagcactctggttctctatccccttgtcacatagagagtttgtcatggggcctctggctgtgcccttcacataacagaatgacttgccatctgcctgcaccaaacccagggatgtggaagacatctccccacaactgccactgctcaccaggacaagctgcccttcctgtctccacctctcagtccccctagaatggatggctggggagaggtggaggctgacagctgagacgtagtgtcagatatgatctaggagggcggatcaccgggatccgggaccatacaagtaacatggtttccatggcaactgcttgctcctttgaattaagacagcagtcagttgtcattgccatgacaaggcctctatctccaggcacaatgtccctgctgtctcctaatccaatggacttgctctcaccccagggatgaaacacccagaaactcacttctcagtcacttccacagccgatgactcagaagagccaaacccagaatggggcctctcttttccccatcacagactcccctgacaacctttcctggcgtaactagaggagtcccagtgcaggataggccctaaacgttttgttaaataaacaggtgcatgaaaggagcctaaggccattgttgatatccactctcttctttccacttccttctcatctttttctccatgttttatgcttctctgattccctcttctgcctgcaccagaccagccccagccctttattcctctccattttcactccttccagcctctgtccctgaactgccactggcaacccatgggacctcaggaccagagactgcttgactcatctggggagggtaagttcacgggggacaaaaaaatgattcctaaagaagaggcttcctagaccagcacaggctcgagaaagacatcccctaggcctggacttctgagcagctttagccaggctccggacggcagccagaggaggcctttccccattgctcctttccccattgctcaatggattccatgtttctttttcttggggggagcagggagggagaaaggtagaaaaatggcagccacctttccaagaaaaatataaagggtccaagctgtatagtatttgtcagtatttttttctgtaaaattcgaacacacacaaaagaaaaatttatttaaataaaatactttgaaaatgaaaagtcttgatgtagtcagatggttactctcttaacattaggtattacccccactcagacatcactcagaaatgatcaatgcagggactctttctgtgacacaaatgtcccagccctccctggtcaccgccttcgccatggtagagtcataggtctgaggatgaggaatgtggctgtctcacccttgcttgcaaaacagatggccttggagaccagactccctcaaaggtgccagctacaggaaaaatacactgatgttccttggcaacacttacagaactttccatcaatgaggtccatcaatggcttcttaaaggaaaaggggggaaatagcaaaaacctaaggaagaatggacctttgagttaaatccagtgtttgttgggaaaggagggatcaaaaacctctatagtagccactagggcaaaaactgtgtgtatgtgtgtgtgtatgtgtgtgtacactgttcaatatggttcaatatggtaccaatagccacatgtgactatttaaattcattgcaatgaaataaaattaaaggtatactagctcaaatatgtct

SEQ ID NO: 53207 - DNA, 4652 bp, Homo sapiens
ccggggccctacacgccagacctggctcggggtgggagtgcagaggcaaccaaaaaggaacccacacctccctccagggcccggggcgctgtcagacggggcagcaaccaggagattccctgggcctgcaggaagcccttccgcggaccgaaagattgttccccattttggagatgaagaaactgagactcaaagcagctgagtgaccttcccaaggacacacactgaactgggcggtgatcaggatctgaatgcacagggcgggtgttcagcgattgtttactacgttgaacgtgacctccaggaaagcagttctggccgagatcccctgacaacgcaaagcaagaagtaacgtggaaggaggctccccaagctggctggccattttgctgctgtgtgtggaggctgtcagtggcatgcccaaacccaaagctggaagaggaataaattacaagtggtcaaggttgctgctgtgtgtggaggtgctgtcagtggcatgcccaaacccaaagctggaagaggaataaattacaagtggtcaaggttgcatccttttgagcccaggacctgcttgtaagccgagagggttctctggccctaatctagccaagcaccatggagagaatcagtgccttcttcagctctatctgggacaccatcttgaccaaacaccaagaaggcatctacaacaccatctgcctgggagtcctcctgggcctgccactcttggtgatcatcacactcctcttcatctgttgccattgctgctggagcccaccaggcaagaggggccagcagccagagaagaacaagaagaagaagaagaagaagaagaagaaggatgaagaagacctctggatctctgctcaacccaagcttctccagatggagaagagaccatcactgcctgtttagttaggcaggaagcagaggtgtttcctttctggggctaagcctccttctgaccacacacagacatttcaggaacccctgaaataatgcactatgtccatgtccacagagtaactactcaaccaaggaacaaacctcagactaagtgtcccagtggagggcagtcccagggaccacgtggacaattcttggatactgtcttggcagctatgtgtccaatagcaatgctccttactgcagacccaggcatgcctcccacctgtctctggcataccccacatgcaaagcacaaagaacatttatccatacatctcaatatggttcccaagtgtgtgcacatgcacgtaacacacacacacacaaattcaggtagcaggtacgtgggcaagtatattctgctcatcaaatggtcattggctatgtactttgtgcagggaagtacattatctacagtcacaaaaatgtctcatgggaaagccttgccagattcagacacatatatacaatttcctaaccagcaaggcccccatacaccatctattccataaaccactcaggttacagatgcatgctttcctatttctaactctacacataaacttttactggaagtactcataattggacattccagcaacctgctacagtccccacccttgtgtgtcttgatacagacacaccaagtttctgtgcctctgacccctcacctgtgccaagatgtttaaagtgtgatggttcaaaattcattgaaagctcttttcttgtaactcatgacaaagtccgtcctcattgccactgagaggtgtttaatgtgatccaagacctctctgtgaaacattacccccgcaaaccactcagcaaagtgcctttctccaagcaagaacaaagagctcttggtggtgactgctagaaaattatggaagcccactcatttatgtcagtggactgcaactgtgtacctgtgcaatgtttacagatggaaagggtgaggagatgctacacctgagctaggtatctcctatataaccaaagtttccagcagggaaggaactagacaatcatcagtgcagtctcacagaaggcaacactggaagtgatgtcataaggttgtgatgtgtgcacggtatggcacaggtgggatgcagaggtaacagagtttaaatgaaagtaggatgaagctataaagaggtttatttatatttatattgaagctcaggcaagtgccttgcacacagtaggtacttataactaactgtggttactgttggatatgtgatgttgttaagggtaagcttgtaatacctcaccagttctccccgagtgatcttctcttctaagtgagcccactaattgctgcaatggatgaaattgggtgtttaatgctggagagcacatgtaggtgacacatgtgccttgaggtatgtgaggacatgtaaattagatccacagtgagctgaggagggctttccccgccagagtgaggttgggaagcagagttaatccacttataggatgaactgcttggtatttttattgtattgtgactgtattacaaagatggacaattcactccttgggagcaagttatgctctagaagtttatttacaaatatgctgggcagctctcttgaaatattttcccaaggaagctattctacacagtggcaaaattgctatctaattaataatgtagctaaactatgatatttatagtagcaaaaaactaaattctataagattgcattaaaggaaagatatattctatttgctcacttgggctgcttggtactcacctgccctccaggtgtactttaggcctgtggagggtgggcatttagtggtgacccttgcaccagggttttctaacagatgaccctgtgaatcataatttaaacctgcatatattttatagccagtcacatttgccctctcaccctatatggccataaactgcctaagcactcaggcctcccactcatcaacccctttgaccagagaaagaagcactctggttctctatccccttgtcacatagagagtttgtcatggggcctctggctgtgcccttcacataacagaatgacttgccatctgcctgcaccaaacccagggatgtggaagacatctccccacaactgccactgctcaccaggacaagctgcccttcctgtctccacctctcagtccccctagaatggatggctggggagaggtggaggctgacagctgagacgtagtgtcagatatgatctaggagggcggatcaccgggatccgggaccatacaagtaacatggtttccatggcaactgcttgctcctttgaattaagacagcagtcagttgtcattgccatgacaaggcctctatctccaggcacaatgtccctgctgtctcctaatccaatggacttgctctcaccccagggatgaaacacccagaaactcacttctcagtcacttccacagccgatgactcagaagagccaaacccagaatggggcctctcttttccccatcacagactcccctgacaacctttcctggcgtaactagaggagtcccagtgcaggataggccctaaacgttttgttaaataaacaggtgcatgaaaggagcctaaggccattgttgatatccactctcttctttccacttccttctcatctttttctccatgttttatgcttctctgattccctcttctgcctgcaccagaccagccccagccctttattcctctccattttcactccttccagcctctgtccctgaactgccactggcaacccatgggacctcaggaccagagactgcttgactcatctggggagggtaagttcacgggggacaaaaaaatgattcctaaagaagaggcttcctagaccagcacaggctcgagaaagacatcccctaggcctggacttctgagcagctttagccaggctccggacggcagccagaggaggcctttccccattgctcctttccccattgctcaatggattccatgtttctttttcttggggggagcagggagggagaaaggtagaaaaatggcagccacctttccaagaaaaatataaagggtccaagctgtatagtatttgtcagtatttttttctgtaaaattcgaacacacacaaaagaaaaatttatttaaataaaatactttgaaaatgaaaagtcttgatgtagtcagatggttactctcttaacattaggtattacccccactcagacatcactcagaaatgatcaatgcagggactctttctgtgacacaaatgtcccagccctccctggtcaccgccttcgccatggtagagtcataggtctgaggatgaggaatgtggctgtctcacccttgcttgcaaaacagatggccttggagaccagactccctcaaaggtgccagctacaggaaaaatacactgatgttccttggcaacacttacagaactttccatcaatgaggtccatcaatggcttcttaaaggaaaaggggggaaatagcaaaaacctaaggaagaatggacctttgagttaaatccagtgtttgttgggaaaggagggatcaaaaacctctatagtagccactagggcaaaaactgtgtgtatgtgtgtgtgtatgtgtgtgtacactgttcaatatggttcaatatggtaccaatagccacatgtgactatttaaattcattgcaatgaaataaaattaaaggtatactagctcaaatatgtct

SEQ ID NO: 53208 - DNA, 1966 bp, Homo sapiens
ccggggccctacacgccagacctggctcggggtgggagtgcagaggcaaccaaaaaggaacccacacctccctccagggcccggggcgctgtcagacggggcagcaaccaggagattccctgggcctgcaggaagcccttccgcggaccgaaagattgttccccattttggagatgaagaaactgagactcaaagcagctgagtgaccttcccaaggacacacactgaactgggcggtgatcaggatctgaatgcacagggcgggtgttcagcgattgtttactacgttgaacgtgacctccaggaaagcagttctggccgagatcccctgacaacgcaaagcaagaagtaacgtggaaggaggctccccaagctggctggccattttgctgctgtgtgtggaggtgctgtcagtggcatgcccaaacccaaagctggaagaggaataaattacaagtggtcaaggttgcatccttttgagcccaggacctgcttgtaagccgagagggttctctggccctaatctagccaagcaccatggagagaatcagtgccttcttcagctctatctgggacaccatcttgaccaaacaccaagaaggcatctacaacaccatctgcctgggagtcctcctgggcctgccactcttggtgatcatcacactcctcttcatctgttgccattgctgctggagcccaccaggcaagaggggccagcagccagagaagaacaagaagaagaagaagaagaagaagaagaaggatgaagaagacctctggatctctgctcaacccaagcttctccagatggagaagagaccatcactgcctgtttagttaggcaggaagcagaggtgtttcctttctggggctaagcctccttctgaccacacacagacatttcaggaacccctgaaataatgcactatgtccatgtccacagagtaactactcaaccaaggaacaaacctcagactaagtgtcccagtggagggcagtcccagggaccacgtggacaattcttggatactgtcttggcagctatgtgtccaatagcaatgctccttactgcagacccaggcatgcctcccacctgtctctggcataccccacatgcaaagcacaaagaacatttatccatacatctcaatatggttcccaagtgtgtgcacatgcacgtaacacacacacacacaaattcaggtagcaggtacgtgggcaagtatattctgctcatcaaatggtcattggctatgtactttgtgcagggaagtacattatctacaccacctttccaagaaaaatataaagggtccaagctgtatagtatttgtcagtatttttttctgtaaaattcgaacacacacaaaagaaaaatttatttaaataaaatactttgaaaatgaaaagtcttgatgtagtcagatggttactctcttaacattaggtattacccccactcagacatcactcagaaatgatcaatgcagggactctttctgtgacacaaatgtcccagccctccctggtcaccgccttcgccatggtagagtcataggtctgaggatgaggaatgtggctgtctcacccttgcttgcaaaacagatggccttggagaccagactccctcaaaggtgccagctacaggaaaaatacactgatgttccttggcaacacttacagaactttccatcaatgaggtccatcaatggcttcttaaaggaaaaggggggaaatagcaaaaacctaaggaagaatggacctttgagttaaatccagtgtttgttgggaaaggagggatcaaaaacctctatagtagccactagggcaaaaactgtgtgtatgtgtgtgtgtatgtgtgtgtacactgttcaatatggttcaatatggtaccaatagccacatgtgactatttaaattcattgcaatgaaataaaattaaaggtatactagctcaaatatgtct

SEQ ID NO: 53209 - DNA, 339 bp, Homo sapiens
aatcagttacctcgtggacagatcacgtctaataatgttaatgaccacacagtattagtagcttagatgagttcagctgtgtaaaatatttagaacagtgctaagcaggtagaacatattcagtaatactatcattgttattcaatgataacattgaatatacagaaggttgcatacgccttctgctgtggttatggggtgctttcaataaacattctatatcagaagtaatatctttgctgttaaagagtgtgaatttagaaatgaagtttaaatgacatcttgagagttctgtttctagcagtggtggactaggttgtttcagaccaatcccctgct

SEQ ID NO: 53210 - DNA, 202 bp, Homo sapiens
ccactggtactataacatcaattatctgaaaccggctccctgttctccccatttatcatattttcctctcattatcttcatctgttcaagttcatccttcacatcactaattccaattttgcagataaactcggctctttactacatagaatgtaggttttaattctgttcttacgttttctgcttccctgaaatccttcct

SEQ ID NO: 53211 - DNA, 365 bp, Homo sapiens
agtagagacgaggtttcaccatgttgaccaggctggtctcgaactcttgacctcaaatgatccacccacctcggcctcccaaagtgctgggataacaagtgtgagccaccacgcctagcctgcctttcaatttaaaaacccattaaaatgtgtaatatgtgaatactttgttttttagggttattttttattgttttaaataaggtaactaggctggatgtggtggctcaaaccagtaacctcggcagtttcggaggctgaggcaggcggtttgcttgactccagaagattgagacaagtctgggcaatatggtgaaactccatttctacaaaagaaaagttttaaattagcctggagtgttggc

SEQ ID NO: 53212 - DNA, 385 bp, Homo sapiens
agacctcctgctgctggctttgggggcatctgctgtttttctcacccacaaagggcagtctgtctttgagcacttacagtgtatgcaaggagagtagcccagttctgacctgtcaatcactaggttagactctctctgaaactctcctttaggcaatggcatctaatctatgcaacagtcagagtgccagacacccagggcttgggctaggcttgcagggctcgctggagtggcccttggatcttagaactaacagaatcaagggaagtgggaaagccaaggccagactcagcagcagtagtcctgtgaaagagctagactatggggagagaaaccaaataggagctaacaggtcagctgtggacagcaagagaaagagagaggt

SEQ ID NO: 53213 - DNA, 271 bp, Homo sapiens
ccagaaaaaatggccactactaccacttggctcagaaatgctagtctttattttctgaaatgttttatatagaaaaaatttaataataaatagacattcttatatatttccttaccattttagattgggttaaaaagtatggagacttccggccgggtgcggtgattcaagcctgcaatcccagcactttgggaggctgaggcagacagatcatgaggtcgggatctgtggctaacacagtgaaacctcatctctaccaaaaatacaaaaa

SEQ ID NO: 53214 - DNA, 832 bp, Homo sapiens
gaggggatggaatctcagttcttctatgttttggcccagaaatggagcacgcatctctttatagctcaatattagaactagtggcatggcaaagagaaggtgttatctcagggtccatggaagtggagagctggatattggtgaagactggtcatggctgccactaatacatcagtgaataaagcagagattacaatctagtaaactttcctatattctattagataatgtttttaaatctctctatatatatagatttaaaattttaaaatatatatatatatatgtgtagatagatagattaaaatatagtaagaattgcctgcaggtaaggtactgaagacttatccacccccagtgcattttaactcttgatgctttagataacttaacatactatgattttctatttttatgtgttaataacaaataacacacatacttggaaatactctaaaattgatggagaactctcttctaaaaagctgtattatgctaaatgctagttcctgtgataaagatcaaatttgttaaattgatatttaccactaaaaatgttccctctttgctataaacttgttaatttaaatactaggagactccattcgttataaaacagttattcaaagcctacaatgcgtaggaaccaaatactgagactatgttagtgagtaaaactagccgtgatggagcttatatccaatagaagagatcgacactaatcaagtaatcatactggtgagaatggcttgaaccctggaggcagaggttgcaatgagccgagatcccactacggcactccagcctggacgacagaatgagactccatctc

SEQ ID NO: 53215 - DNA, 425 bp, Homo sapiens
gtaaaatgtagcacagctcataagcaattgttgaagtatggctgcctaagtgtgacaggcaggaaaaaatgctttaaggacacgttgaagcatgtccattgaggcggttagctggggaaaccacagagacaaaccaggctggaaagtaacaatcataactatatttgagacaagtcatcatcagtctaaaaaagaggcccatttcttggtgtaataaggaaattatctttttgaaaccaacaaccaacatcacgattaatatgggaaacactcagtatttctaatactgttaaggaacaaaacaggggagaccactgttcataggctatttaaggaatttacactttggattaaaaccccggttcttttaccctgacctccagggtccatggcacccctccccttcctgctccatctgcctctct

SEQ ID NO: 53216 - DNA, 887 bp, Homo sapiens
gaactgttggtttgtgttcaaggagaccccgtggcatggacagggccagggccaggaccaggaccaggaccaggaccagggccagggtcccagccaggagagtgcagctgagcagggagcagtggagaagcagtaagcagccccccacctggctattcccgaactggacagcacctcttcaaccacctccggcttccaggacctttctcttcctcctcctccaattcccctcccccatcattctggtctttgagctttgagacgatgggcaggcatcagctgttggaaacctgggcagccctctcagtggcttcctatcctccttcttgctggagccatgaatggcaggagctcagtgcttcttgtgcagtgcctggacccaggtatcttacttggggtcttacttgtacccttacagtctctgagaaccagcctctgctgcaggtgagggttgggggcaggaaaccagtgctctgagactggttcctagcagccacctttctgtcaacctgtccggcttcaacaatattagggggaagggaaatcagctagtagccttcccctctggtcccttgtgtggaggccccaatagtggtttggcgacccctcctcagtggctgtcatctagtccctgcgtctgatctccagtcatcccatgactcagtgtgccttccactgtcttctctggcctctgcctgcccacagaatccaccatgtgtgaaccagagaggtccaccagcctagaaaacagcccttcagagggtcctgatgaggccttcctggactcagctgggagcaagataaattgcaactgagttgcagcttcaagaaagtaaagccagtaagcttgctggcagaatcaatttcttctatcccctcaatcctcc

SEQ ID NO: 53217 - DNA, 425 bp, Homo sapiens
ctgcttgcaatggagtgagcacatagcacagcctccactgctctgctggtgttctgctgaagaccactgctgtcgtgcttttactgatggcccccaccactctactggagcacttttgccaacagcctcctgacacagtacgctagcagtccttaccaccccagggagtgcaccaccagcagcctctgctgtccccaaaggagtgctttagctggtggccccccaatggagtgcttttgctagcagccagagagcaccccagcacccctagcacagctggtacttgactttgaggggccagagaattaaaccacaggactggtgccagcccccagggttagagagtacagcctaggagtgtcaaggtgagccagaaacaaagttagaaagtcagtaaactatacccaatttacaccagtcaaacc

SEQ ID NO: 53218 - DNA, 238 bp, Homo sapiens
aagagatcctcttgccttgaccttccaaagtgctgggattaacaggcatgagccactgcacctggtccctttcatttttaattacctgcatttctgagtagctctagaaccaagaactagagatgatgggatggatgtcctggtcgttggtcagattccgcccactgtttggtgatgggaaccagcttatattcgtgggtcattagcatttcagatgaagtgctggcaagggaccctg

SEQ ID NO: 53219 - DNA, 199 bp, Homo sapiens
gtggtatctcattgtggttttgatttgcatttttgaaatgataagtgatgttgagcatcttttcttatgcttactgttcatttgcatattttctttggagaaatacctatttaagtcctttgcccactgttgagtcagattttttgttgttgagttttagggatactttttaaagatgctaatcacgtgaactcctttt

SEQ ID NO: 53220 - DNA, 2363 bp, Homo sapiens
taataatagccattcggactggtgtgagatggtgtctcattgtggtttgggtttgcatttctctaatgatcagtggtgttgagctttttatcatatccttgactaagacccatcagtcaatttgtggaatcaagactggcttcaagatagactaactcctagtagactttttcactaacagttacaatccctgaaccgcagactctacactgaaaaggtcccatcatatgggcactcctgctgctgagaaaattgaacataacagtatttcagataaacctatgagaagatgaaactaagtggaggtagaattcaaacttgttcagagaaagatacaaaacgagagacgtgaaataaccattgtctgtaggtctgacagcaagaaatagagatagaagagcttcatttgaagttttgaactgtttaccttaaaaatattaatggtgaatgcttatcaatcatgtctgtgtgtcaggcactgttctaagtgctttatgttcattaaccatttgcagtaaatactgttttccttcccacaaaacaagtgaggaaagagaggcttagagaggggaagtcagtggccccaaatcctgcagttgataagtgatggacttaaccaggatttaaccctcggcagtctgatccccgagctccgagtgctaatcgttcaccctctccctcctcccacccttccaaccctcaaagagacccccagtgtgtgtggctccccctacgcgtcaggaacatcgggccattcaagcagcctttaggttatagagatgatttacagtcacatggaaggagagttttgcttaaaactggtagaagaaataggtaaagtaagtgggaaatgaggtaagcttgctagctacacaaatcatcttcacaactcgaagctcaaataccctcagtgttcagctggtgtgtcttcactatttgatgtgcagtaaatattctcgcttctttttcactataagagcaacgtcattttcagtgtccacaagctggattcacgtagatcccccaaatccttaaacatctgtgaccgttggtgtataaacggtcgaagcatttgatcaacttcctaaaaaaaaagtgaaaaaaattatagtgatagatttcatgtcatcagtaaaaaatgtgtgtgtatgagtggggtgcccactaagttcccctttgggatagaaaactgcttttgaaagctgctagcagaggcagtaagtcacctaggagcagttttgtttcggatgaccctaagttactgccagtagggaaaactggtgagataagtcaaatattttccactggaatgttacttccttagtgttttaatactgtcgaaggagtattaaaggagtcttgaggggccagtgggtgtaggggctctcccattggtagggttttgccgatgcttcccctaacctgtggaggcaagtacccctgagaactagggatgccctggggcagagtcctggagacaagtgttggaggagatggtaccgcactggctgaaaatgggaacggcagagagcaggtagtgtgacgtgatggaggagatggtaccgcactcactgaaaatgggaacagcagagagcaggtagtgtgacgtgatggaggagatggtaccgcactcactgaaaatgggaacagcagagagtggcactgggattcagtttctatttccctgagtattagtgaaatgcctgttcaaatcctttgccgatttttttcgaatgtgctttccaacatattatctttttttaaatcttaaaagtaatagtttattctgaatactaatgcttgctaaataatattaatatattttccaggctgtggtttatttgaaactttgtttaaggtgtctttcatttaaccagttattcttttttattgtgagctacgtagaacagaaaagtaccctaaatatattgacaggcctaaagtgaacacacctgctctagagagcccactgcctggaactcctcctgtcaccttcttcctgtcccagaagcaactgccagcctgacttgtgtggtcaccattttcttgcctttctcaatagttttgccacctagagtatatccctaaacagtatattttgccctctttgaatgtttatagaatcatgttggatgtcatctttcgtaacttggtttccatcactattggaagactcttcttgttgcctgtggctgttgttcactttcatggcaatgtagtgttacacagcatagaggggccaaaatttacccgtcttcggtgaacatgtattagggatggaaaccaagttacaaaagatgacatccaacatgattctataaacattcaaagagggcaaaatatactgtctgagtcactatctt

SEQ ID NO: 53221 - DNA, 515 bp, Homo sapiens
tgttaaatctgacttttatttgcaactctagaatcgggcaacacttcattctataaaatggaatgagtgttcaaatgagctgagcagaggagattggttttacagccagaaaagggctgaggaaagcagaaacagaaaacaaaaagattggttgtttcaaagttactttccttgtaactttgaaggctaaagcagaggggacttccttatcctgccagctaaaacaggatggtttggagatctagctatctctcactcttctgatttatcggaatatcagataaacaacttagtttccacttggtgatgtagaactttagcatgagtgactccattttggttctgttgggcttggtgcaggagccctgttcaaaccaatggcctccaatttttttttttttttgagacggagtcttgctctgttgcccaggctggaatgaagtgttactttctgagctcactgcagcctccacttcctggattcaagcaattctcctgcctcagcctccgaagta

SEQ ID NO: 53222 - DNA, 817 bp, Homo sapiens
ccagccttaagttcatgtattgaaccaatgatttctaagtggtttagcttattattaaagtgtcctttaaacatggcctaaaccttggctggtgcagctggaggagtgagagctgatatcagaatgctctggcctgtacatcaggaaaatgctaacacctgccccaaccagatgctccttctccaaccatccctataccacaaatcaacttttttttttttaaaaaaaaaacctacagtggtggggtttcctttttaaaatacctgcctcctgatgagactgtgagagaaggatgattttgacaagggtgtagtctcaccaggattacaaaattggctgaaagctgaatgggttcctcaaatatattttttgaacatttggatttaaatgcttttgggcaggaggagaactctccagtgattctcaggtccagccactctctagtgtgttttgactggccccagtaagtatttaggttggtagcccttgtggcaagttctgtttacaggcatctagaagagtacaagaaaacttgcatgctggctgggcccttggcacctgaataaaggatccaaaaaccagacagcctgagcagccatagattcgtatctgagtggggccagtaaagacatgggaactcacttcatagaccccgagtttcagcctgccagtcccaggcccagctgctctcacaagttatttaggttcctctttctggccacacaagctacagctggaaaaatccacctgaacagcctaattttctaactcaaaaattcaggcttaaccagcagcatttgtgggcaaggatcataaa

SEQ ID NO: 53223 - DNA, 140 bp, Homo sapiens
tccagaggtcttttatttttttaacacccacgatgccatgaattcatagggaagaggttccagcagctcaggctccttcccattggttctcacagtgtgctgctctgggtggagcaggctggcgcttcagttgaatccag

SEQ ID NO: 53224 - DNA, 316 bp, Homo sapiens
gaatattgttaatcaatatccacaccttcaaaatgctcatacttagctgagaggcacaaacttcagccagctgcaactccagcctctgcagctaataatgccaggccaggatgtagctcctcattattgagtaaattaggattaaatgataaattactgactccaacgttattgctcaggattctcaattacaaacaatggaatctactggactatattaaacaaaaaatgaatttagtaaatgacatcagatagcaaacagcatctcaaaggggaccaaagagccacattctaaagctacagattaggaacaatg

SEQ ID NO: 53225 - DNA, 735 bp, Homo sapiens
aagtttcactatgctgcccaggctggtctcaaactcctgggctcaaccgattgtcccacctcagcctcccaaagtgctgggattacagccgtgagccaccatgcctggccattttctgttgtttataagcctcgagtttatggtgttttgtgatagcaggctgcatagattaacacagggaccttggacaaagcagagtggtctttccaactatggatacgattgtgtccctccccagctcacacaccctccttggctccccaatgccctcagtgtggagctcatactcctcaggtcagcattcagggcagtcagcccctgcgtttacttcgtggctcaccttagcattgcctcagctcactgagctagactctgcacaaacacgaggcaccgagacatggacgccatctcagagcagaccagggcccctggggcgcctctcagtgggatagggctgcagctttctccttgatccaagtgcttttgagttaaatctgctgccaacgactccaccattcacaggccagggcatctactgtgcgctagccacaggtgctgggcctgggcaagcctggcccccactccctgtagtggggcaggtgcaggcgggggtggctgctcggaggaggtggcctgagggatgtatatgagtttcccaggcagccttaggagggagggtggggatggagaaggttacccttctccatggagggtggtgaggggctgagttttatc

SEQ ID NO: 53226 - DNA, 413 bp, Homo sapiens
caggaggatctcttgagcccataagttcaagactgcagtgagccatgatcacaccattgcactccagcctgggcaagggagggagaccctgtctctaaataaataaataaaataaaatggccataaaacagcatgctgaagcccccttgatcatacagtgccagtgtctctcaccctcgaaatcagttcttcaggtctaatccaaatcctgtttgccccaattcagtaaatttcctctggttttttatccaatggtaaaaaaaagaaacatattgtaacgccattctccaaacaccatgctaccatggcagatttagagaatagctaggaatagtgtgccctaacacaggacttggtctctggcaaaattaccaaagctgagaccaaacagtatggtctagctggtgtcctta

SEQ ID NO: 53227 - DNA, 771 bp, Homo sapiens
tgtaagaagtgcctttcacctcctgccatgattctgaggcctccccagccatgtggaactggttcccagtgccgattccgacactgtgaagaggcccttggcagtgacactgtgtgctcattatggagagagaggaaatgtttagatccactttgcagatttagacacatggaaatgcagcaaaactgcagcatttcatgcttctgggaaactcagcctcttggttgtgtgaagatcagctgtatcttttatcacagcaaacctcgaaatatcaatggattatttttgccaccaagtagcaatatcacactacagaaagaaattcaggaaggaattccactccagtcccagagtcaagaacctctgaaacctcaggaaaatatatcacgacccatccaccatcctttagttttaaaaactaattttgaggaagaagaggaagtagatgaacaaaatgatgcttctagtttatggacaaagacccctgaagaaattgaagaaaaaagagcaataaaggagatgtgttataaatctggggaatactacagatttcatactcctccagatattttgtcatcaaaaagcatgacacctacagcagaaaaacagttagaaaagcctttggaaaatggcagtgaattgcaagaaggagatagtcttacagttccgacaaaacttagccaatatgaaaggcaaggtgaaataaaaacatcattgcatgggaaaccaaagactgacattgctgcttttgaaaatggaggtgagttaatt

SEQ ID NO: 53228 - DNA, 772 bp, Homo sapiens
gaagtttgagtttgtgtgcttactagcaaccactttcagcgtttctgcaaagctagagaagggttcccagtgccgattccgacactgtgaagaggcccttggcagtgacactgtgtgctcattatggagagagaggaaatgtttagatccactttgcagatttagacacatggaaatgcagcaaaactgcagcatttcatgcttctgggaaactcagcctcttggttgtgtgaagatcagctgtatcttttatcacagcaaacctcgaaatatcaatggattatttttgccaccaagtagcaatatcacactacagaaagaaattcaggaaggaattccactccagtcccagagtcaagaacctctgaaacctcaggaaaatatatcacgacccatccaccatcctttagttttaaaaactaattttgaggaagaagaggaagtagatgaacaaaatgatgcttctagtttatggacaaagacccctgaagaaattgaagaaaaaagagcaataaaggagatgtgttataaatctggggaatactacagatttcatactcctccagatattttgtcatcaaaaagcatgacacctacagcagaaaaacagttagaaaagcctttggaaaatggcagtgaattgcaagaaggagatagtcttacagttccgacaaaacttagccaatatgaaaggcaaggtgaaataaaaacatcattgcatgggaaaccaaagactgacattgctgcttttgaaaatggaggtgagttaatt

SEQ ID NO: 53229 - DNA, 392 bp, Homo sapiens
tcagcgagttctcctgagatgtcacttcatctgtctcccctccctcacacctactggtactctccacataggcctattttagctaaaagtggcttagggagaaaaaaaataatttacttataaatttttaaatttcagaagtaacttatagcttcaggcatgtttggatttaggagttttaaacaatattgtcctgactctgttgtctccatcaaagggttctgcttccccggctttctctcacaggtcctgcacgtacaaaggcaaaaaaggccattagcagctctggccttaaatctaccagctgagaaacctcagtggaaacaatatcactttcccactaactttcatagaagtccggtgctgacactctttgggctgactagggtccc

SEQ ID NO: 53230 - DNA, 338 bp, Homo sapiens
  misc_feature (191)..(191): n is a, c, g, or t
  misc_feature (196)..(196): n is a, c, g, or t
  misc_feature (249)..(249): n is a, c, g, or t
  misc_feature (264)..(264): n is a, c, g, or t
  misc_feature (280)..(280): n is a, c, g, or t
  misc_feature (321)..(321): n is a, c, g, or t
ctagaaaggcctgtctgtctagattcttcttggcatctctgagcatggatttcattctggatatggggcaggatgctctctggaatgagggtctttagacctgtttctttgttcttgatgggaccccagagaggacatcacgctttgtaactggttcttcaaggggagaagcaaatgtgtccctgaaaacnttcantgccgcgtttggcaccaggtttgattgacaaggactggtggagggaaagcgcnggaggctgggcatgngtcgtgcatgccgagncagagacaaagaggttttgccatgtccccagagagtggaangggccctgggggtaact

SEQ ID NO: 53231 - DNA, 334 bp, Homo sapiens
taaaaaaattagccgggtgtgatggcacgcgcctgtagtcccagctactcgggaggctgaggcaggaggatcgcttcaacctgggagacggaggttgcagtgagccgagatcgcgtcactgtactccggccttgcgacagagacaacgtctcaaaaaaaaaaaagattaagttttaaaaaagtaaaagacttctttcttcgtttgtaatccgtccctccttcccacgccattccctggcattactgcttaggtatcctttgtgcctgccctgctttcttcaagctgaatcttgggtctctaacttcttccttggaaaggatgggtggtgatcct

SEQ ID NO: 53232 - DNA, 5690 bp, Homo sapiens
ggcggttaagtcctgtacctaggaaagagggcgagctctggggcgctctccggtgtcatgaggagcttcaaaagagtcaactttgggactctgctaagcagccagaaggaggctgaagagttgctgcccgacttgaaggtgggggtgctgcctggctcgggatacacctggctttccaaactgagctgttttgtgtttgccttttgaagagatggataagagttcctgtccaaccctccagctggttttcccagcagccgatctgatgctgagaggagacaagcttgtgatgccatcctgagggcttgcaaccagcagctgactgctaagctagcttgccctaggcatctggggagcctgctggagctggcagagctggcctgtgatggctacttagtgtctaccccacagcgtcctcccctctacctggaacgaattctctttgtcttactgcggaatgctgctgcacaaggaagcccagaggccacactccgccttgctcagcccctccatgcctgcttggtgcagtgctctcgcgaggctgctccccaggactatgaggccgtggctcggggcagcttttctctgctttggaagggggcagaagccctgttggaacggcgagctgcatttgcagctcggctgaaggccttgagcttcctagtactcttggaggatgaaagtaccccttgtgaggttcctcactttgcttctccaacagcctgtcgagcggtagctgcccatcagctatttgatgccagtggccatggtctaaatgaagcagatgctgatttcctagatgacctgctctccaggcacgtgatcagagccttggtgggtgagagagggagctcttctgggcttctttctccccagagggccctctgcctcttggagctcaccttggaacactgccgtcgcttttgctggagccgccaccatgacaaagccatcagcgcagtggagaaggctcacagttacctaaggaacaccaatctagcccctagccttcagctatgtcagctgggggttaagctgctgcaggtcggggaggaaggacctcaggcagtggccaagcttctgatcaaggcatcagctgtcctgagcaagagtatggaggcaccatcacccccacttcgggcattgtatgagagctgccagttcttcctttcaggcctggaacgaggcaccaagaggcgctatagacttgatgccattctgagcctctttgcttttcttggagggtactgctctcttctgcagcagctgcgggatgatggtgtgtatgggggctcctccaagcaacagcagtcttttcttcagatgtactttcagggacttcacctctacactgtggtggtttatgactttgcccaaggctgtcagatagttgatttggctgacctgacccaactagtggacagttgtaaatctaccgttgtctggatgctggaggccttagagggcctgtcgggccaagagctgacggaccacatggggatgaccgcttcttacaccagtaatttggcctacagcttctatagtcacaagctctatgccgaggcctgtgccatctctgagccgctctgtcagcacctgggtttggtgaagccaggcacttatcccgaggtgcctcctgagaagttgcacaggtgcttccggctacaagtagagagtttgaagaaactgggtaaacaggcccagggctgcaagatggtgattttgtggctggcagccctgcaaccctgtagccctgaacacatggctgagccagtcactttctgggttcgggtcaagatggatgcggccagggctggagacaaggagctacagctaaagactctgcgagacagcctcagtggctgggacccggagaccctggccctcctgctgagggaggagctgcaggcctacaaggcggtgcgggccgacactggacaggaacgcttcaacatcatctgtgacctcctggagctgagccccgaggagacaccagccggggcctgggcacgagccacccacctggtagaactggctcaggtgctctgctaccacgactttacgcagcagaccaactgctctgctctggatgctatccgggaagccctgcagcttctggactctgtgaggcctgaggcccaggccagagatcagcttctggacgataaagcacaggccttgctgtggctttacatctgtactctggaagccaaaatacaggaaggtatcgagcgggatcggagagcccaggcccctggtaacttggaggaatttgaagtcaatgacctgaactatgaagataaactccaggaagatcgtttcctatacagtaacattgccttcaacctggctgcagatgctgctcagtccaaatgcctggaccaagccctggccctgtggaaggagctgcttacaaaggggcaggccccagctgtacggtgtctccagcagacagcagcctcactgcagatcctagcagccctctaccagctggtggcaaagcccatgcaggctctggaggtcctcctgctgctacggattgtctctgagagactgaaggaccactcgaaggcagctggctcctcctgccacatcacccagctcctcctgaccctcggctgtcccagctatgcccagttacacctggaagaggcagcatcgagcctgaagcatctcgatcagactactgacacatacctgctcctttccctgacctgtgatctgcttcgaagtcaactctactggactcaccagaaggtgaccaagggtgtctctctgctgctgtctgtgcttcgggatcctgccctccagaagtcctccaaggcttggtacttgctgcgtgtccaggtcctgcagctggtggcagcttaccttagcctcccgtcaaacaacctctcacactccctgtgggagcagctctgtgcccaaggctggcagacacctgagatagctctcatagactcccataagctcctccgaagcatcatcctcctgctgatgggcagtgacattctctcaactcagaaagcagctgtggagacatcgtttttggactatggtgaaaatctggtacaaaaatggcaggttctttcagaggtgctgagctgctcagagaagctggtctgccacctgggccgcctgggtagtgtgagtgaagccaaggccttttgcttggaggccctaaaacttacaacaaagctgcagataccacgccagtgtgccctgttcctggtgctgaagggcgagctggagctggcccgcaatgacattgatctctgtcagtcggacctgcagcaggttctgttcttgcttgagtcttgcacaggtgaacttcagtgatgacagtgacttggaagaccctgtctcagctgaggcctggctggcagaggagcctaagagacggggcactgcttcccggggccgggggcgagcaaggaagggcctgagcctaatgacggatgccgtggttgccccaggtagtgcccctgggaaccctggcctgaatggcaggagccggagggccaagaaggtggcatcaagacattgtgaggagcggcgtccccagagggccagtgaccaggccaggcctggccctgagatcatgaggaccatccctgaggaagaactgactgacaactggagaaaaatgagctttgagatcctcaggggctctgacggggaagactcagcctcaggtgggaagactccagctccgggccctgaggcagcttctggagaatgggagctgctgaggctggattccagcaagaagaagctgcccagcccatgcccagacaaggagagtgacaaggaccttggtcctcggctccggctcccctcagcccccgtagccactggtctttctaccctggactccatctgtgactccctgagtgttgctttccggggcattagtcactgtcctcctagtgggctctatgcccacctctgccgcttcctggccttgtgtctgggccaccgggatccttatgccactgctttccttgtcaccgagtctgtctccatcacctgtcgccaccagctgctcacccacctccacagacagctcagcaaggcccagaagcaccgaggatcacttgaaatagcagaccagctgcaggggctgagccttcaggagatgcctggagatgtccccctggcccgcatccagcgcctcttttccttcagggctttggaatctggccacttcccccagcctgaaaaggagagtttccaggagcgcctggctctgatccccagtggggtgactgtgtgtgtgttggccctggccaccctccagcccggaaccgtgggcaacaccctcctgctgacccggctggaaaaggacagtcccccagtcagtgtgcagattcccactggccagaacaagcttcatctgcgttcagtcctgaatgagtttgatgccatccagaaggcacagaaagagaacagcagctgtactgacaagcgagaatggtggacagggcggctggcactggaccacaggatggaggttctcatcgcttccctagagaagtctgtgctgggctgctggaaggggctgctgctgccgtccagtgaggagcccggccctgcccaggaggcctcccgcctacaggagctgctacaggactgtggctggaaatatcctgaccgcactctgctgaaaatcatgctcagtggtgccggtgccctcacccctcaggacattcaggccctggcctacgggctgtgcccaacccagccagagcgagcccaggagctcctgaatgaggcagtaggacgtctacagggcctgacagtaccaagcaatagccaccttgtcttggtcctagacaaggacttgcagaagctgccgtgggaaagcatgcccagcctccaagcactgcctgtcacccggctgccctccttccgcttcctactcagctactccatcatcaaagagtatggggcctcgccagtgctgagtcaaggggtggatccacgaagtaccttctatgtcctgaaccctcacaataacctgtcaagcacagaggagcaatttcgagccaatttcagcagtgaagctggctggagaggagtggttggggaggtgccaagacctgaacaggtgcaggaagccctgacaaagcatgatttgtatatctatgcagggcatggggctggtgcccgcttccttgatgggcaggctgtcctgcggctgagctgtcgggcagtggccctgctgtttggctgtagcagtgcggccctggctgtgcatggaaacctggagggggctggcatcgtgctcaagtacatcatggctggttgccccttgtttctgggtaatctctgggatgtgactgaccgcgacattgaccgctacacggaagctctgctgcaaggctggcttggagcaggcccaggggccccccttctctactatgtaaaccaggcccgccaagctccccgactcaagtatcttattggggctgcacctatagcctatggcttgcctgtctctctgcggtaaccccatggagctgtcttattgatgctagaagcctcataactgttctacctccaaggttagatttaatccttaggataactcttttaaagtgattttccccagtgttttatatgaaacatttccttttgatttaacctcagtataataaagatacatcatttaaaccctgaaaaaaata

SEQ ID NO: 53233 - DNA, 354 bp, Homo sapiens
gtggggttcagggcgtagtgtctggggatgactggcgactggggaagacgtcaacaaagaagggcagagaaacctgagaagataggagagggtcctaggaatggctcagacatggaaaggggctgagattgttagagcttgggcctcttggtgagacaagcatcctaatcgccagtgtctcctcctcagtatggggcctcgccagtgctgagtcaaggggtggatccacgaagtaccttctatgtcctgaaccctcacaataacctgtcaagcacagaggagcaatttcgagccaatttcagcaggtcaggggcgcgaagacaagaagacgtgtggggaagggtagacaacata

SEQ ID NO: 53234 - DNA, 6679 bp, Homo sapiens
ggcggttaagtcctgtacctaggaaagagggcgagctctggggcgctctccggtgtcatgaggagcttcaaaagagtcaactttgggactctgctaagcagccagaaggaggctgaagagttgctgcccgacttgaaggtgggggtgctgcctggctcgggatacacctggctttccaaactgagctgttttgtgtttgccttttgaagagatggataagagttcctgtccaaccctccagctggttttcccagcagccgatctgatgctgagaggagacaagcttgtgatgccatcctgagggcttgcaaccagcagctgactgctaagctagcttgccctaggcatctggggagcctgctggagctggcagagctggcctgtgatggctacttagtgtctaccccacagcgtcctcccctctacctggaacgaattctctttgtcttactgcggaatgctgctgcacaaggaagcccagaggccacactccgccttgctcagcccctccatgcctgcttggtgcagtgctctcgcgaggctgctccccaggactatgaggccgtggctcggggcagcttttctctgctttggaagggggcagaagccctgttggaacggcgagctgcatttgcagctcggctgaaggccttgagcttcctagtactcttggaggatgaaagtaccccttgtgaggttcctcactttgcttctccaacagcctgtcgagcggtagctgcccatcagctatttgatgccagtggccatggtctaaatgaagcagatgctgatttcctagatgacctgctctccaggcacgtgatcagagccttggtgggtgagagagggagctcttctgggcttctttctccccagagggccctctgcctcttggagctcaccttggaacactgccgtcgcttttgctggagccgccaccatgacaaagccatcagcgcagtggagaaggctcacagttacctaaggaacaccaatctagcccctagccttcagctatgtcagctgggggttaagctgctgcaggtcggggaggaaggacctcaggcagtggccaagcttctgatcaaggcatcagctgtcctgagcaagagtatggaggcaccatcacccccacttcgggcattgtatgagagctgccagttcttcctttcaggcctggaacgaggcaccaagaggcgctatagacttgatgccattctgagcctctttgcttttcttggagggtactgctctcttctgcagcagctgcgggatgatggtgtgtatgggggctcctccaagcaacagcagtcttttcttcagatgtactttcagggacttcacctctacactgtggtggtttatgactttgcccaaggctgtcagatagttgatttggctgacctgacccaactagtggacagttgtaaatctaccgttgtctggatgctggaggccttagagggcctgtcgggccaagagctgacggaccacatggggatgaccgcttcttacaccagtaatttggcctacagcttctatagtcacaagctctatgccgaggcctgtgccatctctgagccgctctgtcagcacctgggtttggtgaagccaggcacttatcccgaggtgcctcctgagaagttgcacaggtgcttccggctacaagtagagagtttgaagaaactgggtaaacaggcccagggctgcaagatggtgattttgtggctggcagccctgcaaccctgtagccctgaacacatggctgagccagtcactttctgggttcgggtcaagatggatgcggccagggctggagacaaggagctacagctaaagactctgcgagacagcctcagtggctgggacccggagaccctggccctcctgctgagggaggagctgcaggcctacaaggcggtgcgggccgacactggacaggaacgcttcaacatcatctgtgacctcctggagctgagccccgaggagacaccagccggggcctgggcacgagccacccacctggtagaactggctcaggtgctctgctaccacgactttacgcagcagaccaactgctctgctctggatgctatccgggaagccctgcagcttctggactctgtgaggcctgaggcccaggccagagatcagcttctggacgataaagcacaggccttgctgtggctttacatctgtactctggaagccaaaatacaggaaggtatcgagcgggatcggagagcccaggcccctggtaacttggaggaatttgaagtcaatgacctgaactatgaagataaactccaggaagatcgtttcctatacagtaacattgccttcaacctggctgcagatgctgctcagtccaaatgcctggaccaagccctggccctgtggaaggagctgcttacaaaggggcaggccccagctgtacggtgtctccagcagacagcagcctcactgcagatcctagcagccctctaccagctggtggcaaagcccatgcaggctctggaggtcctcctgctgctacggattgtctctgagagactgaaggaccactcgaaggcagctggctcctcctgccacatcacccagctcctcctgaccctcggctgtcccagctatgcccagttacacctggaagaggcagcatcgagcctgaagcatctcgatcagactactgacacatacctgctcctttccctgacctgtgatctgcttcgaagtcaactctactggactcaccagaaggtgaccaagggtgtctctctgctgctgtctgtgcttcgggatcctgccctccagaagtcctccaaggcttggtacttgctgcgtgtccaggtcctgcagctggtggcagcttaccttagcctcccgtcaaacaacctctcacactccctgtgggagcagctctgtgcccaaggctggcagacacctgagatagctctcatagactcccataagctcctccgaagcatcatcctcctgctgatgggcagtgacattctctcaactcagaaagcagctgtggagacatcgtttttggactatggtgaaaatctggtacaaaaatggcaggttctttcagaggtgctgagctgctcagagaagctggtctgccacctgggccgcctgggtagtgtgagtgaagccaaggccttttgcttggaggccctaaaacttacaacaaagctgcagataccacgccagtgtgccctgttcctggtgctgaagggcgagctggagctggcccgcaatgacattgatctctgtcagtcggacctgcagcaggttctgttcttgcttgagtcttgcacagagtttggtggggtgactcagcacctggactctgtgaagaaggtccacctgcagaaggggaagcagcaggcccaggtcccctgtcctccacagctcccagaggaggagctcttcctaagaggccctgctctagagctggtggccactgtggccaaggagcctggccccatagcaccttctacaaactcctccccagtcttgaaaaccaagccccagcccatacccaacttcctgtcccattcacccacctgtgactgctcgctctgcgccagccctgtcctcacagcagtctgtctgcgctgggtattggtcacggcaggggtgaggctggccatgggccaccaagcccagggtctggatctgctgcaggtcgtgctgaagggctgtcctgaagccgctgagcgcctcacccaagctctccaagcttccctgaatcataaaacacccccctccttggttccaagcctcttggatgagatcttggctcaagcatacacactgttggcactggagggcctgaaccagccatcaaacgagagcctgcagaaggttctacagtcagggctgaagtttgtagcagcacggataccccacctagagccctggcgagccagcctgctcttgatttgggccctcacaaaactaggtggcctcagctgctgtactacccaactttttgcaagctcctggggctggcagccaccattaataaaaagtgtccctggctcagagccctctaagactcagggccaaaaacgttctggacgagggcgccaaaagttagcctctgctcccctgcgcctcaataatacctctcagaaaggtctggaaggtagaggactgccctgcacacctaaacccccagaccggatcaggcaagctggccctcatgtccccttcacggtgtttgaggaagtctgccctacagagagcaagcctgaagtaccccaggcccccagggtacaacagagagtccagacgcgcctcaaggtgaacttcagtgatgacagtgacttggaagaccctgtctcagctgaggcctggctggcagaggagcctaagagacggggcactgcttcccggggccgggggcgagcaaggaagggcctgagcctaatgacggatgccgtggttgccccaggtagtgcccctgggaaccctggcctgaatggcaggagccggagggccaagaaggtggcatcaagacattgtgaggagcggcgtccccagagggccagtgaccaggccaggcctggccctgagatcatgaggaccatccctgaggaagaactgactgacaactggagaaaaatgagctttgagatcctcaggggctctgacggggaagactcagcctcaggtgggaagactccagctccgggccctgaggcagcttctggagaatgggagctgctgaggctggattccagcaagaagaagctgcccagcccatgcccagacaaggagagtgacaaggaccttggtcctcggctccggctcccctcagcccccgtagccactggtctttctaccctggactccatctgtgactccctgagtgttgctttccggggcattagtcactgtcctcctagtgggctctatgcccacctctgccgcttcctggccttgtgtctgggccaccgggatccttatgccactgctttccttgtcaccgagtctgtctccatcacctgtcgccaccagctgctcacccacctccacagacagctcagcaaggcccagaagcaccgaggatcacttgaaatagcagaccagctgcaggggctgagccttcaggagatgcctggagatgtccccctggcccgcatccagcgcctcttttccttcagggctttggaatctggccacttcccccagcctgaaaaggagagtttccaggagcgcctggctctgatccccagtggggtgactgtgtgtgtgttggccctggccaccctccagcccggaaccgtgggcaacaccctcctgctgacccggctggaaaaggacagtcccccagtcagtgtgcagattcccactggccagaacaagcttcatctgcgttcagtcctgaatgagtttgatgccatccagaaggcacagaaagagaacagcagctgtactgacaagcgagaatggtggacagggcggctggcactggaccacaggatggaggttctcatcgcttccctagagaagtctgtgctgggctgctggaaggggctgctgctgccgtccagtgaggagcccggccctgcccaggaggcctcccgcctacaggagctgctacaggactgtggctggaaatatcctgaccgcactctgctgaaaatcatgctcagtggtgccggtgccctcacccctcaggacattcaggccctggcctacgggctgtgcccaacccagccagagcgagcccaggagctcctgaatgaggcagtaggacgtctacagggcctgacagtaccaagcaatagccaccttgtcttggtcctagacaaggacttgcagaagctgccgtgggaaagcatgcccagcctccaagcactgcctgtcacccggctgccctccttccgcttcctactcagctactccatcatcaaagagtatggggcctcgccagtgctgagtcaaggggtggatccacgaagtaccttctatgtcctgaaccctcacaataacctgtcaagcacagaggagcaatttcgagccaatttcagcagtgaagctggctggagaggagtggttggggaggtgccaagacctgaacaggtgcaggaagccctgacaaagcatgatttgtatatctatgcagggcatggggctggtgcccgcttccttgatgggcaggctgtcctgcggctgagctgtcgggcagtggccctgctgtttggctgtagcagtgcggccctggctgtgcatggaaacctggagggggctggcatcgtgctcaagtacatcatggctggttgccccttgtttctgggtaatctctgggatgtgactgaccgcgacattgaccgctacacggaagctctgctgcaaggctggcttggagcaggcccaggggccccccttctctactatgtaaaccaggcccgccaagctccccgactcaagtatcttattggggctgcacctatagcctatggcttgcctgtctctctgcggtaaccccatggagctgtcttattgatgctagaagcctcataactgttctacctccaaggttagatttaatccttaggataactcttttaaagtgattttccccagtgttttatatgaaacatttccttttgatttaacctcagtataataaagatacatcatttaaaccctgaaaaaaata

SEQ ID NO: 53235 - DNA, 4725 bp, Homo sapiens
ggcggttaagtcctgtacctaggaaagagggcgagctctggggcgctctccggtgtcatgaggagcttcaaaagagtcaactttgggactctgctaagcagccagaaggaggctgaagagttgctgcccgacttgaaggtgggggtgctgcctggctcgggatacacctggctttccaaactgagctgttttgtgtttgccttttgaagagatggataagagttcctgtccaaccctccagctggttttcccagcagccgatctgatgctgagaggagacaagcttgtgatgccatcctgagggcttgcaaccagcagctgactgctaagctagcttgccctaggcatctggggagcctgctggagctggcagagctggcctgtgatggctacttagtgtctaccccacagcgtcctcccctctacctggaacgaattctctttgtcttactgcggaatgctgctgcacaaggaagcccagaggccacactccgccttgctcagcccctccatgcctgcttggtgcagtgctctcgcgaggctgctccccaggactatgaggccgtggctcggggcagcttttctctgctttggaagggggcagaagccctgttggaacggcgagctgcatttgcagctcggctgaaggccttgagcttcctagtactcttggaggatgaaagtaccccttgtgaggttcctcactttgcttctccaacagcctgtcgagcggtagctgcccatcagctatttgatgccagtggccatggtctaaatgaagcagatgctgatttcctagatgacctgctctccaggcacgtgatcagagccttggtgggtgagagagggagctcttctgggcttctttctccccagagggccctctgcctcttggagctcaccttggaacactgccgtcgcttttgctggagccgccaccatgacaaagccatcagcgcagtggagaaggctcacagttacctaaggaacaccaatctagcccctagccttcagctatgtcagctgggggttaagctgctgcaggtcggggaggaaggacctcaggcagtggccaagcttctgatcaaggcatcagctgtcctgagcaagagtatggaggcaccatcacccccacttcgggcattgtatgagagctgccagttcttcctttcaggcctggaacgaggcaccaagaggcgctatagacttgatgccattctgagcctctttgcttttcttggagggtactgctctcttctgcagcagctgcgggatgatggtgtgtatgggggctcctccaagcaacagcagtcttttcttcagatgtactttcagggacttcacctctacactgtggtggtttatgactttgcccaaggctgtcagatagttgatttggctgacctgacccaactagtggacagttgtaaatctaccgttgtctggatgctggaggccttagagggcctgtcgggccaagagctgacggaccacatggggatgaccgcttcttacaccagtaatttggcctacagcttctatagtcacaagctctatgccgaggcctgtgccatctctgagccgctctgtcagcacctgggtttggtgaagccaggcacttatcccgaggtgcctcctgagaagttgcacaggtgcttccggctacaagtagagagtttgaagaaactgggtaaacaggcccagggctgcaagatggtgattttgtggctggcagccctgcaaccctgtagccctgaacacatggctgagccagtcactttctgggttcgggtcaagatggatgcggccagggctggagacaaggagctacagctaaagactctgcgagacagcctcagtggctgggacccggagaccctggccctcctgctgagggaggagctgcaggcctacaaggcggtgcgggccgacactggacaggaacgcttcaacatcatctgtgacctcctggagctgagccccgaggagacaccagccggggcctgggcacgagccacccacctggtagaactggctcaggtgctctgctaccacgactttacgcagcagaccaactgctctgctctggatgctatccgggaagccctgcagcttctggactctgtgaggcctgaggcccaggccagagatcagcttctggacgataaagcacaggccttgctgtggctttacatctgtactctggaagccaaaatacaggaaggtatcgagcgggatcggagagcccaggcccctggtaacttggaggaatttgaagtcaatgacctgaactatgaagataaactccaggaagatcgtttcctatacagtaacattgccttcaacctggctgcagatgctgctcagtccaaatgcctggaccaagccctggccctgtggaaggagctgcttacaaaggggcaggccccagctgtacggtgtctccagcagacagcagcctcactgcagatcctagcagccctctaccagctggtggcaaagcccatgcaggctctggaggtcctcctgctgctacggattgtctctgagagactgaaggaccactcgaaggcagctggctcctcctgccacatcacccagctcctcctgaccctcggctgtcccagctatgcccagttacacctggaagaggcagcatcgagcctgaagcatctcgatcagactactgacacatacctgctcctttccctgacctgtgatctgcttcgaagtcaactctactggactcaccagaaggtgaccaagggtgtctctctgctgctgtctgtgcttcgggatcctgccctccagaagtcctccaaggcttggtacttgctgcgtgtccaggtcctgcagctggtggcagcttaccttagcctcccgtcaaacaacctctcacactccctgtgggagcagctctgtgcccaaggctggcagacacctgagatagctctcatagactcccataagctcctccgaagcatcatcctcctgctgatgggcagtgacattctctcaactcagaaagcagctgtggagacatcgtttttggactatggtgaaaatctggtacaaaaatggcaggttctttcagaggtgctgagctgctcagagaagctggtctgccacctgggccgcctgggtagtgtgagtgaagccaaggccttttgcttggaggccctaaaacttacaacaaagctgcagataccacgccagtgtgccctgttcctggtgctgaagggcgagctggagctggcccgcaatgacattgatctctgtcagtcggacctgcagcaggttctgttcttgcttgagtcttgcacagagtttggtggggtgactcagcacctggactctgtgaagaaggtccacctgcagaaggggaagcagcaggcccaggtcccctgtcctccacagctcccagaggaggagctcttcctaagaggccctgctctagagctggtggccactgtggccaaggagcctggccccatagcaccttctacaaactcctccccagtcttgaaaaccaagccccagcccatacccaacttcctgtcccattcacccacctgtgactgctcgctctgcgccagccctgtcctcacagcagtctgtctgcgctgggtattggtcacggcaggggtgaggctggccatgggccaccaagcccagggtctggatctgctgcaggtcgtgctgaagggctgtcctgaagccgctgagcgcctcacccaagctctccaagcttccctgaatcataaaacacccccctccttggttccaagcctcttggatgagatcttggctcaagcatacacactgttggcactggagggcctgaaccagccatcaaacgagagcctgcagaaggttctacagtcagggctgaagtttgtagcagcacggataccccacctagagccctggcgagccagcctgctcttgatttgggccctcacaaaactaggtggcctcagctgctgtactacccaactttttgcaagctcctggggctggcagccaccattaataaaaagtgtccctggctcagagccctctaagactcagggccaaaaacgttctggacgagggcgccaaaagttagcctctgctcccctgcgcctcaataatacctctcagaaaggtctggaaggtagaggactgccctgcacacctaaacccccagaccggatcaggcaagctggccctcatgtccccttcacggtgtttgaggaagtctgccctacagagagcaagcctgaagtaccccaggcccccagggtacaacagagagtccagacgcgcctcaaggtgaacttcagtgatgacagtgacttggaagaccctgtctcagctgaggcctggctggcagaggagcctaagagacggggcactgcttcccggggccgggggcgagcaaggaagggcctgagcctaatgacggatgccgtggttgccccaggtagtgcccctgggaaccctggcctgaatggcaggagccggagggccaagaaggtggcatcaagacattgtgaggagcggcgtccccagagggccagtgaccaggccaggcctggccctgagatcatgaggaccatccctgaggaagaactgactgacaactggaggttgcaatgagctgagatcacaccattgcactccagcctcgatcaacagagtgagaattgtacaagatcaggaatcaaatggatctgatcctca

SEQ ID NO: 53236 - DNA, 456 bp, Homo sapiens
ctccaaactgtgaccatttgcacttagaactagaaacagattgacaatactcaaatatcacactccaggatgtctttgagtctcaggcttataataatggagacattgtcactcttgtaagcatctgaaaggagtgcttggtggagaaattactaagaatgttctcggaaatcttggggtctacttcctccaagaagtcagaaacaggatgcagtggactttcaatgagtcattaatttgacattcattggcccttttgttggcagaatttggggaaaaaaatgggtttattttcgtggcgccactaggactaattctagggatggcacaaaatgcgggacagctgcttaggagtgcggggcggcgtaatcctgcgccctctgtttaccagtgtgaaaggagaaggtggtgcgcaacggtgatgccaataggccctcgagggatttgaattgaccc

SEQ ID NO: 53237 - DNA, 282 bp, Homo sapiens
ctctactgcagttaacatttacctgccaggcactaggctaagtattagcagcaggttcaaagtgcataagatatagaccttgtcctcaagacttagtttattaggagagacatgaatgtaaacacatcatgaaaatccattataataactgcaataattgatatatcctgaagatgcagagattgtctagaggataaagttatatattctgtttggtaggggatgatgtggagttcaaatggatcagagaacacttcgctgattagaagtcagttgatccac

SEQ ID NO: 53238 - DNA, 789 bp, Homo sapiens
caaacttggatcagaagttttattccatgctctccaaatagtaattctttcccaatttcatctaaagaaaatgtttaagataaagacagaagaaaatatgtcagaattattcttaactttattatttatttatcgagatggggtctagctctgtcacccaggctggagtacagtggcacgattacagctcactgcagcgtcgaactcctgggctcaagcattcctcttgcctcagcctcttgagtagctaggagtataggtatatgccaccatgcccagctaattaaatttttttgttgttgttgttgttgaggggtcgtcttgctgtgttgcctaggctggtctcaaatttctgacctcaagtgatcctcccacttctgcctctgaaagtactgggattgcaggcatgagccactgtgcccagccttaacttttaaaaatggagaagatacagtacagcctttatggacatgctctggttacttaaaaaaaaaaaaaaaaaaaaagagacagtgtctcactatgttgtccagactggtgtcaaactcctgggatcaagcaatccttggcctcctgagtagccggaactacaggcatgtgtcaccacacctggccctggtactttctgagttcatataataacaaaataggctgggcatgatggctcatgcctattatctcagaactttgggaggttgaggtgggaggatctcttgagcccagaaggtccaggccacagtgagccctgacagcgcttcaacctgggcaacagagtgagaccctgtctca

SEQ ID NO: 53239 - DNA, 450 bp, Homo sapiens
ggggcacagaagagctgggagcaggtcagcagttgaagagtggctccgggaggggccgcagaggcccagggcctgctctcaggggtcgctggggacaggagaggctccgacaggggccgcccagtgtgctcttctctcatgtgctggggcctctctcttcattccctgctggaaacatccatgctgtgcttggcggggctgcgtttccccgtggcacagagctcccaggaagggctctcctgccctctcgtggcggcctcggggcagtggcctgtgggggccgccagcccctccttcgctgtgtgagccgctggtcacagaagactgcggtgcagggaaaggggccacttcctgatactcagggacagattttcttctcttgaggaaagcctcataagacctcttccgggtcattcctgattaggactttaatccaggggtcaacaaaag

SEQ ID NO: 53240 - DNA, 444 bp, Homo sapiens
ggacagatgaaagactgtctgggcggtgtaagcctgcatgtatttccctggaggcagtcttccagtcactgggtgttaggcatgcgtgggtgcacatgtgagtgtggcatgaagagccctttctcacacctggaagggctgaagggctggctacggagggcccctctgcacctcacatgctggcaatgctccaacagggctacttcgcttgatacaaggctagattattgagaggtgctgtgaatcccaaggcctcatgaatttttgaagttgtcacacgttagtggtgttgggataggctatctcaacaactgactataattctggacaggaaagcaagaatcaaaagcttcaagggcaatctctagctataccttactaacctcactccctggctgacatgcccagaaaatatagacagacagcaaataaggcaaagctatc

SEQ ID NO: 53241 - DNA, 1083 bp, Homo sapiens
ctttggttggacatgcatgcttcctgaccctccgatgtgagaatgtggggtgtggagacaagagtgactccatcttggatgctgatatagtttggctctgtgtccccatccaaatctcacctttaattgtaatccctataatccccacgtgttaagggcaggaccaggtggaggtaattgaatcttgggggcagtttctcccatgctgttctcgtgataatgagtgagtctcatgagatctgatggttttgtaagtgtctggcatttcccctgcttgtactcattctctctcctactgccccgtgaagaggtgccttccgccatgattgtctgtttcttgaggcctctccagccatctggaaccgtgagtcaattaaacctcttttctttttaaattatccggcctcaggtatttcttcatagcaatgtgagaatgaactaatacagatgctaatctgccctgttgacttctgattagccctggtcctgtgaaaacctcctgattctcactttatttactgtctttagcgtaagaacatgtcagccttgatgttattgcacaaattataggttatgatgcatgtagcattcttgcctgttctggagggctgcctttaattgtcttgcatagagcatgtataccctttccctgtgatatataagccctgggtctggggagcaacagtgtggagatctacctgttttgctgctctccaagactacacttccatccttaagttccccaaataaatcactctgtactgacaaattggatttgtctgcctcactttggtgataagttaaaatgacatcacactaaaacttgtgagatgcaggctgggcgcagtggctcatgcctgtaatgccagcactttgggagggtgaggtgggtggatcacttgaggtcaggaggttgagacccgcctgaccaagatggtgaaattccgtctctactaaaaatacaaaaaaatttacccgggcgtggtggtgggtgcttgtaatcccagctacttgggagcctgaggcaggagaatcacttgaacctgggaggcggaggttgcagtgagcaaagatcgtgccact

SEQ ID NO: 53242 - DNA, 482 bp, Homo sapiens
gaaataagtgagcacgggatcagtcataaggtagcaaagaaaagaaatggaacctgggtggcagagcacaaatgaattggactctatcttacccaaaggctgtgattcaaccctgggtggcagaggtggttttggttctctgtgggaccctagataggctgtgtatcttgattctcttccatgtttttaagagtagtgtaatggggctgggcatggtggctcacgtctgtaatcccaacactttgggaagccgaggcaggtagattgcttgagcccaggagtttgagaccagcctgggcaacatggcaaaaccctgtctttacttaaaatacaaacaaatgggcatggtggcacgtggctgtagtctcagctactcgggaggctgagtttgggggaatcacctgaacttgggacgttgaggctgcagtaagccgagatggtgccatggcataatagcctgggggagaacgctgtctcaaaaa

SEQ ID NO: 53243 - DNA, 595 bp, Homo sapiens
ctctagggcctggcatttaatagattctcaataaatatgtgttggttgtatgaccaacattttggtgagtttacatttttttcctccaggaacttgagagacaccacctatgattgagtgtgtctgtgagatccttagaggccttgcatcagaaggtcatcttgacagttctgtgagaggacaggggaattggactctatcttacccaaaggctgtgattcaaccctgggtggcagaggtggttttggttctctgtgggaccctagataggctgtgtatcttgattctcttccatgtttttaagagtagtgtaatggggctgggcatggtggctcacgtctgtaatcccaacactttgggaagccgaggcaggtagattgcttgagcccaggagtttgagaccagcctgggcaacatggcaaaaccctgtctttacttaaaatacaaacaaatgggcatggtggcacgtggctgtagtctcagctactcgggaggctgagtttgggggaatcacctgaacttgggacgttgaggctgcagtaagccgagatggtgccatggcataatagcctgggggagaacgctgtctcaaaaa

SEQ ID NO: 53244 - DNA, 328 bp, Homo sapiens
ttgtgtgcaaatgacatgccagttaaaatgaaaacgatctcacatgtagaaaaagaaagtctggattttaaaaaagaagaactcataaaacccttactaaatgacaccatctgattcaagtaaaaaatgacttaaacactagtaataaaaaaagacaaaacacatttcatgaagaatacaaaggtaaatgtctgctgagtgttttagtttagatgtttcagatgctgctgtatgtttgatgaggaatttgaggagaagatttcatcgcagaaggtgttaatgtggcctgtattgacttaagtggtgacccaactggactgtgaaactg

SEQ ID NO: 53245 - DNA, 329 bp, Homo sapiens
tttataatactcggaaaatacaaccataaacatagtaaatacaatttttaaatgtgttttaaagaccaaattttgccatttaaaaaagctcataatttcaaagaaatactgcctgattatttttaattcaatttcttccatttgtagtactgtaaacactttatatacctacaattgttagtgctattaatgttgctttgccaattatcttgatgtaaaattaacagataaaatccttaatgtcataaagcacttgaaccacatctgactgtgtcatataaacttagatctcaaagactgccagttatgaaaatacttttattagtcac

SEQ ID NO: 53246 - DNA, 413 bp, Homo sapiens
ccagcttgggagacagcaagaccccatctctctcttttttgagatgtagtttcactcttgttgcccaggctggagttgcggtgagccgagattgtgccattgcactgcagcctgggcaacaagatcaaaactccatctcaagaaaaaaaaaaaaaaaaaaatatatatatatatatatacacacacatatatgtatgtatgtatatatgaatatgttcttgtaaaatatttgcataatacacaagcatgcagaggaaaatgtaacagtctccctgctgcatccccaccactgaagtacccccttcccccagttggtgacttggcatcttttaggtcccttctttatgtaacggtaacttcatacatctagatgtacatatacatgcataagtttaaagcatttttaaaaatca

SEQ ID NO: 53247 - DNA, 410 bp, Homo sapiens
aaaatgcctaatccagatatttcagtgtgtagaaatttcctagaattgagttgccggacatcagaatgtgattatatttaggagtttttaggtgaagtaaatcttgtgcttgttattctttccagagtggggagtgttaaagcgaacagacgctttcttgactactgctagtgtggtccatcacctttgttttaaaaaaggtcttaagggtatttcctaatatttaaaaatgttgatggtattttagggtttgtttggctttaatttacgtctacgtttttttttccactgtcaagtagctattgttcatagagcataacatgagtggtaaaatagcctttaatgatgcagcaaggatggggtagatgaattgggctatagaaatataccaatacatggagattatttcc

SEQ ID NO: 53248 - DNA, 210 bp, Homo sapiens
aaatagttccaactttggccataggagctctttccattggattgcatgtccttttgccatgactctgaggtaggagactggactcagttccagaggcagggcttggacactgaaccaaattgaggactagctaaaacagagatggggcagaagcacctttctataagacacacccaccagtgtgccatggcaacatatggaagttaccac

SEQ ID NO: 53249 - DNA, 554 bp, Homo sapiens
caggaatatgatatgagaacatagcctttgaatttctctctcaagtttgacttgaaaaatcagcctcagaaacatctttatcttaagatagatttccgttgctctcagaacgtctctcccctgaccttctgttattaagttcatggacatacagcattttagaattaggtgggggctccgaagtctgcgagtgcagctgtgcacaggtaagtcacttcacccgcctggtgctgaatttcctttgggtcttgaagcagggccgcgttgaaacctgggtttctggacgttgtagctaccacgcagcctgtttctggaagcttggtgttaaactccctctcctggcaggttaaattcattgcaaattcttcaactctcctttgcctcccaacagaatttttagatttagtaaataaagtggcattttcattttgtggatggggcaaaatggactggaaagagtctgatgtgtagagatgtgattttcttggggcaacgtgatgccgctctatgtgtgccaggaggtgctgagcctgtttgaagctcttatcagatct

SEQ ID NO: 53250 - DNA, 578 bp, Homo sapiens
gtcagaaagaaagagaaaaaaaaaaaaacacaaaaatagccattaggaaatcatatcatagaactgattgtttgaaaagtcattgacttcttagaattaaaaaccaacaccaaatttgtattcctttcagttttgttttatgtttctcataagttttttacatttgtttatttttttcttctcattctcttttgttttccttttgttcatttgcttctataccatgtaacactgtgtgttaggctagtagcattaccagagagctccaggggagagagctaaagcttactaaccttcaggaaaatttgagtgaagtcagtcaagtgaaagagactttggaaaaagaacttcagattttggtaagtacctgttgggaatctgaatctcagggtttctggccatttcctgttttaaaaaatcctccagtaagaaatattgtagctgtttcctttctctttctaagtgttgattcaacttgagtgtattagttattggctgataaatattgtcctttgaggggaatcggatcaaacccaaacaacaaaggtaggtatactttttttttctaaaacgtggga

SEQ ID NO: 53251 - DNA, 121 bp, Homo sapiens
  misc_feature (106)..(106): n is a, c, g, or t
tgccaaagttaggtgcctgtttgatttcctttccctttgtttggcacggttttattaaatgggcttgttctattgctaaactcctctgctggaaatgctgacgggnaccgagctcgaattc

SEQ ID NO: 53252 - DNA, 5830 bp, Homo sapiens
gaggcggcggccgcggcggctgctgctgctgcagtgggacaggtggcggcgaccggcggcgtccgaggagatttaatccagagactgacttcactatagaacccacagttgtatcaatggttggggaaagatagtggcaacaggcaaaggagaaacagctctgacatacaaagaaaatgagtatgctaaagccaagtgggcttaaggcccccaccaagatcctgaagcctggaagcacagctctgaagacacctacggctgttgtagctccagtagaaaaaaccatatccagtgaaaaagcatcaagcactccatcatctgagactcaggaggaatttgtggatgactttcgagttggggagcgagtttgggtgaatggaaataagcctggatttatccagtttcttggagaaacccagtttgcaccaggccagtgggctggaattgttttagatgaacccataggcaagaacgatggttcggtggcaggagttcggtatttccagtgtgaacctttaaagggcatatttacccgaccttcaaagttaacaaggaaggtgcaagcagaagatgaagctaatggcctgcagacaacgcccgcctcccgagctacttcaccgctgtgcacttctacggccagcatggtgtcttcctccccctccaccccttcaaacatccctcagaaaccatcacagccagcagcaaaggaaccttcagctacgcctccgatcagcaaccttacaaaaactgccagtgaatctatctccaacctttcagaggctggctcaatcaagaaaggagaaagagagctcaaaatcggagacagagtattggttggtggcactaaggctggtgtagtccggtttcttggggagaccgactttgccaagggggagtggtgtggcgtggagttagatgagccacttgggaagaatgatggcgctgttgctggaacaaggtattttcagtgtcaacccaaatatggcttgttcgctcctgtccacaaagttaccaagattggcttcccttccactacaccagccaaagccaaggccaacgcagtgaggcgagtgatggcgaccacgtccgccagcctgaagcgcagcccttctgcctcttccctcagctccatgagctcagtggcctcctctgtgagcagcaggcccagtcggacaggactattgactgaaacctcctcccgttacgccaggaagatctccggtaccactgccctccaggaggccctgaaggagaagcagcagcacattgagcagctgctggcggaacgggatctggagagggcggaggtggccaaggccacgagccacgtgggggagatagagcaggagctagctctggcccgggacggacatgaccagcatgtcctggaattggaagccaaaatggaccagctgcgaacaatggtggaagctgctgacagggagaaggtggagcttctcaaccagcttgaagaggagaaaaggaaggttgaggaccttcagttccgggttgaagaagaatcaattaccaaaggtgatcttgaggtggctacagtttcagaaaagtcacgtataatggaactggagaaagacctagcattgagagtacaggaagtagctgagctccgaagaaggctagagtccaataagcctgctggggatgtggacatgtcactttcccttttgcaagagataagctctttgcaagaaaagttagaagtcacccgtactgaccaccagagagaaataacttctctgaaggagcattttggagcccgggaagaaactcatcagaaggagataaaggctctgtataccgccacggaaaagctttccaaagagaacgagtcattgaaaagcaagctggagcatgccaacaaagagaactcagatgtgatagctctatggaagtccaaactggagactgccatcgcatcccaccagcaggcgatggaagaactgaaggtatctttcagcaaagggcttggaacagagacggcagaatttgctgaactaaaaacacaaatagagaaaatgagactagattaccaacacgaaatagaaaatttgcagaatcaacaagactctgaacgggctgcccatgctaaagagatggaagccttgagggctaaactgatgaaagttattaaagaaaaggaaaacagtctggaagccatcaggtcgaaactggacaaagcagaagaccagcatctcgtagaaatggaagacacgttaaacaaattacaggaagctgaaataaaggtaaaggagctagaggtactgcaagccaaatgcaatgaacaaaccaaggttattgataattttacatcacagctcaaggctactgaagaaaagctcttggatcttgatgcacttcggaaagccagttccgaaggtaaatcggaaatgaagaaacttagacagcagcttgaggcagctgagaaacagattaaacatttagagattgaaaagaatgctgaaagtagcaaggctagtagcattaccagagagctccaggggagagagctaaagcttactaaccttcaggaaaatttgagtgaagtcagtcaagtgaaagagactttggaaaaagaacttcagattttgaaagaaaagtttgctgaagcttcagaggaggcagtctctgttcagagaagtatgcaagaaactgtaaataagttacaccaaaaggaggaacagtttaacatgctgtcttctgacttggagaagctgagagaaaacttagcagatatggaggcaaaatttagagagaaagatgagagagaagagcagctgataaaggcaaaggaaaaactggaaaatgacattgcagaaataatgaagatgtcaggagataactcttctcagctgacaaaaatgaacgatgaattacgtctgaaagaaagagatgtagaagaattacagctaaaacttacaaaggctaatgaaaatgcaagttttctgcaaaaaagtattgaggacatgactgtcaaagctgaacagagccagcaagaagcagctaaaaagcatgaggaagaaaagaaagaattggagaggaaattgtcggacctggaaaagaaaatggaaacaagccacaaccagtgtcaggagctgaaagccaggtatgagagagccacttctgagacaaaaaccaagcatgaagaaatcctacagaacctccagaagacgctgctggacacagaggacaagctgaagggcgcacgggaggagaacagtggcttgctgcaggagctggaggagctgagaaagcaagccgacaaagccaaagctgctcaaacagcggaagatgccatgcagataatggaacagatgaccaaagagaagactgagactctggcctccttggaggacaccaagcaaacaaatgcaaaactacagaatgaattggacacacttaaagaaaacaacttgaaaaatgtggaagagctgaacaaatcaaaagaactcctgactgtagagaatcaaaaaatggaagaatttaggaaagaaatagaaaccctaaagcaggcagcagctcagaagtcccagcagctttcagcgttgcaagaagagaacgttaaacttgctgaggagctggggagaagcagggacgaagtcacaagtcatcaaaagctggaagaagaaagatctgtgctcaataatcagttgttagaaatgaaaaaaagagaatccaagttcataaaagacgcagatgaagagaaagcttccttgcagaaatccatcagtataactagtgccttactcacagaaaaggatgccgagctggagaaactgagaaatgaggtcacagtgctcaggggagaaaacgcctctgccaagtccttgcattcagttgttcagactctagagtctgataaggtgaagctcgagctcaaggtaaagaacttggagcttcaactcaaagaaaacaagaggcagctcagcagctcctcaggtaatacagacactcaggcagacgaggatgaaagagcccaggagagtcagattgatttcctaaattcagtaatagtggaccttcaaaggaagaatcaagacctcaagatgaaggtggagatgatgtcagaagcagccctgaatgggaacggggatgacctaaacaattatgacagtgatgatcaggagaaacagtccaagaagaaacctcgcctcttctgtgacatttgtgactgctttgatctccacgacacagaggattgtcctacccaggcacagatgtcagaggaccctccccattccacacaccatggcagtcggggtgaggaacgcccatactgtgaaatctgtgagatgtttggacactgggccaccaactgcaatgacgacgaaaccttctgatgaagcctccagtggagaactgggcttgctcagacgcactcgcattgacacaacgtaacaccagcattgtgtgtgcagacttcaggagaactcatgttattttttaaccccgtcaacaaatctaggaaaatattttgatcttcaacaaattgccctttagtctccccgtatgagttagaataataaatatttagtaggtgagttttcacctcgaattttgttttcttgatttttacgtttgaagacattgcaccagatgccattacatttattggccccccgaccttgtagaaaaacccctaccctcacaataccttatttaagtaactttaaattatgccgttacttttcatatttgcactaagatatttccaggctgcatttgtatatttagattttttggttaagctttgacactggaatgagttgaaaaaatgtgccattttgcattttcatctactcatttaaagtattttattcttattcaaagaaatatctgagctctttgcactacctgttatcagtagtgcctttacttcaggcttgataatacttaggtgtgattataaaatcatgaagcaggtaaagggaggggcaagcccccaaactgctgtggggacattttataatctatatgctgcacccacttaatctactgtggtgttttgtttattagttttgcataatttcagcttctatatattgtatgtatatattttttaaaaatctatattttgggaaaaaaacatacacaatgtgtctttctttttggacatttacctttttgaaaaagaaaacacttaaaatgatcattaggacataacagactaggccagacatagcatcttgtggctttgcaaccattttcatttgtttgttttccttttatttcttcaccagatttaaataactggaggaattttctccaatttttttttccttctctggcaggtatccccagcagtcaattaacaataagccagtataaaacacctaaataaccaatctacaatctcccttcacaagtttttttactgtttttagatgaatgtacgatgagaaattcaacgttaataattttggattttcttatcacaaaaaagaaaatgaaggacctcaaagcacctgaacagtttatcgaccagtttgaatctatttatcttcatttgaatgtcttctagaatatgtaaaaagtcataaaatgtatcttccatgctacatgtacaataagaacttctataattgtatatatgcctttgatgtattttcccctcaagattatcaactgtgtgttcgacagtgaatattcaatctggtaccagttgaaatttttggttataaatgtaatacgaattgtttcacaaacagaaaacatgtaaagcagtattaaaatttggccaaacaagtgttctgtatctactttaataaatggttattctttttagaaacaaaaacacagacaacacaacaacaac

SEQ ID NO: 53253 - DNA, 5890 bp, Homo sapiens
gccccgattctacagacaccatgagatttaatccagagactgacttcactatagaacccacagttgtatcaatggttggggaaagatagtggcaacaggcaaaggagaaacagctctgacatacaaagaaaatgagtatgctaaagccaagtgggcttaaggcccccaccaagatcctgaagcctggaagcacagctctgaagacacctacggctgttgtagctccagtagaaaaaaccatatccagtgaaaaagcatcaagcactccatcatctgagactcaggaggaatttgtggatgactttcgagttggggagcgagtttgggtgaatggaaataagcctggatttatccagtttcttggagaaacccagtttgcaccaggccagtgggctggaattgttttagatgaacccataggcaagaacgatggttcggtggcaggagttcggtatttccagtgtgaacctttaaagggcatatttacccgaccttcaaagttaacaaggaaggtgcaagcagaagatgaagctaatggcctgcagacaacgcccgcctcccgagctacttcaccgctgtgcacttctacggccagcatggtgtcttcctccccctccaccccttcaaacatccctcagaaaccatcacagccagcagcaaaggaaccttcagctacgcctccgatcagcaaccttacaaaaactgccagtgaatctatctccaacctttcagaggctggctcaatcaagaaaggagaaagagagctcaaaatcggagacagagtattggttggtggcactaaggctggtgtagtccggtttcttggggagaccgactttgccaagggggagtggtgtggcgtggagttagatgagccacttgggaagaatgatggcgctgttgctggaacaaggtattttcagtgtcaacccaaatatggcttgttcgctcctgtccacaaagttaccaagattggcttcccttccactacaccagccaaagccaaggccaacgcagtgaggcgagtgatggcgaccacgtccgccagcctgaagcgcagcccttctgcctcttccctcagctccatgagctcagtggcctcctctgtgagcagcaggcccagtcggacaggactattgactgaaacctcctcccgttacgccaggaagatctccggtaccactgccctccaggaggccctgaaggagaagcagcagcacattgagcagctgctggcggaacgggatctggagagggcggaggtggccaaggccacgagccacgtgggggagatagagcaggagctagctctggcccgggacggacatgaccagcatgtcctggaattggaagccaaaatggaccagctgcgaacaatggtggaagctgctgacagggagaaggtggagcttctcaaccagcttgaagaggagaaaaggaaggttgaggaccttcagttccgggttgaagaagaatcaattaccaaaggtgatcttgagacgcagaccaaactggagcatgcccgcattaaggagcttgaacagagcctgctctttgaaaagaccaaagctgacaaactccagagggagttagaagacactagggtggctacagtttcagaaaagtcacgtataatggaactggagaaagacctagcattgagagtacaggaagtagctgagctccgaagaaggctagagtccaataagcctgctggggatgtggacatgtcactttcccttttgcaagagataagctctttgcaagaaaagttagaagtcacccgtactgaccaccagagagaaataacttctctgaaggagcattttggagcccgggaagaaactcatcagaaggagataaaggctctgtataccgccacggaaaagctttccaaagagaacgagtcattgaaaagcaagctggagcatgccaacaaagagaactcagatgtgatagctctatggaagtccaaactggagactgccatcgcatcccaccagcaggcgatggaagaactgaaggtatctttcagcaaagggcttggaacagagacggcagaatttgctgaactaaaaacacaaatagagaaaatgagactagattaccaacacgaaatagaaaatttgcagaatcaacaagactctgaacgggctgcccatgctaaagagatggaagccttgagggctaaactgatgaaagttattaaagaaaaggaaaacagtctggaagccatcaggtcgaaactggacaaagcagaagaccagcatctcgtagaaatggaagacacgttaaacaaattacaggaagctgaaataaaggtaaaggagctagaggtactgcaagccaaatgcaatgaacaaaccaaggttattgataattttacatcacagctcaaggctactgaagaaaagctcttggatcttgatgcacttcggaaagccagttccgaaggtaaatcggaaatgaagaaacttagacagcagcttgaggcagctgagaaacagattaaacatttagagattgaaaagaatgctgaaagtagcaaggctagtagcattaccagagagctccaggggagagagctaaagcttactaaccttcaggaaaatttgagtgaagtcagtcaagtgaaagagactttggaaaaagaacttcagattttgaaagaaaagtttgctgaagcttcagaggaggcagtctctgttcagagaagtatgcaagaaactgtaaataagttacaccaaaaggaggaacagtttaacatgctgtcttctgacttggagaagctgagagaaaacttagcagatatggaggcaaaatttagagagaaagatgagagagaagagcagctgataaaggcaaaggaaaaactggaaaatgacattgcagaaataatgaagatgtcaggagataactcttctcagctgacaaaaatgaacgatgaattacgtctgaaagaaagagatgtagaagaattacagctaaaacttacaaaggctaatgaaaatgcaagttttctgcaaaaaagtattgaggacatgactgtcaaagctgaacagagccagcaagaagcagctaaaaagcatgaggaagaaaagaaagaattggagaggaaattgtcggacctggaaaagaaaatggaaacaagccacaaccagtgtcaggagctgaaagccaggtatgagagagccacttctgagacaaaaaccaagcatgaagaaatcctacagaacctccagaagacgctgctggacacagaggacaagctgaagggcgcacgggaggagaacagtggcttgctgcaggagctggaggagctgagaaagcaagccgacaaagccaaagctgctcaaacagcggaagatgccatgcagataatggaacagatgaccaaagagaagactgagactctggcctccttggaggacaccaagcaaacaaatgcaaaactacagaatgaattggacacacttaaagaaaacaacttgaaaaatgtggaagagctgaacaaatcaaaagaactcctgactgtagagaatcaaaaaatggaagaatttaggaaagaaatagaaaccctaaagcaggcagcagctcagaagtcccagcagctttcagcgttgcaagaagagaacgttaaacttgctgaggagctggggagaagcagggacgaagtcacaagtcatcaaaagctggaagaagaaagatctgtgctcaataatcagttgttagaaatgaaaaaaagagaatccaagttcataaaagacgcagatgaagagaaagcttccttgcagaaatccatcagtataactagtgccttactcacagaaaaggatgccgagctggagaaactgagaaatgaggtcacagtgctcaggggagaaaacgcctctgccaagtccttgcattcagttgttcagactctagagtctgataaggtgaagctcgagctcaaggtaaagaacttggagcttcaactcaaagaaaacaagaggcagctcagcagctcctcaggtaatacagacactcaggcagacgaggatgaaagagcccaggagagtcagattgatttcctaaattcagtaatagtggaccttcaaaggaagaatcaagacctcaagatgaaggtggagatgatgtcagaagcagccctgaatgggaacggggatgacctaaacaattatgacagtgatgatcaggagaaacagtccaagaagaaacctcgcctcttctgtgacatttgtgactgctttgatctccacgacacagaggattgtcctacccaggcacagatgtcagaggaccctccccattccacacaccatggcagtcggggtgaggaacgcccatactgtgaaatctgtgagatgtttggacactgggccaccaactgcaatgacgacgaaaccttctgatgaagcctccagtggagaactgggcttgctcagacgcactcgcattgacacaacgtaacaccagcattgtgtgtgcagacttcaggagaactcatgttattttttaaccccgtcaacaaatctaggaaaatattttgatcttcaacaaattgccctttagtctccccgtatgagttagaataataaatatttagtaggtgagttttcacctcgaattttgttttcttgatttttacgtttgaagacattgcaccagatgccattacatttattggccccccgaccttgtagaaaaacccctaccctcacaataccttatttaagtaactttaaattatgccgttacttttcatatttgcactaagatatttccaggctgcatttgtatatttagattttttggttaagctttgacactggaatgagttgaaaaaatgtgccattttgcattttcatctactcatttaaagtattttattcttattcaaagaaatatctgagctctttgcactacctgttatcagtagtgcctttacttcaggcttgataatacttaggtgtgattataaaatcatgaagcaggtaaagggaggggcaagcccccaaactgctgtggggacattttataatctatatgctgcacccacttaatctactgtggtgttttgtttattagttttgcataatttcagcttctatatattgtatgtatatattttttaaaaatctatattttgggaaaaaaacatacacaatgtgtctttctttttggacatttacctttttgaaaaagaaaacacttaaaatgatcattaggacataacagactaggccagacatagcatcttgtggctttgcaaccattttcatttgtttgttttccttttatttcttcaccagatttaaataactggaggaattttctccaatttttttttccttctctggcaggtatccccagcagtcaattaacaataagccagtataaaacacctaaataaccaatctacaatctcccttcacaagtttttttactgtttttagatgaatgtacgatgagaaattcaacgttaataattttggattttcttatcacaaaaaagaaaatgaaggacctcaaagcacctgaacagtttatcgaccagtttgaatctatttatcttcatttgaatgtcttctagaatatgtaaaaagtcataaaatgtatcttccatgctacatgtacaataagaacttctataattgtatatatgcctttgatgtattttcccctcaagattatcaactgtgtgttcgacagtgaatattcaatctggtaccagttgaaatttttggttataaatgtaatacgaattgtttcacaaacagaaaacatgtaaagcagtattaaaatttggccaaacaagtgttctgtatctactttaataaatggttattctttttagaaacaaaaacacagacaacacaacaacaac

SEQ ID NO: 53254 - DNA, 6261 bp, Homo sapiens
ggggacaggtggcggcgaccggcggcgtccgaggagagacagagtctcactcggtcaccaggctggagtgcagtggcacaattataactcactatagccttggactcctggactcaagccgtcctcctgcctcagcctcccaagtagctaggaggtgtgtaccaccacacacatttacattagggtcaggagcctggagattggggttttagtcctagactgttaaatggaggaacattgggaggctctttattttctgcgtgctaagtagtaggaatataaatctgcactcagactgagctgtgcaaaggcattcataattgcaggcagttgcatcagagctcagagttccatctctaaaaaaaacattgtcttatgccccaaccttctccctggatttaatccagagactgacttcactatagaacccacagttgtatcaatggttggggaaagatagtggcaacaggcaaaggagaaacagctctgacatacaaagaaaatgagtatgctaaagccaagtgggcttaaggcccccaccaagatcctgaagcctggaagcacagctctgaagacacctacggctgttgtagctccagtagaaaaaaccatatccagtgaaaaagcatcaagcactccatcatctgagactcaggaggaatttgtggatgactttcgagttggggagcgagtttgggtgaatggaaataagcctggatttatccagtttcttggagaaacccagtttgcaccaggccagtgggctggaattgttttagatgaacccataggcaagaacgatggttcggtggcaggagttcggtatttccagtgtgaacctttaaagggcatatttacccgaccttcaaagttaacaaggaaggtgcaagcagaagatgaagctaatggcctgcagacaacgcccgcctcccgagctacttcaccgctgtgcacttctacggccagcatggtgtcttcctccccctccaccccttcaaacatccctcagaaaccatcacagccagcagcaaaggaaccttcagctacgcctccgatcagcaaccttacaaaaactgccagtgaatctatctccaacctttcagaggctggctcaatcaagaaaggagaaagagagctcaaaatcggagacagagtattggttggtggcactaaggctggtgtagtccggtttcttggggagaccgactttgccaagggggagtggtgtggcgtggagttagatgagccacttgggaagaatgatggcgctgttgctggaacaaggtattttcagtgtcaacccaaatatggcttgttcgctcctgtccacaaagttaccaagattggcttcccttccactacaccagccaaagccaaggccaacgcagtgaggcgagtgatggcgaccacgtccgccagcctgaagcgcagcccttctgcctcttccctcagctccatgagctcagtggcctcctctgtgagcagcaggcccagtcggacaggactattgactgaaacctcctcccgttacgccaggaagatctccggtaccactgccctccaggaggccctgaaggagaagcagcagcacattgagcagctgctggcggaacgggatctggagagggcggaggtggccaaggccacgagccacgtgggggagatagagcaggagctagctctggcccgggacggacatgaccagcatgtcctggaattggaagccaaaatggaccagctgcgaacaatggtggaagctgctgacagggagaaggtggagcttctcaaccagcttgaagaggagaaaaggaaggttgaggaccttcagttccgggttgaagaagaatcaattaccaaaggtgatcttgagacgcagaccaaactggagcatgcccgcattaaggagcttgaacagagcctgctctttgaaaagaccaaagctgacaaactccagagggagttagaagacactagggtggctacagtttcagaaaagtcacgtataatggaactggagaaagacctagcattgagagtacaggaagtagctgagctccgaagaaggctagagtccaataagcctgctggggatgtggacatgtcactttcccttttgcaagagataagctctttgcaagaaaagttagaagtcacccgtactgaccaccagagagaaataacttctctgaaggagcattttggagcccgggaagaaactcatcagaaggagataaaggctctgtataccgccacggaaaagctttccaaagagaacgagtcattgaaaagcaagctggagcatgccaacaaagagaactcagatgtgatagctctatggaagtccaaactggagactgccatcgcatcccaccagcaggcgatggaagaactgaaggtatctttcagcaaagggcttggaacagagacggcagaatttgctgaactaaaaacacaaatagagaaaatgagactagattaccaacacgaaatagaaaatttgcagaatcaacaagactctgaacgggctgcccatgctaaagagatggaagccttgagggctaaactgatgaaagttattaaagaaaaggaaaacagtctggaagccatcaggtcgaaactggacaaagcagaagaccagcatctcgtagaaatggaagacacgttaaacaaattacaggaagctgaaataaaggtaaaggagctagaggtactgcaagccaaatgcaatgaacaaaccaaggttattgataattttacatcacagctcaaggctactgaagaaaagctcttggatcttgatgcacttcggaaagccagttccgaaggtaaatcggaaatgaagaaacttagacagcagcttgaggcagctgagaaacagattaaacatttagagattgaaaagaatgctgaaagtagcaaggctagtagcattaccagagagctccaggggagagagctaaagcttactaaccttcaggaaaatttgagtgaagtcagtcaagtgaaagagactttggaaaaagaacttcagattttgaaagaaaagtttgctgaagcttcagaggaggcagtctctgttcagagaagtatgcaagaaactgtaaataagttacaccaaaaggaggaacagtttaacatgctgtcttctgacttggagaagctgagagaaaacttagcagatatggaggcaaaatttagagagaaagatgagagagaagagcagctgataaaggcaaaggaaaaactggaaaatgacattgcagaaataatgaagatgtcaggagataactcttctcagctgacaaaaatgaacgatgaattacgtctgaaagaaagagatgtagaagaattacagctaaaacttacaaaggctaatgaaaatgcaagttttctgcaaaaaagtattgaggacatgactgtcaaagctgaacagagccagcaagaagcagctaaaaagcatgaggaagaaaagaaagaattggagaggaaattgtcggacctggaaaagaaaatggaaacaagccacaaccagtgtcaggagctgaaagccaggtatgagagagccacttctgagacaaaaaccaagcatgaagaaatcctacagaacctccagaagacgctgctggacacagaggacaagctgaagggcgcacgggaggagaacagtggcttgctgcaggagctggaggagctgagaaagcaagccgacaaagccaaagctgctcaaacagcggaagatgccatgcagataatggaacagatgaccaaagagaagactgagactctggcctccttggaggacaccaagcaaacaaatgcaaaactacagaatgaattggacacacttaaagaaaacaacttgaaaaatgtggaagagctgaacaaatcaaaagaactcctgactgtagagaatcaaaaaatggaagaatttaggaaagaaatagaaaccctaaagcaggcagcagctcagaagtcccagcagctttcagcgttgcaagaagagaacgttaaacttgctgaggagctggggagaagcagggacgaagtcacaagtcatcaaaagctggaagaagaaagatctgtgctcaataatcagttgttagaaatgaaaaaaagagaatccaagttcataaaagacgcagatgaagagaaagcttccttgcagaaatccatcagtataactagtgccttactcacagaaaaggatgccgagctggagaaactgagaaatgaggtcacagtgctcaggggagaaaacgcctctgccaagtccttgcattcagttgttcagactctagagtctgataaggtgaagctcgagctcaaggtaaagaacttggagcttcaactcaaagaaaacaagaggcagctcagcagctcctcaggtaatacagacactcaggcagacgaggatgaaagagcccaggagagtcagattgatttcctaaattcagtaatagtggaccttcaaaggaagaatcaagacctcaagatgaaggtggagatgatgtcagaagcagccctgaatgggaacggggatgacctaaacaattatgacagtgatgatcaggagaaacagtccaagaagaaacctcgcctcttctgtgacatttgtgactgctttgatctccacgacacagaggattgtcctacccaggcacagatgtcagaggaccctccccattccacacaccatggcagtcggggtgaggaacgcccatactgtgaaatctgtgagatgtttggacactgggccaccaactgcaatgacgacgaaaccttctgatgaagcctccagtggagaactgggcttgctcagacgcactcgcattgacacaacgtaacaccagcattgtgtgtgcagacttcaggagaactcatgttattttttaaccccgtcaacaaatctaggaaaatattttgatcttcaacaaattgccctttagtctccccgtatgagttagaataataaatatttagtaggtgagttttcacctcgaattttgttttcttgatttttacgtttgaagacattgcaccagatgccattacatttattggccccccgaccttgtagaaaaacccctaccctcacaataccttatttaagtaactttaaattatgccgttacttttcatatttgcactaagatatttccaggctgcatttgtatatttagattttttggttaagctttgacactggaatgagttgaaaaaatgtgccattttgcattttcatctactcatttaaagtattttattcttattcaaagaaatatctgagctctttgcactacctgttatcagtagtgcctttacttcaggcttgataatacttaggtgtgattataaaatcatgaagcaggtaaagggaggggcaagcccccaaactgctgtggggacattttataatctatatgctgcacccacttaatctactgtggtgttttgtttattagttttgcataatttcagcttctatatattgtatgtatatattttttaaaaatctatattttgggaaaaaaacatacacaatgtgtctttctttttggacatttacctttttgaaaaagaaaacacttaaaatgatcattaggacataacagactaggccagacatagcatcttgtggctttgcaaccattttcatttgtttgttttccttttatttcttcaccagatttaaataactggaggaattttctccaatttttttttccttctctggcaggtatccccagcagtcaattaacaataagccagtataaaacacctaaataaccaatctacaatctcccttcacaagtttttttactgtttttagatgaatgtacgatgagaaattcaacgttaataattttggattttcttatcacaaaaaagaaaatgaaggacctcaaagcacctgaacagtttatcgaccagtttgaatctatttatcttcatttgaatgtcttctagaatatgtaaaaagtcataaaatgtatcttccatgctacatgtacaataagaacttctataattgtatatatgcctttgatgtattttcccctcaagattatcaactgtgtgttcgacagtgaatattcaatctggtaccagttgaaatttttggttataaatgtaatacgaattgtttcacaaacagaaaacatgtaaagcagtattaaaatttggccaaacaagtgttctgtatctactttaataaatggttattctttttagaaacaaaaacacagacaacacaacaacaac

SEQ ID NO: 53255 - DNA, 6278 bp, Homo sapiens
tgttttttgtttgtttgttttgagttggggtcttgctctgtcacccaggctggagtacagtggtgtgatcgatcatggctcactgcagcctcaaactcctgggctcatgaaatccttccccctcagcctcaaacagtcctcctatcttagcctcccaaagtgctgggattacagatgtgaggagtgggtcatggcacctggctaactgcttgtcttgaggatagtaaattgcctttaaatccatttcagcagcattttcatgtgtttaataaccagagtcttctaggttcctaggttcagcctggagatggattattgtcaaatgaaaggaaagctttagtctatgaaagctacctgttgttcctacttgctcctgtagattataaaatctttttatttctttctctttgcagatttaatccagagactgacttcactatagaacccacagttgtatcaatggttggggaaagatagtggcaacaggcaaaggagaaacagctctgacatacaaagaaaatgagtatgctaaagccaagtgggcttaaggcccccaccaagatcctgaagcctggaagcacagctctgaagacacctacggctgttgtagctccagtagaaaaaaccatatccagtgaaaaagcatcaagcactccatcatctgagactcaggaggaatttgtggatgactttcgagttggggagcgagtttgggtgaatggaaataagcctggatttatccagtttcttggagaaacccagtttgcaccaggccagtgggctggaattgttttagatgaacccataggcaagaacgatggttcggtggcaggagttcggtatttccagtgtgaacctttaaagggcatatttacccgaccttcaaagttaacaaggaaggtgcaagcagaagatgaagctaatggcctgcagacaacgcccgcctcccgagctacttcaccgctgtgcacttctacggccagcatggtgtcttcctccccctccaccccttcaaacatccctcagaaaccatcacagccagcagcaaaggaaccttcagctacgcctccgatcagcaaccttacaaaaactgccagtgaatctatctccaacctttcagaggctggctcaatcaagaaaggagaaagagagctcaaaatcggagacagagtattggttggtggcactaaggctggtgtagtccggtttcttggggagaccgactttgccaagggggagtggtgtggcgtggagttagatgagccacttgggaagaatgatggcgctgttgctggaacaaggtattttcagtgtcaacccaaatatggcttgttcgctcctgtccacaaagttaccaagattggcttcccttccactacaccagccaaagccaaggccaacgcagtgaggcgagtgatggcgaccacgtccgccagcctgaagcgcagcccttctgcctcttccctcagctccatgagctcagtggcctcctctgtgagcagcaggcccagtcggacaggactattgactgaaacctcctcccgttacgccaggaagatctccggtaccactgccctccaggaggccctgaaggagaagcagcagcacattgagcagctgctggcggaacgggatctggagagggcggaggtggccaaggccacgagccacgtgggggagatagagcaggagctagctctggcccgggacggacatgaccagcatgtcctggaattggaagccaaaatggaccagctgcgaacaatggtggaagctgctgacagggagaaggtggagcttctcaaccagcttgaagaggagaaaaggaaggttgaggaccttcagttccgggttgaagaagaatcaattaccaaaggtgatcttgagacgcagaccaaactggagcatgcccgcattaaggagcttgaacagagcctgctctttgaaaagaccaaagctgacaaactccagagggagttagaagacactagggtggctacagtttcagaaaagtcacgtataatggaactggagaaagacctagcattgagagtacaggaagtagctgagctccgaagaaggctagagtccaataagcctgctggggatgtggacatgtcactttcccttttgcaagagataagctctttgcaagaaaagttagaagtcacccgtactgaccaccagagagaaataacttctctgaaggagcattttggagcccgggaagaaactcatcagaaggagataaaggctctgtataccgccacggaaaagctttccaaagagaacgagtcattgaaaagcaagctggagcatgccaacaaagagaactcagatgtgatagctctatggaagtccaaactggagactgccatcgcatcccaccagcaggcgatggaagaactgaaggtatctttcagcaaagggcttggaacagagacggcagaatttgctgaactaaaaacacaaatagagaaaatgagactagattaccaacacgaaatagaaaatttgcagaatcaacaagactctgaacgggctgcccatgctaaagagatggaagccttgagggctaaactgatgaaagttattaaagaaaaggaaaacagtctggaagccatcaggtcgaaactggacaaagcagaagaccagcatctcgtagaaatggaagacacgttaaacaaattacaggaagctgaaataaaggtaaaggagctagaggtactgcaagccaaatgcaatgaacaaaccaaggttattgataattttacatcacagctcaaggctactgaagaaaagctcttggatcttgatgcacttcggaaagccagttccgaaggtaaatcggaaatgaagaaacttagacagcagcttgaggcagctgagaaacagattaaacatttagagattgaaaagaatgctgaaagtagcaaggctagtagcattaccagagagctccaggggagagagctaaagcttactaaccttcaggaaaatttgagtgaagtcagtcaagtgaaagagactttggaaaaagaacttcagattttgaaagaaaagtttgctgaagcttcagaggaggcagtctctgttcagagaagtatgcaagaaactgtaaataagttacaccaaaaggaggaacagtttaacatgctgtcttctgacttggagaagctgagagaaaacttagcagatatggaggcaaaatttagagagaaagatgagagagaagagcagctgataaaggcaaaggaaaaactggaaaatgacattgcagaaataatgaagatgtcaggagataactcttctcagctgacaaaaatgaacgatgaattacgtctgaaagaaagagatgtagaagaattacagctaaaacttacaaaggctaatgaaaatgcaagttttctgcaaaaaagtattgaggacatgactgtcaaagctgaacagagccagcaagaagcagctaaaaagcatgaggaagaaaagaaagaattggagaggaaattgtcggacctggaaaagaaaatggaaacaagccacaaccagtgtcaggagctgaaagccaggtatgagagagccacttctgagacaaaaaccaagcatgaagaaatcctacagaacctccagaagacgctgctggacacagaggacaagctgaagggcgcacgggaggagaacagtggcttgctgcaggagctggaggagctgagaaagcaagccgacaaagccaaagctgctcaaacagcggaagatgccatgcagataatggaacagatgaccaaagagaagactgagactctggcctccttggaggacaccaagcaaacaaatgcaaaactacagaatgaattggacacacttaaagaaaacaacttgaaaaatgtggaagagctgaacaaatcaaaagaactcctgactgtagagaatcaaaaaatggaagaatttaggaaagaaatagaaaccctaaagcaggcagcagctcagaagtcccagcagctttcagcgttgcaagaagagaacgttaaacttgctgaggagctggggagaagcagggacgaagtcacaagtcatcaaaagctggaagaagaaagatctgtgctcaataatcagttgttagaaatgaaaaaaagagaatccaagttcataaaagacgcagatgaagagaaagcttccttgcagaaatccatcagtataactagtgccttactcacagaaaaggatgccgagctggagaaactgagaaatgaggtcacagtgctcaggggagaaaacgcctctgccaagtccttgcattcagttgttcagactctagagtctgataaggtgaagctcgagctcaaggtaaagaacttggagcttcaactcaaagaaaacaagaggcagctcagcagctcctcaggtaatacagacactcaggcagacgaggatgaaagagcccaggagagtcagattgatttcctaaattcagtaatagtggaccttcaaaggaagaatcaagacctcaagatgaaggtggagatgatgtcagaagcagccctgaatgggaacggggatgacctaaacaattatgacagtgatgatcaggagaaacagtccaagaagaaacctcgcctcttctgtgacatttgtgactgctttgatctccacgacacagaggattgtcctacccaggcacagatgtcagaggaccctccccattccacacaccatggcagtcggggtgaggaacgcccatactgtgaaatctgtgagatgtttggacactgggccaccaactgcaatgacgacgaaaccttctgatgaagcctccagtggagaactgggcttgctcagacgcactcgcattgacacaacgtaacaccagcattgtgtgtgcagacttcaggagaactcatgttattttttaaccccgtcaacaaatctaggaaaatattttgatcttcaacaaattgccctttagtctccccgtatgagttagaataataaatatttagtaggtgagttttcacctcgaattttgttttcttgatttttacgtttgaagacattgcaccagatgccattacatttattggccccccgaccttgtagaaaaacccctaccctcacaataccttatttaagtaactttaaattatgccgttacttttcatatttgcactaagatatttccaggctgcatttgtatatttagattttttggttaagctttgacactggaatgagttgaaaaaatgtgccattttgcattttcatctactcatttaaagtattttattcttattcaaagaaatatctgagctctttgcactacctgttatcagtagtgcctttacttcaggcttgataatacttaggtgtgattataaaatcatgaagcaggtaaagggaggggcaagcccccaaactgctgtggggacattttataatctatatgctgcacccacttaatctactgtggtgttttgtttattagttttgcataatttcagcttctatatattgtatgtatatattttttaaaaatctatattttgggaaaaaaacatacacaatgtgtctttctttttggacatttacctttttgaaaaagaaaacacttaaaatgatcattaggacataacagactaggccagacatagcatcttgtggctttgcaaccattttcatttgtttgttttccttttatttcttcaccagatttaaataactggaggaattttctccaatttttttttccttctctggcaggtatccccagcagtcaattaacaataagccagtataaaacacctaaataaccaatctacaatctcccttcacaagtttttttactgtttttagatgaatgtacgatgagaaattcaacgttaataattttggattttcttatcacaaaaaagaaaatgaaggacctcaaagcacctgaacagtttatcgaccagtttgaatctatttatcttcatttgaatgtcttctagaatatgtaaaaagtcataaaatgtatcttccatgctacatgtacaataagaacttctataattgtatatatgcctttgatgtattttcccctcaagattatcaactgtgtgttcgacagtgaatattcaatctggtaccagttgaaatttttggttataaatgtaatacgaattgtttcacaaacagaaaacatgtaaagcagtattaaaatttggccaaacaagtgttctgtatctactttaataaatggttattctttttagaaacaaaaacacagacaacacaacaacaac

SEQ ID NO: 53256 - DNA, 5357 bp, Homo sapiens
tgccaaagttaggtgcctgtttgatttcctttccctttgtttggcacggttttattaaatgggcttgttctattgctaaactcctctgctgtacatttatcaggttgtgaaaatatttatttcctttatgcagaatctcagcaacaggtgagcaattctgactctgtgtatcatattgtcaccagtgtgtgttctaaaccatcactgaggttgttagcctacatacatgtgactgctacgtgctggtgtgtaaccccagcttagctgtagaatttccaggaatccaaccgtaagttaggagttgggagaaccttttggttatagttattatttcttgtgattaagttgttttttgttattgttcttattgttctctaaaggtattttcagtgtcaacccaaatatggcttgttcgctcctgtccacaaagttaccaagattggcttcccttccactacaccagccaaagccaaggccaacgcagtgaggcgagtgatggcgaccacgtccgccagcctgaagcgcagcccttctgcctcttccctcagctccatgagctcagtggcctcctctgtgagcagcaggcccagtcggacaggactattgactgaaacctcctcccgttacgccaggaagatctccggtaccactgccctccaggaggccctgaaggagaagcagcagcacattgagcagctgctggcggaacgggatctggagagggcggaggtggccaaggccacgagccacgtgggggagatagagcaggagctagctctggcccgggacggacatgaccagcatgtcctggaattggaagccaaaatggaccagctgcgaacaatggtggaagctgctgacagggagaaggtggagcttctcaaccagcttgaagaggagaaaaggaaggttgaggaccttcagttccgggttgaagaagaatcaattaccaaaggtgatcttgagacgcagaccaaactggagcatgcccgcattaaggagcttgaacagagcctgctctttgaaaagaccaaagctgacaaactccagagggagttagaagacactagggtggctacagtttcagaaaagtcacgtataatggaactggagaaagacctagcattgagagtacaggaagtagctgagctccgaagaaggctagagtccaataagcctgctggggatgtggacatgtcactttcccttttgcaagagataagctctttgcaagaaaagttagaagtcacccgtactgaccaccagagagaaataacttctctgaaggagcattttggagcccgggaagaaactcatcagaaggagataaaggctctgtataccgccacggaaaagctttccaaagagaacgagtcattgaaaagcaagctggagcatgccaacaaagagaactcagatgtgatagctctatggaagtccaaactggagactgccatcgcatcccaccagcaggcgatggaagaactgaaggtatctttcagcaaagggcttggaacagagacggcagaatttgctgaactaaaaacacaaatagagaaaatgagactagattaccaacacgaaatagaaaatttgcagaatcaacaagactctgaacgggctgcccatgctaaagagatggaagccttgagggctaaactgatgaaagttattaaagaaaaggaaaacagtctggaagccatcaggtcgaaactggacaaagcagaagaccagcatctcgtagaaatggaagacacgttaaacaaattacaggaagctgaaataaaggtaaaggagctagaggtactgcaagccaaatgcaatgaacaaaccaaggttattgataattttacatcacagctcaaggctactgaagaaaagctcttggatcttgatgcacttcggaaagccagttccgaaggtaaatcggaaatgaagaaacttagacagcagcttgaggcagctgagaaacagattaaacatttagagattgaaaagaatgctgaaagtagcaaggctagtagcattaccagagagctccaggggagagagctaaagcttactaaccttcaggaaaatttgagtgaagtcagtcaagtgaaagagactttggaaaaagaacttcagattttgaaagaaaagtttgctgaagcttcagaggaggcagtctctgttcagagaagtatgcaagaaactgtaaataagttacaccaaaaggaggaacagtttaacatgctgtcttctgacttggagaagctgagagaaaacttagcagatatggaggcaaaatttagagagaaagatgagagagaagagcagctgataaaggcaaaggaaaaactggaaaatgacattgcagaaataatgaagatgtcaggagataactcttctcagctgacaaaaatgaacgatgaattacgtctgaaagaaagagatgtagaagaattacagctaaaacttacaaaggctaatgaaaatgcaagttttctgcaaaaaagtattgaggacatgactgtcaaagctgaacagagccagcaagaagcagctaaaaagcatgaggaagaaaagaaagaattggagaggaaattgtcggacctggaaaagaaaatggaaacaagccacaaccagtgtcaggagctgaaagccaggtatgagagagccacttctgagacaaaaaccaagcatgaagaaatcctacagaacctccagaagacgctgctggacacagaggacaagctgaagggcgcacgggaggagaacagtggcttgctgcaggagctggaggagctgagaaagcaagccgacaaagccaaagctgctcaaacagcggaagatgccatgcagataatggaacagatgaccaaagagaagactgagactctggcctccttggaggacaccaagcaaacaaatgcaaaactacagaatgaattggacacacttaaagaaaacaacttgaaaaatgtggaagagctgaacaaatcaaaagaactcctgactgtagagaatcaaaaaatggaagaatttaggaaagaaatagaaaccctaaagcaggcagcagctcagaagtcccagcagctttcagcgttgcaagaagagaacgttaaacttgctgaggagctggggagaagcagggacgaagtcacaagtcatcaaaagctggaagaagaaagatctgtgctcaataatcagttgttagaaatgaaaaaaagagaatccaagttcataaaagacgcagatgaagagaaagcttccttgcagaaatccatcagtataactagtgccttactcacagaaaaggatgccgagctggagaaactgagaaatgaggtcacagtgctcaggggagaaaacgcctctgccaagtccttgcattcagttgttcagactctagagtctgataaggtgaagctcgagctcaaggtaaagaacttggagcttcaactcaaagaaaacaagaggcagctcagcagctcctcaggtaatacagacactcaggcagacgaggatgaaagagcccaggagagtcagattgatttcctaaattcagtaatagtggaccttcaaaggaagaatcaagacctcaagatgaaggtggagatgatgtcagaagcagccctgaatgggaacggggatgacctaaacaattatgacagtgatgatcaggagaaacagtccaagaagaaacctcgcctcttctgtgacatttgtgactgctttgatctccacgacacagaggattgtcctacccaggcacagatgtcagaggaccctccccattccacacaccatggcagtcggggtgaggaacgcccatactgtgaaatctgtgagatgtttggacactgggccaccaactgcaatgacgacgaaaccttctgatgaagcctccagtggagaactgggcttgctcagacgcactcgcattgacacaacgtaacaccagcattgtgtgtgcagacttcaggagaactcatgttattttttaaccccgtcaacaaatctaggaaaatattttgatcttcaacaaattgccctttagtctccccgtatgagttagaataataaatatttagtaggtgagttttcacctcgaattttgttttcttgatttttacgtttgaagacattgcaccagatgccattacatttattggccccccgaccttgtagaaaaacccctaccctcacaataccttatttaagtaactttaaattatgccgttacttttcatatttgcactaagatatttccaggctgcatttgtatatttagattttttggttaagctttgacactggaatgagttgaaaaaatgtgccattttgcattttcatctactcatttaaagtattttattcttattcaaagaaatatctgagctctttgcactacctgttatcagtagtgcctttacttcaggcttgataatacttaggtgtgattataaaatcatgaagcaggtaaagggaggggcaagcccccaaactgctgtggggacattttataatctatatgctgcacccacttaatctactgtggtgttttgtttattagttttgcataatttcagcttctatatattgtatgtatatattttttaaaaatctatattttgggaaaaaaacatacacaatgtgtctttctttttggacatttacctttttgaaaaagaaaacacttaaaatgatcattaggacataacagactaggccagacatagcatcttgtggctttgcaaccattttcatttgtttgttttccttttatttcttcaccagatttaaataactggaggaattttctccaatttttttttccttctctggcaggtatccccagcagtcaattaacaataagccagtataaaacacctaaataaccaatctacaatctcccttcacaagtttttttactgtttttagatgaatgtacgatgagaaattcaacgttaataattttggattttcttatcacaaaaaagaaaatgaaggacctcaaagcacctgaacagtttatcgaccagtttgaatctatttatcttcatttgaatgtcttctagaatatgtaaaaagtcataaaatgtatcttccatgctacatgtacaataagaacttctataattgtatatatgcctttgatgtattttcccctcaagattatcaactgtgtgttcgacagtgaatattcaatctggtaccagttgaaatttttggttataaatgtaatacgaattgtttcacaaacagaaaacatgtaaagcagtattaaaatttggccaaacaagtgttctgtatctactttaataaatggttattctttttagaaacaaaaacacagacaacacaacaacaac

SEQ ID NO: 53257 - DNA, 3583 bp, Homo sapiens
gtcagaaagaaagagaaaaaaaaaaaaacacaaaaatagccattaggaaatcatatcatagaactgattgtttgaaaagtcattgacttcttagaattaaaaaccaacaccaaatttgtattcctttcagttttgttttatgtttctcataagttttttacatttgtttatttttttcttctcattctcttttgttttccttttgttcatttgcttctataccatgtaacactgtgtgttaggctagtagcattaccagagagctccaggggagagagctaaagcttactaaccttcaggaaaatttgagtgaagtcagtcaagtgaaagagactttggaaaaagaacttcagattttgaaagaaaagtttgctgaagcttcagaggaggcagtctctgttcagagaagtatgcaagaaactgtaaataagttacaccaaaaggaggaacagtttaacatgctgtcttctgacttggagaagctgagagaaaacttagcagatatggaggcaaaatttagagagaaagatgagagagaagagcagctgataaaggcaaaggaaaaactggaaaatgacattgcagaaataatgaagatgtcaggagataactcttctcagctgacaaaaatgaacgatgaattacgtctgaaagaaagagatgtagaagaattacagctaaaacttacaaaggctaatgaaaatgcaagttttctgcaaaaaagtattgaggacatgactgtcaaagctgaacagagccagcaagaagcagctaaaaagcatgaggaagaaaagaaagaattggagaggaaattgtcggacctggaaaagaaaatggaaacaagccacaaccagtgtcaggagctgaaagccaggtatgagagagccacttctgagacaaaaaccaagcatgaagaaatcctacagaacctccagaagacgctgctggacacagaggacaagctgaagggcgcacgggaggagaacagtggcttgctgcaggagctggaggagctgagaaagcaagccgacaaagccaaagctgctcaaacagcggaagatgccatgcagataatggaacagatgaccaaagagaagactgagactctggcctccttggaggacaccaagcaaacaaatgcaaaactacagaatgaattggacacacttaaagaaaacaacttgaaaaatgtggaagagctgaacaaatcaaaagaactcctgactgtagagaatcaaaaaatggaagaatttaggaaagaaatagaaaccctaaagcaggcagcagctcagaagtcccagcagctttcagcgttgcaagaagagaacgttaaacttgctgaggagctggggagaagcagggacgaagtcacaagtcatcaaaagctggaagaagaaagatctgtgctcaataatcagttgttagaaatgaaaaaaagagaatccaagttcataaaagacgcagatgaagagaaagcttccttgcagaaatccatcagtataactagtgccttactcacagaaaaggatgccgagctggagaaactgagaaatgaggtcacagtgctcaggggagaaaacgcctctgccaagtccttgcattcagttgttcagactctagagtctgataaggtgaagctcgagctcaaggtaaagaacttggagcttcaactcaaagaaaacaagaggcagctcagcagctcctcaggtaatacagacactcaggcagacgaggatgaaagagcccaggagagtcagattgatttcctaaattcagtaatagtggaccttcaaaggaagaatcaagacctcaagatgaaggtggagatgatgtcagaagcagccctgaatgggaacggggatgacctaaacaattatgacagtgatgatcaggagaaacagtccaagaagaaacctcgcctcttctgtgacatttgtgactgctttgatctccacgacacagaggattgtcctacccaggcacagatgtcagaggaccctccccattccacacaccatggcagtcggggtgaggaacgcccatactgtgaaatctgtgagatgtttggacactgggccaccaactgcaatgacgacgaaaccttctgatgaagcctccagtggagaactgggcttgctcagacgcactcgcattgacacaacgtaacaccagcattgtgtgtgcagacttcaggagaactcatgttattttttaaccccgtcaacaaatctaggaaaatattttgatcttcaacaaattgccctttagtctccccgtatgagttagaataataaatatttagtaggtgagttttcacctcgaattttgttttcttgatttttacgtttgaagacattgcaccagatgccattacatttattggccccccgaccttgtagaaaaacccctaccctcacaataccttatttaagtaactttaaattatgccgttacttttcatatttgcactaagatatttccaggctgcatttgtatatttagattttttggttaagctttgacactggaatgagttgaaaaaatgtgccattttgcattttcatctactcatttaaagtattttattcttattcaaagaaatatctgagctctttgcactacctgttatcagtagtgcctttacttcaggcttgataatacttaggtgtgattataaaatcatgaagcaggtaaagggaggggcaagcccccaaactgctgtggggacattttataatctatatgctgcacccacttaatctactgtggtgttttgtttattagttttgcataatttcagcttctatatattgtatgtatatattttttaaaaatctatattttgggaaaaaaacatacacaatgtgtctttctttttggacatttacctttttgaaaaagaaaacacttaaaatgatcattaggacataacagactaggccagacatagcatcttgtggctttgcaaccattttcatttgtttgttttccttttatttcttcaccagatttaaataactggaggaattttctccaatttttttttccttctctggcaggtatccccagcagtcaattaacaataagccagtataaaacacctaaataaccaatctacaatctcccttcacaagtttttttactgtttttagatgaatgtacgatgagaaattcaacgttaataattttggattttcttatcacaaaaaagaaaatgaaggacctcaaagcacctgaacagtttatcgaccagtttgaatctatttatcttcatttgaatgtcttctagaatatgtaaaaagtcataaaatgtatcttccatgctacatgtacaataagaacttctataattgtatatatgcctttgatgtattttcccctcaagattatcaactgtgtgttcgacagtgaatattcaatctggtaccagttgaaatttttggttataaatgtaatacgaattgtttcacaaacagaaaacatgtaaagcagtattaaaatttggccaaacaagtgttctgtatctactttaataaatggttattctttttagaaacaaaaacacagacaacacaacaacaac

SEQ ID NO: 53258 - DNA, 1497 bp, Homo sapiens
  misc_feature (15)..(15): n is a, c, g, or t
taggctaggtagagncggggtgtgaatcggcgagtggagaactgggcttgctcagacgcactcgcattgacacaacgtaacaccagcattgtgtgtgcagacttcaggagaactcatgttattttttaaccccgtcaacaaatctaggaaaatattttgatcttcaacaaattgccctttagtctccccgtatgagttagaataataaatatttagtaggtgagttttcacctcgaattttgttttcttgatttttacgtttgaagacattgcaccagatgccattacatttattggccccccgaccttgtagaaaaacccctaccctcacaataccttatttaagtaactttaaattatgccgttacttttcatatttgcactaagatatttccaggctgcatttgtatatttagattttttggttaagctttgacactggaatgagttgaaaaaatgtgccattttgcattttcatctactcatttaaagtattttattcttattcaaagaaatatctgagctctttgcactacctgttatcagtagtgcctttacttcaggcttgataatacttaggtgtgattataaaatcatgaagcaggtaaagggaggggcaagcccccaaactgctgtggggacattttataatctatatgctgcacccacttaatctactgtggtgttttgtttattagttttgcataatttcagcttctatatattgtatgtatatattttttaaaaatctatattttgggaaaaaaacatacacaatgtgtctttctttttggacatttacctttttgaaaaagaaaacacttaaaatgatcattaggacataacagactaggccagacatagcatcttgtggctttgcaaccattttcatttgtttgttttccttttatttcttcaccagatttaaataactggaggaattttctccaatttttttttccttctctggcaggtatccccagcagtcaattaacaataagccagtataaaacacctaaataaccaatctacaatctcccttcacaagtttttttactgtttttagatgaatgtacgatgagaaattcaacgttaataattttggattttcttatcacaaaaaagaaaatgaaggacctcaaagcacctgaacagtttatcgaccagtttgaatctatttatcttcatttgaatgtcttctagaatatgtaaaaagtcataaaatgtatcttccatgctacatgtacaataagaacttctataattgtatatatgcctttgatgtattttcccctcaagattatcaactgtgtgttcgacagtgaatattcaatctggtaccagttgaaatttttggttataaatgtaatacgaattgtttcacaaacagaaaacatgtaaagcagtattaaaatttggccaaacaagtgttctgtatctactttaataaatggttattctttttagaaacaaaaacacagacaacacaacaacaac

SEQ ID NO: 53259 - DNA, 1734 bp, Homo sapiens
tgctcggtacccccatttcttagcatttacctttgaacatgtgcctgtttgctaatttttggactcttagaaagtaaagatgttacttctcaaacagcatttatagaaattctaatatttctggctgggtgtggtggttcacacctgtaatcccagcactttgggaggccgaggtgggtggatcacttgaggtcaggagttcaagaccagcctggccaacatagcgaaaccctgttgcaatgacgacgaaaccttctgatgaagcctccagtggagaactgggcttgctcagacgcactcgcattgacacaacgtaacaccagcattgtgtgtgcagacttcaggagaactcatgttattttttaaccccgtcaacaaatctaggaaaatattttgatcttcaacaaattgccctttagtctccccgtatgagttagaataataaatatttagtaggtgagttttcacctcgaattttgttttcttgatttttacgtttgaagacattgcaccagatgccattacatttattggccccccgaccttgtagaaaaacccctaccctcacaataccttatttaagtaactttaaattatgccgttacttttcatatttgcactaagatatttccaggctgcatttgtatatttagattttttggttaagctttgacactggaatgagttgaaaaaatgtgccattttgcattttcatctactcatttaaagtattttattcttattcaaagaaatatctgagctctttgcactacctgttatcagtagtgcctttacttcaggcttgataatacttaggtgtgattataaaatcatgaagcaggtaaagggaggggcaagcccccaaactgctgtggggacattttataatctatatgctgcacccacttaatctactgtggtgttttgtttattagttttgcataatttcagcttctatatattgtatgtatatattttttaaaaatctatattttgggaaaaaaacatacacaatgtgtctttctttttggacatttacctttttgaaaaagaaaacacttaaaatgatcattaggacataacagactaggccagacatagcatcttgtggctttgcaaccattttcatttgtttgttttccttttatttcttcaccagatttaaataactggaggaattttctccaatttttttttccttctctggcaggtatccccagcagtcaattaacaataagccagtataaaacacctaaataaccaatctacaatctcccttcacaagtttttttactgtttttagatgaatgtacgatgagaaattcaacgttaataattttggattttcttatcacaaaaaagaaaatgaaggacctcaaagcacctgaacagtttatcgaccagtttgaatctatttatcttcatttgaatgtcttctagaatatgtaaaaagtcataaaatgtatcttccatgctacatgtacaataagaacttctataattgtatatatgcctttgatgtattttcccctcaagattatcaactgtgtgttcgacagtgaatattcaatctggtaccagttgaaatttttggttataaatgtaatacgaattgtttcacaaacagaaaacatgtaaagcagtattaaaatttggccaaacaagtgttctgtatctactttaataaatggttattctttttagaaacaaaaacacagacaacacaacaacaac

SEQ ID NO: 53260 - DNA, 678 bp, Homo sapiens
  misc_feature (23)..(24): n is a, c, g, or t
catgggccggtaccacttatganngacagactaggccagacatagcatcttgtggctttgcaaccattttcatttgtttgttttccttttatttcttcaccagatttaaataactggaggaattttctccaatttttttttccttctctggcaggtatccccagcagtcaattaacaataagccagtataaaacacctaaataaccaatctacaatctcccttcacaagtttttttactgtttttagatgaatgtacgatgagaaattcaacgttaataattttggattttcttatcacaaaaaagaaaatgaaggacctcaaagcacctgaacagtttatcgaccagtttgaatctatttatcttcatttgaatgtcttctagaatatgtaaaaagtcataaaatgtatcttccatgctacatgtacaataagaacttctataattgtatatatgcctttgatgtattttcccctcaagattatcaactgtgtgttcgacagtgaatattcaatctggtaccagttgaaatttttggttataaatgtaatacgaattgtttcacaaacagaaaacatgtaaagcagtattaaaatttggccaaacaagtgttctgtatctactttaataaatggttattctttttagaaacaaaaacacagacaacacaacaacaac

SEQ ID NO: 53261 - DNA, 4438 bp, Homo sapiens
gaggcggcggccgcggcggctgctgctgctgcagtgggacaggtggcggcgaccggcggcgtccgaggagatttaatccagagactgacttcactatagaacccacagttgtatcaatggttggggaaagatagtggcaacaggcaaaggagaaacagctctgacatacaaagaaaatgagtatgctaaagccaagtgggcttaaggcccccaccaagatcctgaagcctggaagcacagctctgaagacacctacggctgttgtagctccagtagaaaaaaccatatccagtgaaaaagcatcaagcactccatcatctgagactcaggaggaatttgtggatgactttcgagttggggagcgagtttgggtgaatggaaataagcctggatttatccagtttcttggagaaacccagtttgcaccaggccagtgggctggaattgttttagatgaacccataggcaagaacgatggttcggtggcaggagttcggtatttccagtgtgaacctttaaagggcatatttacccgaccttcaaagttaacaaggaaggtgcaagcagaagatgaagctaatggcctgcagacaacgcccgcctcccgagctacttcaccgctgtgcacttctacggccagcatggtgtcttcctccccctccaccccttcaaacatccctcagaaaccatcacagccagcagcaaaggaaccttcagctacgcctccgatcagcaaccttacaaaaactgccagtgaatctatctccaacctttcagaggctggctcaatcaagaaaggagaaagagagctcaaaatcggagacagagtattggttggtggcactaaggctggtgtagtccggtttcttggggagaccgactttgccaagggggagtggtgtggcgtggagttagatgagccacttgggaagaatgatggcgctgttgctggaacaaggtattttcagtgtcaacccaaatatggcttgttcgctcctgtccacaaagttaccaagattggcttcccttccactacaccagccaaagccaaggccaacgcagtgaggcgagtgatggcgaccacgtccgccagcctgaagcgcagcccttctgcctcttccctcagctccatgagctcagtggcctcctctgtgagcagcaggcccagtcggacaggactattgactgaaacctcctcccgttacgccaggaagatctccggtaccactgccctccaggaggccctgaaggagaagcagcagcacattgagcagctgctggcggaacgggatctggagagggcggaggtggccaaggccacgagccacgtgggggagatagagcaggagctagctctggcccgggacggacatgaccagcatgtcctggaattggaagccaaaatggaccagctgcgaacaatggtggaagctgctgacagggagaaggtggagcttctcaaccagcttgaagaggagaaaaggaaggttgaggaccttcagttccgggttgaagaagaatcaattaccaaaggtgatcttgagacgcagaccaaactggagcatgcccgcattaaggagcttgaacagagcctgctctttgaaaagaccaaagctgacaaactccagagggagttagaagacactagggtggctacagtttcagaaaagtcacgtataatggaactggagaaagacctagcattgagagtacaggaagtagctgagctccgaagaaggctagagtccaataagcctgctggggatgtggacatgtcactttcccttttgcaagagataagctctttgcaagaaaagttagaagtcacccgtactgaccaccagagagaaataacttctctgaaggagcattttggagcccgggaagaaactcatcagaaggagataaaggctctgtataccgccacggaaaagctttccaaagagaacgagtcattgaaaagcaagctggagcatgccaacaaagagaactcagatgtgatagctctatggaagtccaaactggagactgccatcgcatcccaccagcaggcgatggaagaactgaaggtatctttcagcaaagggcttggaacagagacggcagaatttgctgaactaaaaacacaaatagagaaaatgagactagattaccaacacgaaatagaaaatttgcagaatcaacaagactctgaacgggctgcccatgctaaagagatggaagccttgagggctaaactgatgaaagttattaaagaaaaggaaaacagtctggaagccatcaggtcgaaactggacaaagcagaagaccagcatctcgtagaaatggaagacacgttaaacaaattacaggaagctgaaataaaggtaaaggagctagaggtactgcaagccaaatgcaatgaacaaaccaaggttattgataattttacatcacagctcaaggctactgaagaaaagctcttggatcttgatgcacttcggaaagccagttccgaaggtaaatcggaaatgaagaaacttagacagcagcttgaggcagctgagaaacagattaaacatttagagattgaaaagaatgctgaaagtagcaaggctagtagcattaccagagagctccaggggagagagctaaagcttactaaccttcaggaaaatttgagtgaagtcagtcaagtgaaagagactttggaaaaagaacttcagattttgaaagaaaagtttgctgaagcttcagaggaggcagtctctgttcagagaagtatgcaagaaactgtaaataagttacaccaaaaggaggaacagtttaacatgctgtcttctgacttggagaagctgagagaaaacttagcagatatggaggcaaaatttagagagaaagatgagagagaagagcagctgataaaggcaaaggaaaaactggaaaatgacattgcagaaataatgaagatgtcaggagataactcttctcagctgacaaaaatgaacgatgaattacgtctgaaagaaagagatgtagaagaattacagctaaaacttacaaaggctaatgaaaatgcaagttttctgcaaaaaagtattgaggacatgactgtcaaagctgaacagagccagcaagaagcagctaaaaagcatgaggaagaaaagaaagaattggagaggaaattgtcggacctggaaaagaaaatggaaacaagccacaaccagtgtcaggagctgaaagccaggtatgagagagccacttctgagacaaaaaccaagcatgaagaaatcctacagaacctccagaagacgctgctggacacagaggacaagctgaagggcgcacgggaggagaacagtggcttgctgcaggagctggaggagctgagaaagcaagccgacaaagccaaagctgctcaaacagcggaagatgccatgcagataatggaacagatgaccaaagagaagactgagactctggcctccttggaggacaccaagcaaacaaatgcaaaactacagaatgaattggacacacttaaagaaaacaacttgaaaaatgtggaagagctgaacaaatcaaaagaactcctgactgtagagaatcaaaaaatggaagaatttaggaaagaaatagaaaccctaaagcaggcagcagctcagaagtcccagcagctttcagcgttgcaagaagagaacgttaaacttgctgaggagctggggagaagcagggacgaagtcacaagtcatcaaaagctggaagaagaaagatctgtgctcaataatcagttgttagaaatgaaaaaaagagaatccaagttcataaaagacgcagatgaagagaaagcttccttgcagaaatccatcagtataactagtgccttactcacagaaaaggatgccgagctggagaaactgagaaatgaggtcacagtgctcaggggagaaaacgcctctgccaagtccttgcattcagttgttcagactctagagtctgataaggtgaagctcgagctcaaggtaaagaacttggagcttcaactcaaagaaaacaagaggcagctcagcagctcctcagtacagacactcaggcagacgggatgagctcaggacagagccagaggcaaagaagagtaagacggccgcaaagaaaaatgacaaaggggcagcaggagagggcccagccctgtatgaggaccccccagatcagaaaacctcacccagtggcaaacctgccaaactcaagatctgctcttggactgtggatgggctacgagccctggattacgaagaaaggataagatggggtaaaggaagaagccccagatatactgtgcctccctaaagaccctaataagtgagggtcaacttttcatgcagaacgaggcatcttgtaccccatggagacgtgagctatatatccccaatgtctaatttggcctatctaggccatccta

SEQ ID NO: 53262 - DNA, 3780 bp, Homo sapiens
gaggcggcggccgcggcggctgctgctgctgcagtgggacaggtggcggcgaccggcggcgtccgaggagatttaatccagagactgacttcactatagaacccacagttgtatcaatggttggggaaagatagtggcaacaggcaaaggagaaacagctctgacatacaaagaaaatgagtatgctaaagccaagtgggcttaaggcccccaccaagatcctgaagcctggaagcacagctctgaagacacctacggctgttgtagctccagtagaaaaaaccatatccagtgaaaaagcatcaagcactccatcatctgagactcaggaggaatttgtggatgactttcgagttggggagcgagtttgggtgaatggaaataagcctggatttatccagtttcttggagaaacccagtttgcaccaggccagtgggctggaattgttttagatgaacccataggcaagaacgatggttcggtggcaggagttcggtatttccagtgtgaacctttaaagggcatatttacccgaccttcaaagttaacaaggaaggtgcaagcagaagatgaagctaatggcctgcagacaacgcccgcctcccgagctacttcaccgctgtgcacttctacggccagcatggtgtcttcctccccctccaccccttcaaacatccctcagaaaccatcacagccagcagcaaaggaaccttcagctacgcctccgatcagcaaccttacaaaaactgccagtgaatctatctccaacctttcagaggctggctcaatcaagaaaggagaaagagagctcaaaatcggagacagagtattggttggtggcactaaggctggtgtagtccggtttcttggggagaccgactttgccaagggggagtggtgtggcgtggagttagatgagccacttgggaagaatgatggcgctgttgctggaacaaggtattttcagtgtcaacccaaatatggcttgttcgctcctgtccacaaagttaccaagattggcttcccttccactacaccagccaaagccaaggccaacgcagtgaggcgagtgatggcgaccacgtccgccagcctgaagcgcagcccttctgcctcttccctcagctccatgagctcagtggcctcctctgtgagcagcaggcccagtcggacaggactattgactgaaacctcctcccgttacgccaggaagatctccggtaccactgccctccaggaggccctgaaggagaagcagcagcacattgagcagctgctggcggaacgggatctggagagggcggaggtggccaaggccacgagccacgtgggggagatagagcaggagctagctctggcccgggacggacatgaccagcatgtcctggaattggaagccaaaatggaccagctgcgaacaatggtggaagctgctgacagggagaaggtggagcttctcaaccagcttgaagaggagaaaaggaaggttgaggaccttcagttccgggttgaagaagaatcaattaccaaaggtgatcttgagacgcagaccaaactggagcatgcccgcattaaggagcttgaacagagcctgctctttgaaaagaccaaagctgacaaactccagagggagttagaagacactagggtggctacagtttcagaaaagtcacgtataatggaactggagaaagacctagcattgagagtacaggaagtagctgagctccgaagaaggctagagtccaataagcctgctggggatgtggacatgtcactttcccttttgcaagagataagctctttgcaagaaaagttagaagtcacccgtactgaccaccagagagaaataacttctctgaaggagcattttggagcccgggaagaaactcatcagaaggagataaaggctctgtataccgccacggaaaagctttccaaagagaacgagtcattgaaaagcaagctggagcatgccaacaaagagaactcagatgtgatagctctatggaagtccaaactggagactgccatcgcatcccaccagcaggcgatggaagaactgaaggtatctttcagcaaagggcttggaacagagacggcagaatttgctgaactaaaaacacaaatagagaaaatgagactagattaccaacacgaaatagaaaatttgcagaatcaacaagactctgaacgggctgcccatgctaaagagatggaagccttgagggctaaactgatgaaagttattaaagaaaaggaaaacagtctggaagccatcaggtcgaaactggacaaagcagaagaccagcatctcgtagaaatggaagacacgttaaacaaattacaggaagctgaaataaaggtaaaggagctagaggtactgcaagccaaatgcaatgaacaaaccaaggttattgataattttacatcacagctcaaggctactgaagaaaagctcttggatcttgatgcacttcggaaagccagttccgaaggtaaatcggaaatgaagaaacttagacagcagcttgaggcagctgagaaacagattaaacatttagagattgaaaagaatgctgaaagtagcaaggctagtagcattaccagagagctccaggggagagagctaaagcttactaaccttcaggaaaatttgagtgaagtcagtcaagtgaaagagactttggaaaaagaacttcagattttgaaagaaaagtttgctgaagcttcagaggaggcagtctctgttcagagaagtatgcaagaaactgtaaataagttacaccaaaaggaggaacagtttaacatgctgtcttctgacttggagaagctgagagaaaacttagcagatatggaggcaaaatttagagagaaagatgagagagaagagcagctgataaaggcaaaggaaaaactggaaaatgacattgcagaaataatgaagatgtcaggagataactcttctcagctgacaaaaatgaacgatgaattacgtctgaaagaaagagatgtagaagaattacagctaaaacttacaaaggctaatgaaaatgcaagttttctgcaaaaaagtattgaggacatgactgtcaaagctgaacagagccagcaagaagcagctaaaaagcatgaggaagaaaagaaagaattggagaggaaattgtcggacctggaaaagaaaatggaaacaagccacaaccagtgtcaggagctgaaagccaggtatgagagagccacttctgagacaaaaaccaagcatgaagaaatcctacagaacctccagaagacgctgctggacacagaggacaagctgaagggcgcacgggaggagaacagtggcttgctgcaggagctggaggagctgagaaagcaagccgacaaagccaaagctgctcaaacagcggaagatgccatgcagataatggaacagatgaccaaagagaagactgagactctggcctccttggaggacaccaagcaaacaaatgcaaaactacagaatgaattggacacacttaaagaaaacaacttgaaaaatgtggaagagctgaacaaatcaaaagaactcctgactgtagagaatcaaaaaatggaagaatttaggaaagaaatagaaaccctaaagcaggcagcagctcagaagtcccagcagctttcagcgttgcaagaagagaacgttaaacttgctgaggagctggggagaagcaggggacccaaagttcccaaagtcattcaaaaaggcttgggaaagaaaagaaaaggaatcctgggggcct

SEQ ID NO: 53263 - DNA, 1423 bp, Homo sapiens
gaggcggcggccgcggcggctgctgctgctgcagtgggacaggtggcggcgaccggcggcgtccgaggagatttaatccagagactgacttcactatagaacccacagttgtatcaatggttggggaaagatagtggcaacaggcaaaggagaaacagctctgacatacaaagaaaatgagtatgctaaagccaagtgggcttaaggcccccaccaagatcctgaagcctggaagcacagctctgaagacacctacggctgttgtagctccagtagaaaaaaccatatccagtgaaaaagcatcaagcactccatcatctgagactcaggaggaatttgtggatgactttcgagttggggagcgagtttgggtgaatggaaataagcctggatttatccagtttcttggagaaacccagtttgcaccaggccagtgggctggaattgttttagatgaacccataggcaagaacgatggttcggtggcaggagttcggtatttccagtgtgaacctttaaagggcatatttacccgaccttcaaagttaacaaggaaggtgcaagcagaagatgaagctaatggcctgcagacaacgcccgcctcccgagctacttcaccgctgtgcacttctacggccagcatggtgtcttcctccccctccaccccttcaaacatccctcagaaaccatcacagccagcagcaaaggaaccttcagctacgcctccgatcagcaaccttacaaaaactgccagtgaatctatctccaacctttcagaggctggctcaatcaagaaaggagaaagagagctcaaaatcggagacagagtattggttggtggcactaaggctggtgtagtccggtttcttggggagaccgactttgccaagggggagtggtgtggcgtggagttagatgagccacttgggaagaatgatggcgctgttgctggaacaaggtattttcagtgtcaacccaaatatggcttgttcgctcctgtccacaaagttaccaagattggcttcccttccactacaccagccaaagccaaggccaacgcagtgaggcgagtgatggcgaccacgtccgccagcctgaagcgcagcccttctgcctcttccctcagctccatgagctcagtggcctcctctgtgagcagcaggcccagtcggacaggactagtaaggcccctttctcactacctgcctccacttcccaggcaggattaaggcccgtggtcagtgcccctgctttgctgctttgctgctttgcttgtccttgtgctgaatgttgctcacagcttttgctgtgaaagtctttgcaagtaagttttgaaaaatgtaactccagcaagaatgcgttttttgaaatcagaaagtgcttttaatagtccctttcagattcttaaaagcttaaaaatgca

SEQ ID NO: 53264 - DNA, 861 bp, Homo sapiens
tgccaaagttaggtgcctgtttgatttcctttccctttgtttggcacggttttattaaatgggcttgttctattgctaaactcctctgctgtacatttatcaggttgtgaaaatatttatttcctttatgcagaatctcagcaacaggtgagcaattctgactctgtgtatcatattgtcaccagtgtgtgttctaaaccatcactgaggttgttagcctacatacatgtgactgctacgtgctggtgtgtaaccccagcttagctgtagaatttccaggaatccaaccgtaagttaggagttgggagaaccttttggttatagttattatttcttgtgattaagttgttttttgttattgttcttattgttctctaaaggtattttcagtgtcaacccaaatatggcttgttcgctcctgtccacaaagttaccaagattggcttcccttccactacaccagccaaagccaaggccaacgcagtgaggcgagtgatggcgaccacgtccgccagcctgaagcgcagcccttctgcctcttccctcagctccatgagctcagtggcctcctctgtgagcagcaggcccagtcggacaggactagttggtggcactaaggctggtgtagtccggtttcttggggagaccgactttgctaagggggagtggttgtggcgtggagttagatgagccacttgggaagaatgatggcgctgttgctggaacaaggtttgttcggcgttgtgcaacatcttgtgtcactcttgtacgtgacgatgctcaggccagtctcaccaagcgtgtatcataacatggaaagtcgtgtttggaagagtggcacttttatttcctaagttcaga

SEQ ID NO: 53265 - DNA, 664 bp, Homo sapiens
ggggacaggtggcggcgaccggcggcgtccgaggagagacagagtctcactcggtcaccaggctggagtgcagtggcacaattataactcactatagccttggactcctggactcaagccgtcctcctgcctcagcctcccaagtagctaggaggtgtgtaccaccacacacatttacattagggtcaggagcctggagattggggttttagtcctagactgttaaatggaggaacattgggaggctctttattttctgcgtgctaagtagtaggaatataaatctgcactcagactgagctgtgcaaaggcattcataattgcaggcagttgcatcagagctcagagttccatctctaaaaaaaacattgtcttatgccccaaccttctccctgggttagtttttaatcctgtccttcctttttaaaacttctctaggtacaacctgtattctgtactatgtcatacaccccttaagttttaaatacatataattttcttaagcacagaataatttttcaaaggggtatgtctactcttgactttggaaagataccataaactttgtatttactgtcagtgtcttattgtgtgatattctcaaatcaacacttaaggttagcaggctaattttataaattgctctgtaaggtttgtctcagtt

SEQ ID NO: 53266 - DNA, 362 bp, Homo sapiens
aataaaaaaaatactttaaatgtgggataatgcactacttatactggaagctcacagacttggccataattagttcttgcttaatttttaaattttttgcaagtgttcttgtctcttcagtttcttctgataaattttctgatttcacacattaacatttgtagtgatgatcaggagaaacagtccaagaagaaacctcgcctcttctgtgacatttgtgactgctttgatctccacgacacagaggattgtcctacccaggcacagatgtcagaggaccctccccattccacacaccatggcagtcggggtgaggaacgcccatactgtgaaatctgtgagatgtttggacactgggccac

SEQ ID NO: 53267 - DNA, 376 bp, Homo sapiens
gcctcctttcgttcaaaccctcagcctaagctaaacaactgtgtttcaggtcacagtgctcaggggagaaaacgcctctgccaagtccttgcattcagttgttcagactctagagtctgataaggtgaagctcgagctcaaggtaaagaacttggagcttcaactcaaagaaaacaagaggcagctcagcagctcctcaggtaaagggcgcctgcccagtgcttctctgtacaccccgcgtcctcccgaggagccctttctagtagagatgctcttcgaagacagctctcatgctgccctgaccctgactctccttagctcttccaccacttaatcaatcaagggctaatcccatgtgcctgccatccccgttcct

SEQ ID NO: 53268 - DNA, 395 bp, Homo sapiens
aaccctcagcctaagctaaacaactgtgtttcaggtcacagtgctcaggggagaaaacgcctctgccaagtccttgcattcagttgttcagactctagagtctgataaggtgaagctcgagctcaaggtaaagaacttggagcttcaactcaaagaaaacaagaggcagctcagcagctcctcaggtaaagggcgcctgcccagtgcttctctgtacaccccgcgtcctcccgaggagccctttctagtagagatgctcttcgaagacagctctcatgctgccctgaccctgactctccttagctcttccaccacttaatcaatcaagggctaatcccatgtgcctgccatccccgttcctggggcttcttgtggtctgtcaatattgtcacaaa

SEQ ID NO: 53269 - DNA, 400 bp, Homo sapiens
cagatagcctggactgcaggcacgcgacaccatacctggctaattttttgtagagatggagttttgccgtgttgcccaggctggttttgaactcctgggctcaagtgatcttcctgcctcagcctcccaaagtgctgagattgcaggtgtgaaccaccttggctggggaggtcagttttaacttgccttgagattgactctttgatctcactgctgtatataataatttagaaacatttattcatcagtttacattagggtcaggagcctggagattggggttttagtcctagactgttaagtaagtatgaccttgacaagtgatttcactttttagaatcagttttcttgttggtaaaatgagagagttgaactagattgctacagtctcttctgattc

SEQ ID NO: 53270 - DNA, 5935 bp, Homo sapiens
gaggcggcggccgcggcggctgctgctgctgcagtgggacaggtggcggcgaccggcggcgtccgaggagatttaatccagagactgacttcactatagaacccacagttgtatcaatggttggggaaagatagtggcaacaggcaaaggagaaacagctctgacatacaaagaaaatgagtatgctaaagccaagtgggcttaaggcccccaccaagatcctgaagcctggaagcacagctctgaagacacctacggctgttgtagctccagtagaaaaaaccatatccagtgaaaaagcatcaagcactccatcatctgagactcaggaggaatttgtggatgactttcgagttggggagcgagtttgggtgaatggaaataagcctggatttatccagtttcttggagaaacccagtttgcaccaggccagtgggctggaattgttttagatgaacccataggcaagaacgatggttcggtggcaggagttcggtatttccagtgtgaacctttaaagggcatatttacccgaccttcaaagttaacaaggaaggtgcaagcagaagatgaagctaatggcctgcagacaacgcccgcctcccgagctacttcaccgctgtgcacttctacggccagcatggtgtcttcctccccctccaccccttcaaacatccctcagaaaccatcacagccagcagcaaaggaaccttcagctacgcctccgatcagcaaccttacaaaaactgccagtgaatctatctccaacctttcagaggctggctcaatcaagaaaggagaaagagagctcaaaatcggagacagagtattggttggtggcactaaggctggtgtagtccggtttcttggggagaccgactttgccaagggggagtggtgtggcgtggagttagatgagccacttgggaagaatgatggcgctgttgctggaacaaggtattttcagtgtcaacccaaatatggcttgttcgctcctgtccacaaagttaccaagattggcttcccttccactacaccagccaaagccaaggccaacgcagtgaggcgagtgatggcgaccacgtccgccagcctgaagcgcagcccttctgcctcttccctcagctccatgagctcagtggcctcctctgtgagcagcaggcccagtcggacaggactattgactgaaacctcctcccgttacgccaggaagatctccggtaccactgccctccaggaggccctgaaggagaagcagcagcacattgagcagctgctggcggaacgggatctggagagggcggaggtggccaaggccacgagccacgtgggggagatagagcaggagctagctctggcccgggacggacatgaccagcatgtcctggaattggaagccaaaatggaccagctgcgaacaatggtggaagctgctgacagggagaaggtggagcttctcaaccagcttgaagaggagaaaaggaaggttgaggaccttcagttccgggttgaagaagaatcaattaccaaaggtgatcttgagacgcagaccaaactggagcatgcccgcattaaggagcttgaacagagcctgctctttgaaaagaccaaagctgacaaactccagagggagttagaagacactagggtggctacagtttcagaaaagtcacgtataatggaactggagaaagacctagcattgagagtacaggaagtagctgagctccgaagaaggctagagtccaataagcctgctggggatgtggacatgtcactttcccttttgcaagagataagctctttgcaagaaaagttagaagtcacccgtactgaccaccagagagaaataacttctctgaaggagcattttggagcccgggaagaaactcatcagaaggagataaaggctctgtataccgccacggaaaagctttccaaagagaacgagtcattgaaaagcaagctggagcatgccaacaaagagaactcagatgtgatagctctatggaagtccaaactggagactgccatcgcatcccaccagcaggcgatggaagaactgaaggtatctttcagcaaagggcttggaacagagacggcagaatttgctgaactaaaaacacaaatagagaaaatgagactagattaccaacacgaaatagaaaatttgcagaatcaacaagactctgaacgggctgcccatgctaaagagatggaagccttgagggctaaactgatgaaagttattaaagaaaaggaaaacagtctggaagccatcaggtcgaaactggacaaagcagaagaccagcatctcgtagaaatggaagacacgttaaacaaattacaggaagctgaaataaaggtaaaggagctagaggtactgcaagccaaatgcaatgaacaaaccaaggttattgataattttacatcacagctcaaggctactgaagaaaagctcttggatcttgatgcacttcggaaagccagttccgaaggtaaatcggaaatgaagaaacttagacagcagcttgaggcagctgagaaacagattaaacatttagagattgaaaagaatgctgaaagtagcaaggctagtagcattaccagagagctccaggggagagagctaaagcttactaaccttcaggaaaatttgagtgaagtcagtcaagtgaaagagactttggaaaaagaacttcagattttgaaagaaaagtttgctgaagcttcagaggaggcagtctctgttcagagaagtatgcaagaaactgtaaataagttacaccaaaaggaggaacagtttaacatgctgtcttctgacttggagaagctgagagaaaacttagcagatatggaggcaaaatttagagagaaagatgagagagaagagcagctgataaaggcaaaggaaaaactggaaaatgacattgcagaaataatgaagatgtcaggagataactcttctcagctgacaaaaatgaacgatgaattacgtctgaaagaaagagatgtagaagaattacagctaaaacttacaaaggctaatgaaaatgcaagttttctgcaaaaaagtattgaggacatgactgtcaaagctgaacagagccagcaagaagcagctaaaaagcatgaggaagaaaagaaagaattggagaggaaattgtcggacctggaaaagaaaatggaaacaagccacaaccagtgtcaggagctgaaagccaggtatgagagagccacttctgagacaaaaaccaagcatgaagaaatcctacagaacctccagaagacgctgctggacacagaggacaagctgaagggcgcacgggaggagaacagtggcttgctgcaggagctggaggagctgagaaagcaagccgacaaagccaaagctgctcaaacagcggaagatgccatgcagataatggaacagatgaccaaagagaagactgagactctggcctccttggaggacaccaagcaaacaaatgcaaaactacagaatgaattggacacacttaaagaaaacaacttgaaaaatgtggaagagctgaacaaatcaaaagaactcctgactgtagagaatcaaaaaatggaagaatttaggaaagaaatagaaaccctaaagcaggcagcagctcagaagtcccagcagctttcagcgttgcaagaagagaacgttaaacttgctgaggagctggggagaagcagggacgaagtcacaagtcatcaaaagctggaagaagaaagatctgtgctcaataatcagttgttagaaatgaaaaaaagagaatccaagttcataaaagacgcagatgaagagaaagcttccttgcagaaatccatcagtataactagtgccttactcacagaaaaggatgccgagctggagaaactgagaaatgaggtcacagtgctcaggggagaaaacgcctctgccaagtccttgcattcagttgttcagactctagagtctgataaggtgaagctcgagctcaaggtaaagaacttggagcttcaactcaaagaaaacaagaggcagctcagcagctcctcaggtaatacagacactcaggcagacgaggatgaaagagcccaggagagtcagattgatttcctaaattcagtaatagtggaccttcaaaggaagaatcaagacctcaagatgaaggtggagatgatgtcagaagcagccctgaatgggaacggggatgacctaaacaattatgacagtgatgatcaggagaaacagtccaagaagaaacctcgcctcttctgtgacatttgtgactgctttgatctccacgacacagaggattgtcctacccaggcacagatgtcagaggaccctccccattccacacaccatggcagtcggggtgaggaacgcccatactgtgaaatctgtgagatgtttggacactgggccaccaactgcaatgacgacgaaaccttctgatgaagcctccagtggagaactgggcttgctcagacgcactcgcattgacacaacgtaacaccagcattgtgtgtgcagacttcaggagaactcatgttattttttaaccccgtcaacaaatctaggaaaatattttgatcttcaacaaattgccctttagtctccccgtatgagttagaataataaatatttagtaggtgagttttcacctcgaattttgttttcttgatttttacgtttgaagacattgcaccagatgccattacatttattggccccccgaccttgtagaaaaacccctaccctcacaataccttatttaagtaactttaaattatgccgttacttttcatatttgcactaagatatttccaggctgcatttgtatatttagattttttggttaagctttgacactggaatgagttgaaaaaatgtgccattttgcattttcatctactcatttaaagtattttattcttattcaaagaaatatctgagctctttgcactacctgttatcagtagtgcctttacttcaggcttgataatacttaggtgtgattataaaatcatgaagcaggtaaagggaggggcaagcccccaaactgctgtggggacattttataatctatatgctgcacccacttaatctactgtggtgttttgtttattagttttgcataatttcagcttctatatattgtatgtatatattttttaaaaatctatattttgggaaaaaaacatacacaatgtgtctttctttttggacatttacctttttgaaaaagaaaacacttaaaatgatcattaggacataacagactaggccagacatagcatcttgtggctttgcaaccattttcatttgtttgttttccttttatttcttcaccagatttaaataactggaggaattttctccaatttttttttccttctctggcaggtatccccagcagtcaattaacaataagccagtataaaacacctaaataaccaatctacaatctcccttcacaagtttttttactgtttttagatgaatgtacgatgagaaattcaacgttaataattttggattttcttatcacaaaaaagaaaatgaaggacctcaaagcacctgaacagtttatcgaccagtttgaatctatttatcttcatttgaatgtcttctagaatatgtaaaaagtcataaaatgtatcttccatgctacatgtacaataagaacttctataattgtatatatgcctttgatgtattttcccctcaagattatcaactgtgtgttcgacagtgaatattcaatctggtaccagttgaaatttttggttataaatgtaatacgaattgtttcacaaacagaaaacatgtaaagcagtattaaaatttggccaaacaagtgttctgtatctactttaataaatggttattctttttagaaacaaaaacacagacaacacaacaacaac

SEQ ID NO: 53271 - DNA, 5899 bp, Homo sapiens
gaggcggcggccgcggcggctgctgctgctgcagtgggacaggtggcggcgaccggcggcgtccgaggagatttaatccagagactgacttcactatagaacccacagttgtatcaatggttggggaaagatagtggcaacaggcaaaggagaaacagctctgacatacaaagaaaatgagtatgctaaagccaagtgggcttaaggcccccaccaagatcctgaagcctggaagcacagctctgaagacacctacggctgttgtagctccagtagaaaaaaccatatccagtgaaaaagcatcaagcactccatcatctgagactcaggaggaatttgtggatgactttcgagttggggagcgagtttgggtgaatggaaataagcctggatttatccagtttcttggagaaacccagtttgcaccaggccagtgggctggaattgttttagatgaacccataggcaagaacgatggttcggtggcaggagttcggtatttccagtgtgaacctttaaagggcatatttacccgaccttcaaagttaacaaggaaggtgcaagcagaagatgaagctaatggcctgcagacaacgcccgcctcccgagctacttcaccgctgtgcacttctacggccagcatggtgtcttcctccccctccaccccttcaaacatccctcagaaaccatcacagccagcagcaaaggaaccttcagctacgcctccgatcagcaaccttacaaaaactgccagtgaatctatctccaacctttcagaggctggctcaatcaagaaaggagaaagagagctcaaaatcggagacagagtattggttggtggcactaaggctggtgtagtccggtttcttggggagaccgactttgccaagggggagtggtgtggcgtggagttagatgagccacttgggaagaatgatggcgctgttgctggaacaaggtattttcagtgtcaacccaaatatggcttgttcgctcctgtccacaaagttaccaagattggcttcccttccactacaccagccaaagccaaggccaacgcagtgaggcgagtgatggcgaccacgtccgccagcctgaagcgcagcccttctgcctcttccctcagctccatgagctcagtggcctcctctgtgagcagcaggcccagtcggacaggactattgactgaaacctcctcccgttacgccaggaagatctccggtaccactgccctccaggaggccctgaaggagaagcagcagcacattgagcagctgctggcggaacgggatctggagagggcggaggtggccaaggccacgagccacgtgggggagatagagcaggagctagctctggcccgggacggacatgaccagcatgtcctggaattggaagccaaaatggaccagctgcgaacaatggtggaagctgctgacagggagaaggtggagcttctcaaccagcttgaagaggagaaaaggaaggttgaggaccttcagttccgggttgaagaagaatcaattaccaaaggtgatcttgaggtggctacagtttcagaaaagtcacgtataatggaactggagaaagacctagcattgagagtacaggaagtagctgagctccgaagaaggctagagtccaataagcctgctggggatgtggacatgtcactttcccttttgcaagagataagctctttgcaagaaaagttagaagtcacccgtactgaccaccagagagaaataacttctctgaaggagcattttggagcccgggaagaaactcatcagaaggagataaaggctctgtataccgccacggaaaagctttccaaagagaacgagtcattgaaaagcaagctggagcatgccaacaaagagaactcagatgtgatagctctatggaagtccaaactggagactgccatcgcatcccaccagcaggcgatggaagaactgaaggtatctttcagcaaagggcttggaacagagacggcagaatttgctgaactaaaaacacaaatagagaaaatgagactagattaccaacacgaaatagaaaatttgcagaatcaacaagactctgaacgggctgcccatgctaaagagatggaagccttgagggctaaactgatgaaagttattaaagaaaaggaaaacagtctggaagccatcaggtcgaaactggacaaagcagaagaccagcatctcgtagaaatggaagacacgttaaacaaattacaggaagctgaaataaaggtaaaggagctagaggtactgcaagccaaatgcaatgaacaaaccaaggttattgataattttacatcacagctcaaggctactgaagaaaagctcttggatcttgatgcacttcggaaagccagttccgaaggtaaatcggaaatgaagaaacttagacagcagcttgaggcagctgagaaacagattaaacatttagagattgaaaagaatgctgaaagtagcaaggctagtagcattaccagagagctccaggggagagagctaaagcttactaaccttcaggaaaatttgagtgaagtcagtcaagtgaaagagactttggaaaaagaacttcagattttgaaagaaaagtttgctgaagcttcagaggaggcagtctctgttcagagaagtatgcaagaaactgtaaataagttacaccaaaaggaggaacagtttaacatgctgtcttctgacttggagaagctgagagaaaacttagcagatatggaggcaaaatttagagagaaagatgagagagaagagcagctgataaaggcaaaggaaaaactggaaaatgacattgcagaaataatgaagatgtcaggagataactcttctcagctgacaaaaatgaacgatgaattacgtctgaaagaaagagatgtagaagaattacagctaaaacttacaaaggctaatgaaaatgcaagttttctgcaaaaaagtattgaggacatgactgtcaaagctgaacagagccagcaagaagcagctaaaaagcatgaggaagaaaagaaagaattggagaggaaattgtcggacctggaaaagaaaatggaaacaagccacaaccagtgtcaggagctgaaagccaggtatgagagagccacttctgagacaaaaaccaagcatgaagaaatcctacagaacctccagaagacgctgctggacacagaggacaagctgaagggcgcacgggaggagaacagtggcttgctgcaggagctggaggagctgagaaagcaagccgacaaagccaaagctgctcaaacagcggaagatgccatgcagataatggaacagatgaccaaagagaagactgagactctggcctccttggaggacaccaagcaaacaaatgcaaaactacagaatgaattggacacacttaaagaaaacaacttgaaaaatgtggaagagctgaacaaatcaaaagaactcctgactgtagagaatcaaaaaatggaagaatttaggaaagaaatagaaaccctaaagcaggcagcagctcagaagtcccagcagctttcagcgttgcaagaagagaacgttaaacttgctgaggagctggggagaagcagggacgaagtcacaagtcatcaaaagctggaagaagaaagatctgtgctcaataatcagttgttagaaatgaaaaaaagagaatccaagttcataaaagacgcagatgaagagaaagcttccttgcagaaatccatcagtataactagtgccttactcacagaaaaggatgccgagctggagaaactgagaaatgaggtcacagtgctcaggggagaaaacgcctctgccaagtccttgcattcagttgttcagactctagagtctgataaggtgaagctcgagctcaaggtaaagaacttggagcttcaactcaaagaaaacaagaggcagctcagcagctcctcaggtaatacagacactcaggcagacgaggatgaaagagcccaggagagtcagattgatttcctaaattcagtaatagtggaccttcaaaggaagaatcaagacctcaagatgaaggtggagatgatgtcagaagcagccctgaatgggaacggggatgacctaaacaattatgacagtgatgatcaggagaaacagtccaagaagaaacctcgcctcttctgtgacatttgtgactgctttgatctccacgacacagaggattgtcctacccaggcacagatgtcagaggaccctccccattccacacaccatggcagtcggggtgaggaacgcccatactgtgaaatctgtgagatgtttggacactgggccaccaactgcaatgacgacgaaaccttctgatgaagcctccagtggagaactgggcttgctcagacgcactcgcattgacacaacgtaacaccagcattgtgtgtgcagacttcaggagaactcatgttattttttaaccccgtcaacaaatctaggaaaatattttgatcttcaacaaattgccctttagtctccccgtatgagttagaataataaatatttagtaggtgagttttcacctcgaattttgttttcttgatttttacgtttgaagacattgcaccagatgccattacatttattggccccccgaccttgtagaaaaacccctaccctcacaataccttatttaagtaactttaaattatgccgttacttttcatatttgcactaagatatttccaggctgcatttgtatatttagattttttggttaagctttgacactggaatgagttgaaaaaatgtgccattttgcattttcatctactcatttaaagtattttattcttattcaaagaaatatctgagctctttgcactacctgttatcagtagtgcctttacttcaggcttgataatacttaggtgtgattataaaatcatgaagcaggtaaagggaggggcaagcccccaaactgctgtggggacattttataatctatatgctgcacccacttaatctactgtggtgttttgtttattagttttgcataatttcagcttctatatattgtatgtatatattttttaaaaatctatattttgggaaaaaaacatacacaatgtgtctttctttttggacatttacctttttgaaaaagaaaacacttaaaatgatcattaggacataacagactaggccagacatagcatcttgtggctttgcaaccattttcatttgtttgttttccttttatttcttcaccagatttaaataactggaggaattttctccaatttttttttccttctctggcaggtatccccagcagtcaattaacaataagccagtataaaacacctaaataaccaatctacaatctcccttcacaagtttttttactgtttttagatgaatgtacgatgagaaattcaacgttaataattttggattttcttatcacaaaaaagaaaatgaaggacctcaaagcacctgaacagtttatcgaccagtttgaatctatttatcttcatttgaatgtcttctagaatatgtaaaaagtcataaaatgtatcttccatgctacatgtacaataagaacttctataattgtatatatgcctttgatgtattttcccctcaagattatcaactgtgtgttcgacagtgaatattcaatctggtaccagttgaaatttttggttataaatgtaatacgaattgtttcacaaacagaaaacatgtaaagcagtattaaaatttggcaagaaaaaaaaaaaaaaaaaaaaaaggttgggggggggcgagaaaggttaaaaacattggggggggggcaatggagagagagggaaagtgcaggaagcgggagaaggggggtttcacaaaagcggggggaggtgaacaagggtggt

SEQ ID NO: 53272 - DNA, 6071 bp, Homo sapiens
caggaatatgatatgagaacatagcctttgaatttctctctcaagtttgacttgaaaaatcagcctcagaaacatctttatcttaagatagatttccgttgctctcagaacgtctctcccctgaccttctgttattaagttcatggacatacagcattttagaattaggtgggggctccgaagtctgcgagtgcagctgtgcacagatttaatccagagactgacttcactatagaacccacagttgtatcaatggttggggaaagatagtggcaacaggcaaaggagaaacagctctgacatacaaagaaaatgagtatgctaaagccaagtgggcttaaggcccccaccaagatcctgaagcctggaagcacagctctgaagacacctacggctgttgtagctccagtagaaaaaaccatatccagtgaaaaagcatcaagcactccatcatctgagactcaggaggaatttgtggatgactttcgagttggggagcgagtttgggtgaatggaaataagcctggatttatccagtttcttggagaaacccagtttgcaccaggccagtgggctggaattgttttagatgaacccataggcaagaacgatggttcggtggcaggagttcggtatttccagtgtgaacctttaaagggcatatttacccgaccttcaaagttaacaaggaaggtgcaagcagaagatgaagctaatggcctgcagacaacgcccgcctcccgagctacttcaccgctgtgcacttctacggccagcatggtgtcttcctccccctccaccccttcaaacatccctcagaaaccatcacagccagcagcaaaggaaccttcagctacgcctccgatcagcaaccttacaaaaactgccagtgaatctatctccaacctttcagaggctggctcaatcaagaaaggagaaagagagctcaaaatcggagacagagtattggttggtggcactaaggctggtgtagtccggtttcttggggagaccgactttgccaagggggagtggtgtggcgtggagttagatgagccacttgggaagaatgatggcgctgttgctggaacaaggtattttcagtgtcaacccaaatatggcttgttcgctcctgtccacaaagttaccaagattggcttcccttccactacaccagccaaagccaaggccaacgcagtgaggcgagtgatggcgaccacgtccgccagcctgaagcgcagcccttctgcctcttccctcagctccatgagctcagtggcctcctctgtgagcagcaggcccagtcggacaggactattgactgaaacctcctcccgttacgccaggaagatctccggtaccactgccctccaggaggccctgaaggagaagcagcagcacattgagcagctgctggcggaacgggatctggagagggcggaggtggccaaggccacgagccacgtgggggagatagagcaggagctagctctggcccgggacggacatgaccagcatgtcctggaattggaagccaaaatggaccagctgcgaacaatggtggaagctgctgacagggagaaggtggagcttctcaaccagcttgaagaggagaaaaggaaggttgaggaccttcagttccgggttgaagaagaatcaattaccaaaggtgatcttgagacgcagaccaaactggagcatgcccgcattaaggagcttgaacagagcctgctctttgaaaagaccaaagctgacaaactccagagggagttagaagacactagggtggctacagtttcagaaaagtcacgtataatggaactggagaaagacctagcattgagagtacaggaagtagctgagctccgaagaaggctagagtccaataagcctgctggggatgtggacatgtcactttcccttttgcaagagataagctctttgcaagaaaagttagaagtcacccgtactgaccaccagagagaaataacttctctgaaggagcattttggagcccgggaagaaactcatcagaaggagataaaggctctgtataccgccacggaaaagctttccaaagagaacgagtcattgaaaagcaagctggagcatgccaacaaagagaactcagatgtgatagctctatggaagtccaaactggagactgccatcgcatcccaccagcaggcgatggaagaactgaaggtatctttcagcaaagggcttggaacagagacggcagaatttgctgaactaaaaacacaaatagagaaaatgagactagattaccaacacgaaatagaaaatttgcagaatcaacaagactctgaacgggctgcccatgctaaagagatggaagccttgagggctaaactgatgaaagttattaaagaaaaggaaaacagtctggaagccatcaggtcgaaactggacaaagcagaagaccagcatctcgtagaaatggaagacacgttaaacaaattacaggaagctgaaataaaggtaaaggagctagaggtactgcaagccaaatgcaatgaacaaaccaaggttattgataattttacatcacagctcaaggctactgaagaaaagctcttggatcttgatgcacttcggaaagccagttccgaaggtaaatcggaaatgaagaaacttagacagcagcttgaggcagctgagaaacagattaaacatttagagattgaaaagaatgctgaaagtagcaaggctagtagcattaccagagagctccaggggagagagctaaagcttactaaccttcaggaaaatttgagtgaagtcagtcaagtgaaagagactttggaaaaagaacttcagattttgaaagaaaagtttgctgaagcttcagaggaggcagtctctgttcagagaagtatgcaagaaactgtaaataagttacaccaaaaggaggaacagtttaacatgctgtcttctgacttggagaagctgagagaaaacttagcagatatggaggcaaaatttagagagaaagatgagagagaagagcagctgataaaggcaaaggaaaaactggaaaatgacattgcagaaataatgaagatgtcaggagataactcttctcagctgacaaaaatgaacgatgaattacgtctgaaagaaagagatgtagaagaattacagctaaaacttacaaaggctaatgaaaatgcaagttttctgcaaaaaagtattgaggacatgactgtcaaagctgaacagagccagcaagaagcagctaaaaagcatgaggaagaaaagaaagaattggagaggaaattgtcggacctggaaaagaaaatggaaacaagccacaaccagtgtcaggagctgaaagccaggtatgagagagccacttctgagacaaaaaccaagcatgaagaaatcctacagaacctccagaagacgctgctggacacagaggacaagctgaagggcgcacgggaggagaacagtggcttgctgcaggagctggaggagctgagaaagcaagccgacaaagccaaagctgctcaaacagcggaagatgccatgcagataatggaacagatgaccaaagagaagactgagactctggcctccttggaggacaccaagcaaacaaatgcaaaactacagaatgaattggacacacttaaagaaaacaacttgaaaaatgtggaagagctgaacaaatcaaaagaactcctgactgtagagaatcaaaaaatggaagaatttaggaaagaaatagaaaccctaaagcaggcagcagctcagaagtcccagcagctttcagcgttgcaagaagagaacgttaaacttgctgaggagctggggagaagcagggacgaagtcacaagtcatcaaaagctggaagaagaaagatctgtgctcaataatcagttgttagaaatgaaaaaaagagaatccaagttcataaaagacgcagatgaagagaaagcttccttgcagaaatccatcagtataactagtgccttactcacagaaaaggatgccgagctggagaaactgagaaatgaggtcacagtgctcaggggagaaaacgcctctgccaagtccttgcattcagttgttcagactctagagtctgataaggtgaagctcgagctcaaggtaaagaacttggagcttcaactcaaagaaaacaagaggcagctcagcagctcctcaggtaatacagacactcaggcagacgaggatgaaagagcccaggagagtcagattgatttcctaaattcagtaatagtggaccttcaaaggaagaatcaagacctcaagatgaaggtggagatgatgtcagaagcagccctgaatgggaacggggatgacctaaacaattatgacagtgatgatcaggagaaacagtccaagaagaaacctcgcctcttctgtgacatttgtgactgctttgatctccacgacacagaggattgtcctacccaggcacagatgtcagaggaccctccccattccacacaccatggcagtcggggtgaggaacgcccatactgtgaaatctgtgagatgtttggacactgggccaccaactgcaatgacgacgaaaccttctgatgaagcctccagtggagaactgggcttgctcagacgcactcgcattgacacaacgtaacaccagcattgtgtgtgcagacttcaggagaactcatgttattttttaaccccgtcaacaaatctaggaaaatattttgatcttcaacaaattgccctttagtctccccgtatgagttagaataataaatatttagtaggtgagttttcacctcgaattttgttttcttgatttttacgtttgaagacattgcaccagatgccattacatttattggccccccgaccttgtagaaaaacccctaccctcacaataccttatttaagtaactttaaattatgccgttacttttcatatttgcactaagatatttccaggctgcatttgtatatttagattttttggttaagctttgacactggaatgagttgaaaaaatgtgccattttgcattttcatctactcatttaaagtattttattcttattcaaagaaatatctgagctctttgcactacctgttatcagtagtgcctttacttcaggcttgataatacttaggtgtgattataaaatcatgaagcaggtaaagggaggggcaagcccccaaactgctgtggggacattttataatctatatgctgcacccacttaatctactgtggtgttttgtttattagttttgcataatttcagcttctatatattgtatgtatatattttttaaaaatctatattttgggaaaaaaacatacacaatgtgtctttctttttggacatttacctttttgaaaaagaaaacacttaaaatgatcattaggacataacagactaggccagacatagcatcttgtggctttgcaaccattttcatttgtttgttttccttttatttcttcaccagatttaaataactggaggaattttctccaatttttttttccttctctggcaggtatccccagcagtcaattaacaataagccagtataaaacacctaaataaccaatctacaatctcccttcacaagtttttttactgtttttagatgaatgtacgatgagaaattcaacgttaataattttggattttcttatcacaaaaaagaaaatgaaggacctcaaagcacctgaacagtttatcgaccagtttgaatctatttatcttcatttgaatgtcttctagaatatgtaaaaagtcataaaatgtatcttccatgctacatgtacaataagaacttctataattgtatatatgcctttgatgtattttcccctcaagattatcaactgtgtgttcgacagtgaatattcaatctggtaccagttgaaatttttggttataaatgtaatacgaattgtttcacaaacagaaaacatgtaaagcagtattaaaatttggccaaacaagtgttctgtatctactttaataaatggttattctttttagaaacaaaaacacagacaacacaacaacaac

SEQ ID NO: 53273 - DNA, 5885 bp, Homo sapiens
gaggcggcggccgcggcggctgctgctgctgcagtgggacaggtggcggcgaccggcggcgtccgaggagatttaatccagagactgacttcactatagaacccacagttgtatcaatggttggggaaagatagtggcaacaggcaaaggagaaacagctctgacatacaaagaaaatgagtatgctaaagccaagtgggcttaaggcccccaccaagatcctgaagcctggaagcacagctctgaagacacctacggctgttgtagctccagtagaaaaaaccatatccagtgaaaaagcatcaagcactccatcatctgagactcaggaggaatttgtggatgactttcgagttggggagcgagtttgggtgaatggaaataagcctggatttatccagtttcttggagaaacccagtttgcaccaggccagtgggctggaattgttttagatgaacccataggcaagaacgatggttcggtggcaggagttcggtatttccagtgtgaacctttaaagggcatatttacccgaccttcaaagttaacaaggaaggtgcaagcagaagatgaagctaatggcctgcagacaacgcccgcctcccgagctacttcaccgctgtgcacttctacggccagcatggtgtcttcctccccctccaccccttcaaacatccctcagaaaccatcacagccagcagcaaaggaaccttcagctacgcctccgatcagcaaccttacaaaaactgccagtgaatctatctccaacctttcagaggctggctcaatcaagaaaggagaaagagagctcaaaatcggagacagagtattggttggtggcactaaggctggtgtagtccggtttcttggggagaccgactttgccaagggggagtggtgtggcgtggagttagatgagccacttgggaagaatgatggcgctgttgctggaacaaggtattttcagtgtcaacccaaatatggcttgttcgctcctgtccacaaagttaccaagattggcttcccttccactacaccagccaaagccaaggccaacgcagtgaggcgagtgatggcgaccacgtccgccagcctgaagcgcagcccttctgcctcttccctcagctccatgagctcagtggcctcctctgtgagcagcaggcccagtcggacaggactattgactgaaacctcctcccgttacgccaggaagatctccggtaccactgccctccaggaggccctgaaggagaagcagcagcacattgagcagctgctggcggaacgggatctggagagggcggaggtggccaaggccacgagccacgtgggggagatagagcaggagctagctctggcccgggacggacatgaccagcatgtcctggaattggaagccaaaatggaccagctgcgaacaatggtggaagctgctgacagggagaaggtggagcttctcaaccagcttgaagaggagaaaaggaaggttgaggaccttcagttccgggttgaagaagaatcaattaccaaaggtgatcttgagacgcagaccaaactggagcatgcccgcattaaggagcttgaacagagcctgctctttgaaaagaccaaagctgacaaactccagagggagttagaagacactagggtggctacagtttcagaaaagtcacgtataatggaactggagaaagacctagcattgagagtacaggaagtagctgagctccgaagaaggctagagtccaataagcctgctggggatgtggacatgtcactttcccttttgcaagagataagctctttgcaagaaaagttagaagtcacccgtactgaccaccagagagaaataacttctctgaaggagcattttggagcccgggaagaaactcatcagaaggagataaaggctctgtataccgccacggaaaagctttccaaagagaacgagtcattgaaaagcaagctggagcatgccaacaaagagaactcagatgtgatagctctatggaagtccaaactggagactgccatcgcatcccaccagcaggcgatggaagaactgaaggtatctttcagcaaagggcttggaacagagacggcagaatttgctgaactaaaaacacaaatagagaaaatgagactagattaccaacacgaaatagaaaatttgcagaatcaacaagactctgaacgggctgcccatgctaaagagatggaagccttgagggctaaactgatgaaagttattaaagaaaaggaaaacagtctggaagccatcaggtcgaaactggacaaagcagaagaccagcatctcgtagaaatggaagacacgttaaacaaattacaggaagctgaaataaaggtaaaggagctagaggtactgcaagccaaatgcaatgaacaaaccaaggttattgataattttacatcacagctcaaggctactgaagaaaagctcttggatcttgatgcacttcggaaagccagttccgaaggtaaatcggaaatgaagaaacttagacagcagcttgaggcagctgagaaacagattaaacatttagagattgaaaagaatgctgaaagtagcaaggctagtagcattaccagagagctccaggggagagagctaaagcttactaaccttcaggaaaatttgagtgaagtcagtcaagtgaaagagactttggaaaaagaacttcagattttgaaagaaaagtttgctgaagcttcagaggaggcagtctctgttcagagaagtatgcaagaaactgtaaataagttacaccaaaaggaggaacagtttaacatgctgtcttctgacttggagaagctgagagaaaacttagcagatatggaggcaaaatttagagagaaagatgagagagaagagcagctgataaaggcaaaggaaaaactggaaaatgacattgcagaaataatgaagatgtcaggagataactcttctcagctgacaaaaatgaacgatgaattacgtctgaaagaaagagatgtagaagaattacagctaaaacttacaaaggctaatgaaaatgcaagttttctgcaaaaaagtattgaggacatgactgtcaaagctgaacagagccagcaagaagcagctaaaaagcatgaggaagaaaagaaagaattggagaggaaattgtcggacctggaaaagaaaatggaaacaagccacaaccagtgtcaggagctgaaagccaggtatgagagagccacttctgagacaaaaaccaagcatgaagaaatcctacagaacctccagaagacgctgctggacacagaggacaagctgaagggcgcacgggaggagaacagtggcttgctgcaggagctggaggagctgagaaagcaagccgacaaagccaaagctgctcaaacagcggaagatgccatgcagataatggaacagatgaccaaagagaagactgagactctggcctccttggaggacaccaagcaaacaaatgcaaaactacagaatgaattggacacacttaaagaaaacaacttgaaaaatgtggaagagctgaacaaatcaaaagaactcctgactgtagagaatcaaaaaatggaagaatttaggaaagaaatagaaaccctaaagcaggcagcagctcagaagtcccagcagctttcagcgttgcaagaagagaacgttaaacttgctgaggagctggggagaagcagggacgaagtcacaagtcatcaaaagctggaagaagaaagatctgtgctcaataatcagttgttagaaatgaaaaaaagagaatccaagttcataaaagacgcagatgaagagaaagcttccttgcagaaatccatcagtataactagtgccttactcacagaaaaggatgccgagctggagaaactgagaaatgaggtcacagtgctcaggggagaaaacgcctctgccaagtccttgcattcagttgttcagactctagagtctgataaggtgaagctcgagctcaaggtaaagaacttggagcttcaactcaaagaaaacaagaggcagctcagcagctcctcagattgatttcctaaattcagtaatagtggaccttcaaaggaagaatcaagacctcaagatgaaggtggagatgatgtcagaagcagccctgaatgggaacggggatgacctaaacaattatgacagtgatgatcaggagaaacagtccaagaagaaacctcgcctcttctgtgacatttgtgactgctttgatctccacgacacagaggattgtcctacccaggcacagatgtcagaggaccctccccattccacacaccatggcagtcggggtgaggaacgcccatactgtgaaatctgtgagatgtttggacactgggccaccaactgcaatgacgacgaaaccttctgatgaagcctccagtggagaactgggcttgctcagacgcactcgcattgacacaacgtaacaccagcattgtgtgtgcagacttcaggagaactcatgttattttttaaccccgtcaacaaatctaggaaaatattttgatcttcaacaaattgccctttagtctccccgtatgagttagaataataaatatttagtaggtgagttttcacctcgaattttgttttcttgatttttacgtttgaagacattgcaccagatgccattacatttattggccccccgaccttgtagaaaaacccctaccctcacaataccttatttaagtaactttaaattatgccgttacttttcatatttgcactaagatatttccaggctgcatttgtatatttagattttttggttaagctttgacactggaatgagttgaaaaaatgtgccattttgcattttcatctactcatttaaagtattttattcttattcaaagaaatatctgagctctttgcactacctgttatcagtagtgcctttacttcaggcttgataatacttaggtgtgattataaaatcatgaagcaggtaaagggaggggcaagcccccaaactgctgtggggacattttataatctatatgctgcacccacttaatctactgtggtgttttgtttattagttttgcataatttcagcttctatatattgtatgtatatattttttaaaaatctatattttgggaaaaaaacatacacaatgtgtctttctttttggacatttacctttttgaaaaagaaaacacttaaaatgatcattaggacataacagactaggccagacatagcatcttgtggctttgcaaccattttcatttgtttgttttccttttatttcttcaccagatttaaataactggaggaattttctccaatttttttttccttctctggcaggtatccccagcagtcaattaacaataagccagtataaaacacctaaataaccaatctacaatctcccttcacaagtttttttactgtttttagatgaatgtacgatgagaaattcaacgttaataattttggattttcttatcacaaaaaagaaaatgaaggacctcaaagcacctgaacagtttatcgaccagtttgaatctatttatcttcatttgaatgtcttctagaatatgtaaaaagtcataaaatgtatcttccatgctacatgtacaataagaacttctataattgtatatatgcctttgatgtattttcccctcaagattatcaactgtgtgttcgacagtgaatattcaatctggtaccagttgaaatttttggttataaatgtaatacgaattgtttcacaaacagaaaacatgtaaagcagtattaaaatttggccaaacaagtgttctgtatctactttaataaatggttattctttttagaaacaaaaacacagacaacacaacaacaac

SEQ ID NO: 53274 - DNA, 3716 bp, Homo sapiens
cggtgatgtgatgagtcgtgcgtgtgtcgcgtctacagaacaaaaacacgaaggagaaaaaagagaccaagagaaacatgcgaccatggggcttgtctgattataagacgatccgcgctcgtatgtcaatgacgcgggtatggaaccgtaacatcagggtgattagtgtagggtgaggtgcacaccagtcagtccagcactggttggatagtttaatcccgggcagtctctgaagaaaagctcttggatcttgatgcacttcggaaagccagttccgaaggtaaatcggaaatgaagaaacttagacagcagcttgaggcagctgagaaacagattaaacatttagagattgaaaagaatgctgaaagtagcaaggctagtagcattaccagagagctccaggggagagagctaaagcttactaaccttcaggaaaatttgagtgaagtcagtcaagtgaaagagactttggaaaaagaacttcagattttgaaagaaaagtttgctgaagcttcagaggaggcagtctctgttcagagaagtatgcaagaaactgtaaataagttacaccaaaaggaggaacagtttaacatgctgtcttctgacttggagaagctgagagaaaacttagcagatatggaggcaaaatttagagagaaagatgagagagaagagcagctgataaaggcaaaggaaaaactggaaaatgacattgcagaaataatgaagatgtcaggagataactcttctcagctgacaaaaatgaacgatgaattacgtctgaaagaaagagatgtagaagaattacagctaaaacttacaaaggctaatgaaaatgcaagttttctgcaaaaaagtattgaggacatgactgtcaaagctgaacagagccagcaagaagcagctaaaaagcatgaggaagaaaagaaagaattggagaggaaattgtcggacctggaaaagaaaatggaaacaagccacaaccagtgtcaggagctgaaagccaggtatgagagagccacttctgagacaaaaaccaagcatgaagaaatcctacagaacctccagaagacgctgctggacacagaggacaagctgaagggcgcacgggaggagaacagtggcttgctgcaggagctggaggagctgagaaagcaagccgacaaagccaaagctgctcaaacagcggaagatgccatgcagataatggaacagatgaccaaagagaagactgagactctggcctccttggaggacaccaagcaaacaaatgcaaaactacagaatgaattggacacacttaaagaaaacaacttgaaaaatgtggaagagctgaacaaatcaaaagaactcctgactgtagagaatcaaaaaatggaagaatttaggaaagaaatagaaaccctaaagcaggcagcagctcagaagtcccagcagctttcagcgttgcaagaagagaacgttaaacttgctgaggagctggggagaagcagggacgaagtcacaagtcatcaaaagctggaagaagaaagatctgtgctcaataatcagttgttagaaatgaaaaaaagagaatccaagttcataaaagacgcagatgaagagaaagcttccttgcagaaatccatcagtataactagtgccttactcacagaaaaggatgccgagctggagaaactgagaaatgaggtcacagtgctcaggggagaaaacgcctctgccaagtccttgcattcagttgttcagactctagagtctgataaggtgaagctcgagctcaaggtaaagaacttggagcttcaactcaaagaaaacaagaggcagctcagcagctcctcaggtaatacagacactcaggcagacgaggatgaaagagcccaggagagtcagattgatttcctaaattcagtaatagtggaccttcaaaggaagaatcaagacctcaagatgaaggtggagatgatgtcagaagcagccctgaatgggaacggggatgacctaaacaattatgacagtgatgatcaggagaaacagtccaagaagaaacctcgcctcttctgtgacatttgtgactgctttgatctccacgacacagaggattgtcctacccaggcacagatgtcagaggaccctccccattccacacaccatggcagtcggggtgaggaacgcccatactgtgaaatctgtgagatgtttggacactgggccaccaactgcaatgacgacgaaaccttctgatgaagcctccagtggagaactgggcttgctcagacgcactcgcattgacacaacgtaacaccagcattgtgtgtgcagacttcaggagaactcatgttattttttaaccccgtcaacaaatctaggaaaatattttgatcttcaacaaattgccctttagtctccccgtatgagttagaataataaatatttagtaggtgagttttcacctcgaattttgttttcttgatttttacgtttgaagacattgcaccagatgccattacatttattggccccccgaccttgtagaaaaacccctaccctcacaataccttatttaagtaactttaaattatgccgttacttttcatatttgcactaagatatttccaggctgcatttgtatatttagattttttggttaagctttgacactggaatgagttgaaaaaatgtgccattttgcattttcatctactcatttaaagtattttattcttattcaaagaaatatctgagctctttgcactacctgttatcagtagtgcctttacttcaggcttgataatacttaggtgtgattataaaatcatgaagcaggtaaagggaggggcaagcccccaaactgctgtggggacattttataatctatatgctgcacccacttaatctactgtggtgttttgtttattagttttgcataatttcagcttctatatattgtatgtatatattttttaaaaatctatattttgggaaaaaaacatacacaatgtgtctttctttttggacatttacctttttgaaaaagaaaacacttaaaatgatcattaggacataacagactaggccagacatagcatcttgtggctttgcaaccattttcatttgtttgttttccttttatttcttcaccagatttaaataactggaggaattttctccaatttttttttccttctctggcaggtatccccagcagtcaattaacaataagccagtataaaacacctaaataaccaatctacaatctcccttcacaagtttttttactgtttttagatgaatgtacgatgagaaattcaacgttaataattttggattttcttatcacaaaaaagaaaatgaaggacctcaaagcacctgaacagtttatcgaccagtttgaatctatttatcttcatttgaatgtcttctagaatatgtaaaaagtcataaaatgtatcttccatgctacatgtacaataagaacttctataattgtatatatgcctttgatgtattttcccctcaagattatcaactgtgtgttcgacagtgaatattcaatctggtaccagttgaaatttttggttataaatgtaatacgaattgtttcacaaacagaaaacatgtaaagcagtattaaaatttggccaaacaagtgttctgtatctactttaataaatggttattctttttagaaacaaaaacacagacaacacaacaacaac

SEQ ID NO: 53275 - DNA, 3444 bp, Homo sapiens
tgctctgaagaaggagcttcaagagagaaaaaaggaaaaccaagaactagtggccagcaagtgcgacctctctttgatgctgaaagaggctcaaaataccaaaaagaatctggaaaaagaacacactcacatattgcaagcaaaggagagtttggatgctcaacttaacacgtgttgttccgagaagaacattttgctgagagatggcttgaacctgcaagaagagtgtcacaaattaagcaaggagatccaggaaatgcagcagtccttaatcctggaacaggaagccagagcaaaggagagcgagtcatccttgtacgaaaacaatcaacttcacgggaggatggtgctcctggagcaggaggtggaggagttaagagtgtgtatcgaggagctgcagtccgagaagtttgtgctacttcaagagaagagcaaatcagagcaagaactggcagagataatcgaggagaaggaactgttgactgcagaagcagctcaacttgctgcccatataaagactctgaaaagtgattttgctgccttgtccaaatccaaggcagagctgcaggaactgcacagctgcctcaccaagattctggatgaccttcagcggaaccatgaggtgaccctggccgaaaaagcccaggtgatgcaagacaaccagaacctcctggctgagaagagcgaaatgatgctggaaaaggatgagctcctgaaggagaaggaaaccctggcagaaagctacttcatccttcagaaagagatcagccagttggccaaaaccaacagccatatttcagccaatctcctagaatctcaaaatgaaaaccgtactttgagaaaagacaagaacaagcttactcttaaaattagagagctcgagactcttcagtcatttacggctgctcaaacagcggaagatgccatgcagataatggaacagatgaccaaagagaagactgagactctggcctccttggaggacaccaagcaaacaaatgcaaaactacagaatgaattggacacacttaaagaaaacaacttgaaaaatgtggaagagctgaacaaatcaaaagaactcctgactgtagagaatcaaaaaatggaagaatttaggaaagaaatagaaaccctaaagcaggcagcagctcagaagtcccagcagctttcagcgttgcaagaagagaacgttaaacttgctgaggagctggggagaagcagggacgaagtcacaagtcatcaaaagctggaagaagaaagatctgtgctcaataatcagttgttagaaatgaaaaaaagagaatccaagttcataaaagacgcagatgaagagaaagcttccttgcagaaatccatcagtataactagtgccttactcacagaaaaggatgccgagctggagaaactgagaaatgaggtcacagtgctcaggggagaaaacgcctctgccaagtccttgcattcagttgttcagactctagagtctgataaggtgaagctcgagctcaaggtaaagaacttggagcttcaactcaaagaaaacaagaggcagctcagcagctcctcaggtaatacagacactcaggcagacgaggatgaaagagcccaggagagtcagattgatttcctaaattcagtaatagtggaccttcaaaggaagaatcaagacctcaagatgaaggtggagatgatgtcagaagcagccctgaatgggaacggggatgacctaaacaattatgacagtgatgatcaggagaaacagtccaagaagaaacctcgcctcttctgtgacatttgtgactgctttgatctccacgacacagaggattgtcctacccaggcacagatgtcagaggaccctccccattccacacaccatggcagtcggggtgaggaacgcccatactgtgaaatctgtgagatgtttggacactgggccaccaactgcaatgacgacgaaaccttctgatgaagcctccagtggagaactgggcttgctcagacgcactcgcattgacacaacgtaacaccagcattgtgtgtgcagacttcaggagaactcatgttattttttaaccccgtcaacaaatctaggaaaatattttgatcttcaacaaattgccctttagtctccccgtatgagttagaataataaatatttagtaggtgagttttcacctcgaattttgttttcttgatttttacgtttgaagacattgcaccagatgccattacatttattggccccccgaccttgtagaaaaacccctaccctcacaataccttatttaagtaactttaaattatgccgttacttttcatatttgcactaagatatttccaggctgcatttgtatatttagattttttggttaagctttgacactggaatgagttgaaaaaatgtgccattttgcattttcatctactcatttaaagtattttattcttattcaaagaaatatctgagctctttgcactacctgttatcagtagtgcctttacttcaggcttgataatacttaggtgtgattataaaatcatgaagcaggtaaagggaggggcaagcccccaaactgctgtggggacattttataatctatatgctgcacccacttaatctactgtggtgttttgtttattagttttgcataatttcagcttctatatattgtatgtatatattttttaaaaatctatattttgggaaaaaaacatacacaatgtgtctttctttttggacatttacctttttgaaaaagaaaacacttaaaatgatcattaggacataacagactaggccagacatagcatcttgtggctttgcaaccattttcatttgtttgttttccttttatttcttcaccagatttaaataactggaggaattttctccaatttttttttccttctctggcaggtatccccagcagtcaattaacaataagccagtataaaacacctaaataaccaatctacaatctcccttcacaagtttttttactgtttttagatgaatgtacgatgagaaattcaacgttaataattttggattttcttatcacaaaaaagaaaatgaaggacctcaaagcacctgaacagtttatcgaccagtttgaatctatttatcttcatttgaatgtcttctagaatatgtaaaaagtcataaaatgtatcttccatgctacatgtacaataagaacttctataattgtatatatgcctttgatgtattttcccctcaagattatcaactgtgtgttcgacagtgaatattcaatctggtaccagttgaaatttttggttataaatgtaatacgaattgtttcacaaacagaaaacatgtaaagcagtattaaaatttggccaaacaagtgttctgtatctactttaataaatggttattctttttagaaacaaaaacacagacaacacaacaacaac

SEQ ID NO: 53276 - DNA, 3486 bp, Homo sapiens
gaggcggcggccgcggcggctgctgctgctgcagtgggacaggtggcggcgaccggcggcgtccgaggagatttaatccagagactgacttcactatagaacccacagttgtatcaatggttggggaaagatagtggcaacaggcaaaggagaaacagctctgacatacaaagaaaatgagtatgctaaagccaagtgggcttaaggcccccaccaagatcctgaagcctggaagcacagctctgaagacacctacggctgttgtagctccagtagaaaaaaccatatccagtgaaaaagcatcaagcactccatcatctgagactcaggaggaatttgtggatgactttcgagttggggagcgagtttgggtgaatggaaataagcctggatttatccagtttcttggagaaacccagtttgcaccaggccagtgggctggaattgttttagatgaacccataggcaagaacgatggttcggtggcaggagttcggtatttccagtgtgaacctttaaagggcatatttacccgaccttcaaagttaacaaggaaggtgcaagcagaagatgaagctaatggcctgcagacaacgcccgcctcccgagctacttcaccgctgtgcacttctacggccagcatggtgtcttcctccccctccaccccttcaaacatccctcagaaaccatcacagccagcagcaaaggaaccttcagctacgcctccgatcagcaaccttacaaaaactgccagtgaatctatctccaacctttcagaggctggctcaatcaagaaaggagaaagagagctcaaaatcggagacagagtattggttggtggcactaaggctggtgtagtccggtttcttggggagaccgactttgccaagggggagtggtgtggcgtggagttagatgagccacttgggaagaatgatggcgctgttgctggaacaaggtattttcagtgtcaacccaaatatggcttgttcgctcctgtccacaaagttaccaagattggcttcccttccactacaccagccaaagccaaggccaacgcagtgaggcgagtgatggcgaccacgtccgccagcctgaagcgcagcccttctgcctcttccctcagctccatgagctcagtggcctcctctgtgagcagcaggcccagtcggacaggactattgactgaaacctcctcccgttacgccaggaagatctccggtaccactgccctccaggaggccctgaaggagaagcagcagcacattgagcagctgctggcggaacgggatctggagagggcggaggtggccaaggccacgagccacgtgggggagatagagcaggagctagctctggcccgggacggacatgaccagcatgtcctggaattggaagccaaaatggaccagctgcgaacaatggtggaagctgctgacagggagaaggtggagcttctcaaccagcttgaagaggagaaaaggaaggttgaggaccttcagttccgggttgaagaagaatcaattaccaaaggtgatcttgagacgcagaccaaactggagcatgcccgcattaaggagcttgaacagagcctgctctttgaaaagaccaaagctgacaaactccagagggagttagaagacactagggtggctacagtttcagaaaagtcacgtataatggaactggagaaagacctagcattgagagtacaggaagtagctgagctccgaagaaggctagagtccaataagcctgctggggatgtggacatgtcactttcccttttgcaagagataagctctttgcaagaaaagttagaagtcacccgtactgaccaccagagagaaataacttctctgaaggagcattttggagcccgggaagaaactcatcagaaggagataaaggctctgtataccgccacggaaaagctttccaaagagaacgagtcattgaaaagcaagctggagcatgccaacaaagagaactcagatgtgatagctctatggaagtccaaactggagactgccatcgcatcccaccagcaggcgatggaagaactgaaggtatctttcagcaaagggcttggaacagagacggcagaatttgctgaactaaaaacacaaatagagaaaatgagactagattaccaacacgaaatagaaaatttgcagaatcaacaagactctgaacgggctgcccatgctaaagagatggaagccttgagggctaaactgatgaaagttattaaagaaaaggaaaacagtctggaagccatcaggtcgaaactggacaaagcagaagaccagcatctcgtagaaatggaagacacgttaaacaaattacaggaagctgaaataaaggtaaaggagctagaggtactgcaagccaaatgcaatgaacaaaccaaggttattgataattttacatcacagctcaaggctactgaagaaaagctcttggatcttgatgcacttcggaaagccagttccgaaggtaaatcggaaatgaagaaacttagacagcagcttgaggcagctgagaaacagattaaacatttagagattgaaaagaatgctgaaagtagcaaggctagtagcattaccagagagctccaggggagagagctaaagcttactaaccttcaggaaaatttgagtgaagtcagtcaagtgaaagagactttggaaaaagaacttcagattttgaaagaaaagtttgctgaagcttcagaggaggcagtctctgttcagagaagtatgcaagaaactgtaaataagttacaccaaaaggaggaacagtttaacatgctgtcttctgacttggagaagctgagagaaaacttagcagatatggaggcaaaatttagagagaaagatgagagagaagagcagctgataaaggcaaaggaaaaactggaaaatgacattgcagaaataatgaagatgtcaggagataactcttctcagctgacaaaaatgaacgatgaattacgtctgaaagaaagagatgtagaagaattacagctaaaacttacaaaggctaatgaaaatgcaagttttctgcaaaaaagtattgaggacatgactgtcaaagctgaacagagccagcaagaagcagctaaaaagcatgaggaagaaaagaaagaattggagaggaaattgtcggacctggaaaagaaaatggaaacaagccacaaccagtgtcaggagctgaaagccaggtatgagagagccacttctgagacaaaaaccaagcatgaagaaatcctacagaacctccagaagacgctgctggacacagaggacaagctgaagggcgcacgggaggagaacagtggcttgctgcaggagctggaggagctgagaaagcaagccgacaaagccaaagtacgtgacgcgagagaatttccttgtgttgtagcttgcctgagctctgtgtcgaggcaggaagggtgcttagaaagcagcagccagtgggaaa

SEQ ID NO: 53277 - DNA, 2930 bp, Homo sapiens
gaggcggcggccgcggcggctgctgctgctgcagtgggacaggtggcggcgaccggcggcgtccgaggagatttaatccagagactgacttcactatagaacccacagttgtatcaatggttggggaaagatagtggcaacaggcaaaggagaaacagctctgacatacaaagaaaatgagtatgctaaagccaagtgggcttaaggcccccaccaagatcctgaagcctggaagcacagctctgaagacacctacggctgttgtagctccagtagaaaaaaccatatccagtgaaaaagcatcaagcactccatcatctgagactcaggaggaatttgtggatgactttcgagttggggagcgagtttgggtgaatggaaataagcctggatttatccagtttcttggagaaacccagtttgcaccaggccagtgggctggaattgttttagatgaacccataggcaagaacgatggttcggtggcaggagttcggtatttccagtgtgaacctttaaagggcatatttacccgaccttcaaagttaacaaggaaggtgcaagcagaagatgaagctaatggcctgcagacaacgcccgcctcccgagctacttcaccgctgtgcacttctacggccagcatggtgtcttcctccccctccaccccttcaaacatccctcagaaaccatcacagccagcagcaaaggaaccttcagctacgcctccgatcagcaaccttacaaaaactgccagtgaatctatctccaacctttcagaggctggctcaatcaagaaaggagaaagagagctcaaaatcggagacagagtattggttggtggcactaaggctggtgtagtccggtttcttggggagaccgactttgccaagggggagtggtgtggcgtggagttagatgagccacttgggaagaatgatggcgctgttgctggaacaaggtattttcagtgtcaacccaaatatggcttgttcgctcctgtccacaaagttaccaagattggcttcccttccactacaccagccaaagccaaggccaacgcagtgaggcgagtgatggcgaccacgtccgccagcctgaagcgcagcccttctgcctcttccctcagctccatgagctcagtggcctcctctgtgagcagcaggcccagtcggacaggactattgactgaaacctcctcccgttacgccaggaagatctccggtaccactgccctccaggaggccctgaaggagaagcagcagcacattgagcagctgctggcggaacgggatctggagagggcggaggtggccaaggccacgagccacgtgggggagatagagcaggagctagctctggcccgggacggacatgaccagcatgtcctggaattggaagccaaaatggaccagctgcgaacaatggtggaagctgctgacagggagaaggtggagcttctcaaccagcttgaagaggagaaaaggaaggttgaggaccttcagttccgggttgaagaagaatcaattaccaaaggtgatcttgagacgcagaccaaactggagcatgcccgcattaaggagcttgaacagagcctgctctttgaaaagaccaaagctgacaaactccagagggagttagaagacactagggtggctacagtttcagaaaagtcacgtataatggaactggagaaagacctagcattgagagtacaggaagtagctgagctccgaagaaggctagagtccaataagcctgctggggatgtggacatgtcactttcccttttgcaagagataagctctttgcaagaaaagttagaagtcacccgtactgaccaccagagagaaataacttctctgaaggagcattttggagcccgggaagaaactcatcagaaggagataaaggctctgtataccgccacggaaaagctttccaaagagaacgagtcattgaaaagcaagctggagcatgccaacaaagagaactcagatgtgatagctctatggaagtccaaactggagactgccatcgcatcccaccagcaggcgatggaagaactgaaggtatctttcagcaaagggcttggaacagagacggcagaatttgctgaactaaaaacacaaatagagaaaatgagactagattaccaacacgaaatagaaaatttgcagaatcaacaagactctgaacgggctgcccatgctaaagagatggaagccttgagggctaaactgatgaaagttattaaagaaaaggaaaacagtctggaagccatcaggtcgaaactggacaaagcagaagaccagcatctcgtagaaatggaagacacgttaaacaaattacaggaagctgaaataaaggtaaaggagctagaggtactgcaagccaaatgcaatgaacaaaccaaggttattgataattttacatcacagctcaaggctactgaagaaaagctcttggatcttgatgcacttcggaaagccagttccgaaggtaaatcggaaatgaagaaacttagacagcagcttgaggcagctgagaaacagattaaacatttagagattgaaaagaatgctgaaagtagcaaggctagtagcattaccagagagctccaggggagagagctaaagcttactaaccttcaggaaaatttgagtgaagtcagtcaagtgaaagagactttggaaaaagaacttcagattttggtaagtacctgttgggaatctgaatctcagggtttctggccatttcctgttttaaaaaatcctccagtaagaaatattgtagctgtttcctttctctttctaagtgttgattcaacttgagtgtattagttattggctgataaatattgtcctttgaggggaatcggatcaaacccaaacaacaaaggtaggtatactttttttttctaaaacgtggga

SEQ ID NO: 53278 - DNA, 484 bp, Homo sapiens
cctgaccaaggtccaggcgaatgtttgcgggcttcagaaagcccaggcgatcgaaaggcagcttgtgtcactagccaaacgctctgcctttacaatttggtgccctctgtatctctccattttggggccgctgacctggcaggctgcacggagggttacaaactcacagggctccccacagagcatccaggcaaggatcctgcctggctgaggttccctcacatataaaatggggatggccgtgccaacacctgtgccaccccctccctaacagactgccccgaaagacacaggcaatggtgccactgatgggctttgtgggcaacagcacagcgccactcaaatcccagagtgctgctaattaagaccaggtgaccccaaacaaaatgcctgagccaggattagtcttagtcactgctgttattattgttatactaaatccccttttagacatgacttcctgacccttacattttcagctgtc

SEQ ID NO: 53279 - DNA, 462 bp, Homo sapiens
gacatatatgagatcatatagatgggattgaaaaattcaatcctcagctgggcgcggtggctcacgcctgtaatcccagcacactgggagggtgaggcaggcggatcacctgatgtcgagagttcaagaccagcctgaccaacatggagaaaccccgtctctattaaaaatagaaaattagccaggagtggtggtgcatgcctctaatgtcagctacttgggaggctgaggcaggagaattgcttgaacccaggaggcagaggttgtggtaagttgagatggtgccattgcactccagcctgagcgacaagagcgaaactctctctcaaaaaaaaaaaaaaaaatccaatcctggctgggcgcagtggttcatgcctgtcatcacaacactttggaaggccaaggttagaggattgcttgagcccagaagttcaagaccagcctacgcaacatggcaagaaa

SEQ ID NO: 53280 - DNA, 312 bp, Homo sapiens
atcgatgtccctatcaatgttttgagagtttggggaagagccaattaaaaaagcatttagctgggcctgatggcacatgcctataatcccagcaacttgggaggctgagaggcaggaggatcacttgagaccaagagtttaggaccagcctgagcgacaagagcgaaactctctctcaaaaaaaaaaaaaaaaatccaatcctggctgggcgcagtggttcatgcctgtcatcacaacactttggaaggccaaggttagaggattgcttgagcccagaagttcaagaccagcctacgcaacatggcaagaaa

SEQ ID NO: 53281 - DNA, 2383 bp, Homo sapiens
cgcggaaccgcgggtgcgggcaggaggcggcggcagcagcgggaccgagcagcagcggctatgcatccaagtgcggctgggcagccgcggcacccctgaggcccgggaggggctccgggaacacagcgcggaggggacgctagtcgcggaggggacgctagtcccggagtgcgaggaagaggtgtagtgtccagagcggcggcggcggacgtgcgcacggagctgaggagggggcttcggagcgggactgggacggggggggcggctggcgcgagcagccctgggggtggggggcggggtgggccggcggcgcgatgctgggcgtcctggagctgctgctgctgggggctgcgtggctggcgggcccggcccgcgggcagaatgagacggagcccatcgtgctggagggcaagtgcctggtggtgtgcgactccaaccccacgtccgaccccacgggcactgccctgggcatctctgtgcgctctggcagcgccaaggtggctttctctgccatcaggagcaccaaccacgagccgtccgagatgagtaatcgcaccatgatcatctacttcgaccaggtactagtgaacattgggaacaactttgattcagaacgcagcactttcatcgccccgcgcaaagggatctacagttttaacttccacgtggtaaaagtctacaacagacaaaccatacaggtgagcctcatgctaaacgggtggccggtgatttcagccttcgctggtgaccaggacgtgacccgggaggccgccagcaacggagtcctaatccaaatggagaaaggcgaccgagcatacctcaagctggagcggggaaacttgatggggggctggaagtactcgaccttctccggattcctggtgtttcctctctgactggctcgtagccggaagggaggcagggagagggcgaaggcaggaaggggagtgagaaagaggctgaaattaagagggcgagaaagcagcacgacttgaaacttcctacatgttctctaactgtatctgggtaaaaaggtgcgcgccagctgtgggacaactttgtccatttccttattaggagaaataaatttcgcttagctctgcgcactcccatttccaaaaataaactcgcctcccccattccagttgcagtaatcaagaaagagactgccttgtcattgtttcttatcccccaacttcatgttccctgcaatttatttaaagaaactttgtatttcactacataatctgaaatctttctccctagccccctctgaatccttctgcctactgaaatctgatatattacacacccccaaccttttttttttcagtttggaaaggggtaaagttttgttgttgttgttgttttgttttggatggggaaggtagttttaatttggcaagtgttgctcttcttaaaacactgctcaaattaattagctgaagatacttagtatcctcggctgcttgttagcagagaaaggactcaccttagtggtgactggtttaaaaaatataaatatatatcatttgtacacgaagaactcttcccagtggaaactggctgtgtttccgtatttctatgttctattcggagtgatcgtgaaatctaaggctgcttgatgttctgatgcttgtcaatgccgtcgtgctctgtgactccacgaaacgccaaggagcttcttccggacgcctcctcttcctctgtaacatacgtgtgaatagtcaaggtttaattttgctttaatctaataaagtcgaagtgggacttttatttttctgaaacagctttctaaaatccgcatcttccccagctgcgaggttgggggtctggggtgccaaagggcgaggttccgaaaggcaggagacttgggggaacgcaaccatagaaaggcctgggcgcgagggcttccttgcaaagccggccttgcgctccttcctgcgccaggccggggaccagcactgcattcgcctgtgttcacagctttggcggaaacgtaagaaatgtggccgaaatcttgctaggccaggcgcggccgccggcccaggagcgaagtttgatttttttctttgcattccaaatgcatcaggaatagtcccagtttgaggacccaaacgaccctgcctggagcggcagactcctcaggccttctgtccccggatgtctcccaccgcgtccccctcgcagttcccgaagcagcgtatgttttatacaccgcctctgaatccggagtccacccgccgcatactcgggcgcccaggacctatgattccgctcattcacaggactttattcaagaggttcgtccaggagttttgattgtatcggaacataatgtgaaagcaaaaatgaaataaacgacttcgttttaagtctgaaa

SEQ ID NO: 53282 - DNA, 2710 bp, Homo sapiens
  misc_feature (2264)..(2264): n is a, c, g, or t
cgcggaaccgcgggtgcgggcaggaggcggcggcagcagcgggaccgagcagcagcggctatgcatccaagtgcggctgggcagccgcggcacccctgaggcccgggaggggctccgggaacacagcgcggaggggacgctagtcgcggaggggacgctagtcccggagtgcgaggaagaggtgtagtgtccagagcggcggcggcggacgtgcgcacggagctgaggagggggcttcggagcgggactgggacggggggggcggctggcgcgagcagccctgggggtggggggcggggtgggccggcggcgcgatgctgggcgtcctggagctgctgctgctgggggctgcgtggctggcgggcccggcccgcgggcagaatgagacggagcccatcgtgctggagggcaagtgcctggtggtgtgcgactccaaccccacgtccgaccccacgggcactgccctgggcatctctgtgcgctctggcagcgccaaggtggctttctctgccatcaggagcaccaaccacgagccgtccgagatgagtaatcgcaccatgatcatctacttcgaccaggtactagtgaacattgggaacaactttgattcagaacgcagcactttcatcgccccgcgcaaagggatctacagttttaacttccacgtggtaaaagtctacaacagacaaaccatacaggtgagcctcatgctaaacgggtggccggtgatttcagccttcgctggtgaccaggacgtgacccgggaggccgccagcaacggagtcctaatccaaatggagaaaggcgaccgagcatacctcaagctggagcggggaaacttgatggggggctggaagtactcgaccttctccggattcctggtgtttcctctctgactggctcgtagccggaagggaggcagggagagggcgaaggcaggaaggggagtgagaaagaggctgaaattaagagggcgagaaagcagcacgacttgaaacttcctacatgttctctaactgtatctgggtaaaaaggtgcgcgccagctgtgggacaactttgtccatttccttattaggagaaataaatttcgcttagctctgcgcactcccatttccaaaaataaactcgcctcccccattccagttgcagtaatcaagaaagagactgccttgtcattgtttcttatcccccaacttcatgttccctgcaatttatttaaagaaactttgtatttcactacataatctgaaatctttctccctagccccctctgaatccttctgcctactgaaatctgatatattacacacccccaaccttttttttttcagtttggaaaggggtaaagttttgttgttgttgttgttttgttttggatggggaaggtagttttaatttggcaagtgttgctcttcttaaaacactgctcaaattaattagctgaagatacttagtatcctcggctgcttgttagcagagaaaggactcaccttagtggtgactggtttaaaaaatataaatatatatcatttgtacacgaagaactcttcccagtggaaactggctgtgtttccgtatttctatgttctattcggagtgatcgtgaaatctaaggctgcttgatgttctgatgcttgtcaatgccgtcgtgctctgtgactccacgaaacgccaaggagcttcttccggacgcctcctcttcctctgtaacatacgtgtgaatagtcaaggtttaattttgctttaatctaataaagtcgaagtgggacttttgaaaaacaaaagaaaaaaaacaaaaaaaaaaaaaaaaaaaaaaaaaacaaaaaaaaaaaaagaagaagacaaacaacacgacggagaagcgtcacataatagcgcgacctaccaagtggacgcacgaggactagagtgagagagccagcagcatctagggcagcgccgacgttctaccgatcattagtcatacggcgtccaatacacggaaagtctcagaaggatcacctgctctaagatccacgggccatgctccaatactgtctagaggttccaagatacgtcggctccatcgccgtagaagagcacgactcgacgacacagtttcggaacgaatgaagccgatgccgtacactaatgccatgcgttaatagcgcgcgacacactcgacacgtcacacgtggccatgacaccgcaagcgacttccctgcgacacaacacggcctacaaggaacgagtcactgatcacaagtcgagaaacatgtatcncacagcacacatcgtaaactaacttggtagggtaaaccataacacgctgcgagacgtgtcgtacacatgagtcaatatccccgtcacatatctagttctcgcaatccagacatcactcatatatattgaactcagacccactcttgcattaactatagacatccacactcttgcctcttgctacaaccaattatctgtcacatacagactcaacgataatttatcacttcctaagccatacagacttaaacaattaccactacacataataaccaaacatacacaatttctctgatacaatcataatttatcaccctttatattataaaaccatatataccccacaaccacatatagtataactcattatactacatatatacacaatcaatatcacaatttattaatattcacacacaacaattagcaatcacaaatacaacaaa

SEQ ID NO: 53283 - DNA, 4327 bp, Homo sapiens
  misc_feature (56)..(56): n is a, c, g, or t
cgagatcccggggagccagcttgctgggagagcgggacggtccggagcaagcccanaggcagaggaggcgacagagggaaaaagggccgagctagccgctccagtgctgtacaggagccgaagggacgcaccacgccagccccagcccggctccagcgacagccaacgcctcttgcagcgcggcggcttcgaagccgccgcccggagctgccctttcctcttcggtgaagtttttaaaagctgctaaagactcggaggaagcaaggaaagtgcctggtaggactgacggctgcctttgtcctcctcctctccaccccgcctccccccaccctgccttccccccctcccccgtcttctctcccgcagctgcctcagtcggctactctcagccaacccccctcaccacccttctccccacccgcccccccgcccccgtcggcccagcgctgccagcccgagtttgcagagaggtaactccctttggctgcgagcgggcgagctagctgcacattgcaaagaaggctcttaggagccaggcgactggggagcggcttcagcactgcagccacgacccgcctggttagaattccggcggagagaaccctctgttttcccccactctctctccacctcctcctgccttccccaccccgagtgcggagcagagatcaaaagatgaaaaggcagtcaggtcttcagtagccaaaaaacaaaacaaacaaaaacaaaaaagccgaaataaaagaaaaagataataactcagttcttatttgcacctacttcagtggacactgaatttggaaggtggaggattttgtttttttcttttaagatctgggcatcttttgaatctacccttcaagtattaagagacagactgtgagcctagcagggcagatcttgtccaccgtgtgtcttcttctgcacgagactttgaggctgtcagagcgctttttgcgtggttgctcccgcaagtttccttctctggagcttcccgcaggtgggcagctagctgcagcgactaccgcatcatcacagcctgttgaactcttctgagcaagagaaggggaggcggggtaagggaagtaggtggaagattcagccaagctcaaggatggaagtgcagttagggctgggaagggtctaccctcggccgccgtccaagacctaccgaggagctttccagaatctgttccagagcgtgcgcgaagtgatccagaacccgggccccaggcacccagaggccgcgagcgcagcacctcccggcgccagtttgctgctgctgcagcagcagcagcagcagcagcagcagcagcagcagcagcagcagcagcagcagcagcagcagcagcaagagactagccccaggcagcagcagcagcagcagggtgaggatggttctccccaagcccatcgtagaggccccacaggctacctggtcctggatgaggaacagcaaccttcacagccgcagtcggccctggagtgccaccccgagagaggttgcgtcccagagcctggagccgccgtggccgccagcaaggggctgccgcagcagctgccagcacctccggacgaggatgactcagctgccccatccacgttgtccctgctgggccccactttccccggcttaagcagctgctccgctgaccttaaagacatcctgagcgaggccagcaccatgcaactccttcagcaacagcagcaggaagcagtatccgaaggcagcagcagcgggagagcgagggaggcctcgggggctcccacttcctccaaggacaattacttagggggcacttcgaccatttctgacaacgccaaggagttgtgtaaggcagtgtcggtgtccatgggcctgggtgtggaggcgttggagcatctgagtccaggggaacagcttcggggggattgcatgtacgccccacttttgggagttccacccgctgtgcgtcccactccttgtgccccattggccgaatgcaaaggttctctgctagacgacagcgcaggcaagagcactgaagatactgctgagtattcccctttcaagggaggttacaccaaagggctagaaggcgagagcctaggctgctctggcagcgctgcagcagggagctccgggacacttgaactgccgtctaccctgtctctctacaagtccggagcactggacgaggcagctgcgtaccagagtcgcgactactacaactttccactggctctggccggaccgccgccccctccgccgcctccccatccccacgctcgcatcaagctggagaacccgctggactacggcagcgcctgggcggctgcggcggcgcagtgccgctatggggacctggcgagcctgcatggcgcgggtgcagcgggacccggttctgggtcaccctcagccgccgcttcctcatcctggcacactctcttcacagccgaagaaggccagttgtatggaccgtgtggtggtggtgggggtggtggcggcggcggcggcggcggcggcggcggcggcggcggcggcggcggcggcggcgaggcgggagctgtagccccctacggctacactcggccccctcaggggctggcgggccaggaaagcgacttcaccgcacctgatgtgtggtaccctggcggcatggtgagcagagtgccctatcccagtcccacttgtgtcaaaagcgaaatgggcccctggatggatagctactccggaccttacggggacatgcgtttggagactgccagggaccatgttttgcccattgactattactttccaccccagaagacctgcctgatctgtggagatgaagcttctgggtgtcactatggagctctcacatgtggaagctgcaaggtcttcttcaaaagagccgctgaagggaaacagaagtacctgtgcgccagcagaaatgattgcactattgataaattccgaaggaaaaattgtccatcttgtcgtcttcggaaatgttatgaagcagggatgactctgggagcccggaagctgaagaaacttggtaatctgaaactacaggaggaaggagaggcttccagcaccaccagccccactgaggagacaacccagaagctgacagtgtcacacattgaaggctatgaatgtcagcccatctttctgaatgtcctggaagccattgagccaggtgtagtgtgtgctggacacgacaacaaccagcccgactcctttgcagccttgctctctagcctcaatgaactgggagagagacagcttgtacacgtggtcaagtgggccaaggccttgcctggcttccgcaacttacacgtggacgaccagatggctgtcattcagtactcctggatggggctcatggtgtttgccatgggctggcgatccttcaccaatgtcaactccaggatgctctacttcgcccctgatctggttttcaatgagtaccgcatgcacaagtcccggatgtacagccagtgtgtccgaatgaggcacctctctcaagagtttggatggctccaaatcaccccccaggaattcctgtgcatgaaagcactgctactcttcagcattattccagtggatgggctgaaaaatcaaaaattctttgatgaacttcgaatgaactacatcaaggaactcgatcgtatcattgcatgcaaaagaaaaaatcccacatcctgctcaagacgcttctaccagctcaccaagctcctggactccgtgcagcctattgcgagagagctgcatcagttcacttttgacctgctaatcaagtcacacatggtgagcgtggactttccggaaatgatggcagagatcatctctgtgcaagtgcccaagatcctttctgggaaagtcaagcccatctatttccacacccagtgaagcattggaaaccctatttccccaccccagctcatgccccctttcagatgtcttctgcctgttataactctgcactactcctctgcagtgccttggggaatttcctctattgatgtacagtctgtcatgaacatgttcctgaattctatttgctgggctttttttttctctttctctcctttctttttcttcttccctccctatctaaccctcccatggcaccttcagactttgcttcccattgtggctcctatctgtgttttgaatggtgttgtatgcctttaaatctgtgatgatcctcatatggcccagtgtcaagttgtgcttgtttacagcactactctgtgccagccacacaaacgtttacttatcttatgccacgggaagtttagagagctaagattatctggggaaatcaaaacaaaaaacaagcaaacaaaaaaaaaa

SEQ ID NO: 53284 - DNA, 4284 bp, Homo sapiens
  misc_feature (56)..(56): n is a, c, g, or t
cgagatcccggggagccagcttgctgggagagcgggacggtccggagcaagcccanaggcagaggaggcgacagagggaaaaagggccgagctagccgctccagtgctgtacaggagccgaagggacgcaccacgccagccccagcccggctccagcgacagccaacgcctcttgcagcgcggcggcttcgaagccgccgcccggagctgccctttcctcttcggtgaagtttttaaaagctgctaaagactcggaggaagcaaggaaagtgcctggtaggactgacggctgcctttgtcctcctcctctccaccccgcctccccccaccctgccttccccccctcccccgtcttctctcccgcagctgcctcagtcggctactctcagccaacccccctcaccacccttctccccacccgcccccccgcccccgtcggcccagcgctgccagcccgagtttgcagagaggtaactccctttggctgcgagcgggcgagctagctgcacattgcaaagaaggctcttaggagccaggcgactggggagcggcttcagcactgcagccacgacccgcctggttagaattccggcggagagaaccctctgttttcccccactctctctccacctcctcctgccttccccaccccgagtgcggagcagagatcaaaagatgaaaaggcagtcaggtcttcagtagccaaaaaacaaaacaaacaaaaacaaaaaagccgaaataaaagaaaaagataataactcagttcttatttgcacctacttcagtggacactgaatttggaaggtggaggattttgtttttttcttttaagatctgggcatcttttgaatctacccttcaagtattaagagacagactgtgagcctagcagggcagatcttgtccaccgtgtgtcttcttctgcacgagactttgaggctgtcagagcgctttttgcgtggttgctcccgcaagtttccttctctggagcttcccgcaggtgggcagctagctgcagcgactaccgcatcatcacagcctgttgaactcttctgagcaagagaaggggaggcggggtaagggaagtaggtggaagattcagccaagctcaaggatggaagtgcagttagggctgggaagggtctaccctcggccgccgtccaagacctaccgaggagctttccagaatctgttccagagcgtgcgcgaagtgatccagaacccgggccccaggcacccagaggccgcgagcgcagcacctcccggcgccagtttgctgctgctcagcagcagcagcagcagcagcagcagcagcagcagcagcagcagcagcaagagactagccccaggcagcagcagcagcagcagggtgaggatggttctccccaagcccatcgtagaggccccacaggctacctggtcctggatgaggaacagcaaccttcacagccgcagtcggccctggagtgccaccccgagagaggttgcgtcccagagcctggagccgccgtggccgccagcaaggggctgccgcagcagctgccagcacctccggacgaggatgactcagctgccccatccacgttgtccctgctgggccccactttccccggcttaagcagctgctccgctgaccttaaagacatcctgagcgaggccagcaccatgcaactccttcagcaacagcagcaggaagcagtatccgaaggcagcagcagcgggagagcgagggaggcctcgggggctcccacttcctccaaggacaattacttagggggcacttcgaccatttctgacaacgccaaggagttgtgtaaggcagtgtcggtgtccatgggcctgggtgtggaggcgttggagcatctgagtccaggggaacagcttcggggggattgcatgtacgccccacttttgggagttccacccgctgtgcgtcccactccttgtgccccattggccgaatgcaaaggttctctgctagacgacagcgcaggcaagagcactgaagatactgctgagtattcccctttcaagggaggttacaccaaagggctagaaggcgagagcctaggctgctctggcagcgctgcagcagggagctccgggacacttgaactgccgtctaccctgtctctctacaagtccggagcactggacgaggcagctgcgtaccagagtcgcgactactacaactttccactggctctggccggaccgccgccccctccgccgcctccccatccccacgctcgcatcaagctggagaacccgctggactacggcagcgcctgggcggctgcggcggcgcagtgccgctatggggacctggcgagcctgcatggcgcgggtgcagcgggacccggttctgggtcaccctcagccgccgcttcctcatcctggcacactctcttcacagccgaagaaggccagttgtatggaccgtgtggtggtggtgggggtggtggcggcggcggcggcggcggcggcggcggcgaggcgggagctgtagccccctacggctacactcggccccctcaggggctggcgggccaggaaagcgacttcaccgcacctgatgtgtggtaccctggcggcatggtgagcagagtgccctatcccagtcccacttgtgtcaaaagcgaaatgggcccctggatggatagctactccggaccttacggggacatgcgtttggagactgccagggaccatgttttgcccattgactattactttccaccccagaagacctgcctgatctgtggagatgaagcttctgggtgtcactatggagctctcacatgtggaagctgcaaggtcttcttcaaaagagccgctgaagggaaacagaagtacctgtgcgccagcagaaatgattgcactattgataaattccgaaggaaaaattgtccatcttgtcgtcttcggaaatgttatgaagcagggatgactctgggagcccggaagctgaagaaacttggtaatctgaaactacaggaggaaggagaggcttccagcaccaccagccccactgaggagacaacccagaagctgacagtgtcacacattgaaggctatgaatgtcagcccatctttctgaatgtcctggaagccattgagccaggtgtagtgtgtgctggacacgacaacaaccagcccgactcctttgcagccttgctctctagcctcaatgaactgggagagagacagcttgtacacgtggtcaagtgggccaaggccttgcctggcttccgcaacttacacgtggacgaccagatggctgtcattcagtactcctggatggggctcatggtgtttgccatgggctggcgatccttcaccaatgtcaactccaggatgctctacttcgcccctgatctggttttcaatgagtaccgcatgcacaagtcccggatgtacagccagtgtgtccgaatgaggcacctctctcaagagtttggatggctccaaatcaccccccaggaattcctgtgcatgaaagcactgctactcttcagcattattccagtggatgggctgaaaaatcaaaaattctttgatgaacttcgaatgaactacatcaaggaactcgatcgtatcattgcatgcaaaagaaaaaatcccacatcctgctcaagacgcttctaccagctcaccaagctcctggactccgtgcagcctattgcgagagagctgcatcagttcacttttgacctgctaatcaagtcacacatggtgagcgtggactttccggaaatgatggcagagatcatctctgtgcaagtgcccaagatcctttctgggaaagtcaagcccatctatttccacacccagtgaagcattggaaaccctatttccccaccccagctcatgccccctttcagatgtcttctgcctgttataactctgcactactcctctgcagtgccttggggaatttcctctattgatgtacagtctgtcatgaacatgttcctgaattctatttgctgggctttttttttctctttctctcctttctttttcttcttccctccctatctaaccctcccatggcaccttcagactttgcttcccattgtggctcctatctgtgttttgaatggtgttgtatgcctttaaatctgtgatgatcctcatatggcccagtgtcaagttgtgcttgtttacagcactactctgtgccagccacacaaacgtttacttatcttatgccacgggaagtttagagagctaagattatctggggaaatcaaaacaaaaaacaagcaaacaaaaaaaaaa

SEQ ID NO: 53285 - DNA, 4324 bp, Homo sapiens
  misc_feature (56)..(56): n is a, c, g, or t
cgagatcccggggagccagcttgctgggagagcgggacggtccggagcaagcccanaggcagaggaggcgacagagggaaaaagggccgagctagccgctccagtgctgtacaggagccgaagggacgcaccacgccagccccagcccggctccagcgacagccaacgcctcttgcagcgcggcggcttcgaagccgccgcccggagctgccctttcctcttcggtgaagtttttaaaagctgctaaagactcggaggaagcaaggaaagtgcctggtaggactgacggctgcctttgtcctcctcctctccaccccgcctccccccaccctgccttccccccctcccccgtcttctctcccgcagctgcctcagtcggctactctcagccaacccccctcaccacccttctccccacccgcccccccgcccccgtcggcccagcgctgccagcccgagtttgcagagaggtaactccctttggctgcgagcgggcgagctagctgcacattgcaaagaaggctcttaggagccaggcgactggggagcggcttcagcactgcagccacgacccgcctggttagaattccggcggagagaaccctctgttttcccccactctctctccacctcctcctgccttccccaccccgagtgcggagcagagatcaaaagatgaaaaggcagtcaggtcttcagtagccaaaaaacaaaacaaacaaaaacaaaaaagccgaaataaaagaaaaagataataactcagttcttatttgcacctacttcagtggacactgaatttggaaggtggaggattttgtttttttcttttaagatctgggcatcttttgaatctacccttcaagtattaagagacagactgtgagcctagcagggcagatcttgtccaccgtgtgtcttcttctgcacgagactttgaggctgtcagagcgctttttgcgtggttgctcccgcaagtttccttctctggagcttcccgcaggtgggcagctagctgcagcgactaccgcatcatcacagcctgttgaactcttctgagcaagagaaggggaggcggggtaagggaagtaggtggaagattcagccaagctcaaggatggaagtgcagttagggctgggaagggtctaccctcggccgccgtccaagacctaccgaggagctttccagaatctgttccagagcgtgcgcgaagtgatccagaacccgggccccaggcacccagaggccgcgagcgcagcacctcccggcgccagtttgctgctgctgcagcagcagcagcagcagcagcagcagcagcagcagcagcagcagcagcagcagcagcagcagcagcaagagactagccccaggcagcagcagcagcagcagggtgaggatggttctccccaagcccatcgtagaggccccacaggctacctggtcctggatgaggaacagcaaccttcacagccgcagtcggccctggagtgccaccccgagagaggttgcgtcccagagcctggagccgccgtggccgccagcaaggggctgccgcagcagctgccagcacctccggacgaggatgactcagctgccccatccacgttgtccctgctgggccccactttccccggcttaagcagctgctccgctgaccttaaagacatcctgagcgaggccagcaccatgcaactccttcagcaacagcagcaggaagcagtatccgaaggcagcagcagcgggagagcgagggaggcctcgggggctcccacttcctccaaggacaattacttagggggcacttcgaccatttctgacaacgccaaggagttgtgtaaggcagtgtcggtgtccatgggcctgggtgtggaggcgttggagcatctgagtccaggggaacagcttcggggggattgcatgtacgccccacttttgggagttccacccgctgtgcgtcccactccttgtgccccattggccgaatgcaaaggttctctgctagacgacagcgcaggcaagagcactgaagatactgctgagtattcccctttcaagggaggttacaccaaagggctagaaggcgagagcctaggctgctctggcagcgctgcagcagggagctccgggacacttgaactgccgtctaccctgtctctctacaagtccggagcactggacgaggcagctgcgtaccagagtcgcgactactacaactttccactggctctggccggaccgccgccccctccgccgcctccccatccccacgctcgcatcaagctggagaacccgctggactacggcagcgcctgggcggctgcggcggcgcagtgccgctatggggacctggcgagcctgcatggcgcgggtgcagcgggacccggttctgggtcaccctcagccgccgcttcctcatcctggcacactctcttcacagccgaagaaggccagttgtatggaccgtgtggtggtggtgggggtggtggcggcggcggcggcggcggcggcggcggcgaggcgggagctgtagccccctacggctacactcggccccctcaggggctggcgggccaggaaagcgacttcaccgcacctgatgtgtggtaccctggcggcatggtgagcagagtgccctatcccagtcccacttgtgtcaaaagcgaaatgggcccctggatggatagctactccggaccttacggggacatgcgtttggagactgccagggaccatgttttgcccattgactattactttccaccccagaagacctgcctgatctgtggagatgaagcttctgggtgtcactatggagctctcacatgtggaagctgcaaggtcttcttcaaaagagccgctgaagggaaacagaagtacctgtgcgccagcagaaatgattgcactattgataaattccgaaggaaaaattgtccatcttgtcgtcttcggaaatgttatgaagcagggatgactctgggagcccggaagctgaagaaacttggtaatctgaaactacaggaggaaggagaggcttccagcaccaccagccccactgaggagacaacccagaagctgacagtgtcacacattgaaggctatgaatgtcagcccatctttctgaatgtcctggaagccattgagccaggtgtagtgtgtgctggacacgacaacaaccagcccgactcctttgcagccttgctctctagcctcaatgaactgggagagagacagcttgtacacgtggtcaagtgggccaaggccttgcctggcttccgcaacttacacgtggacgaccagatggctgtcattcagtactcctggatggggctcatggtgtttgccatgggctggcgatccttcaccaatgtcaactccaggatgctctacttcgcccctgatctggttttcaatgagtaccgcatgcacaagtcccggatgtacagccagtgtgtccgaatgaggcacctctctcaagagtttggatggctccaaatcaccccccaggaattcctgtgcatgaaagcactgctaattttttttttttttttgcttctcttcagcattattccagtggatgggctgaaaaatcaaaaattctttgatgaacttcgaatgaactacatcaaggaactcgatcgtatcattgcatgcaaaagaaaaaatcccacatcctgctcaagacgcttctaccagctcaccaagctcctggactccgtgcagcctattgcgagagagctgcatcagttcacttttgacctgctaatcaagtcacacatggtgagcgtggactttccggaaatgatggcagagatcatctctgtgcaagtgcccaagatcctttctgggaaagtcaagcccatctatttccacacccagtgaagcattggaaaccctatttccccaccccagctcatgccccctttcagatgtcttctgcctgttataactctgcactactcctctgcagtgccttggggaatttcctctattgatgtacagtctgtcatgaacatgttcctgaattctatttgctgggctttttttttctctttctctcctttctttttcttcttccctccctatctaaccctcccatggcaccttcagactttgcttcccattgtggctcctatctgtgttttgaatggtgttgtatgcctttaaatctgtgatgatcctcatatggcccagtgtcaagttgtgcttgtttacagcactactctgtgccagccacacaaacgtttacttatcttatgccacgggaagtttagagagctaagattatctggggaaatcaaaacaaaaaacaagcaaacaaaaaaaaaa

SEQ ID NO: 53286 - DNA, 4308 bp, Homo sapiens
  misc_feature (56)..(56): n is a, c, g, or t
cgagatcccggggagccagcttgctgggagagcgggacggtccggagcaagcccanaggcagaggaggcgacagagggaaaaagggccgagctagccgctccagtgctgtacaggagccgaagggacgcaccacgccagccccagcccggctccagcgacagccaacgcctcttgcagcgcggcggcttcgaagccgccgcccggagctgccctttcctcttcggtgaagtttttaaaagctgctaaagactcggaggaagcaaggaaagtgcctggtaggactgacggctgcctttgtcctcctcctctccaccccgcctccccccaccctgccttccccccctcccccgtcttctctcccgcagctgcctcagtcggctactctcagccaacccccctcaccacccttctccccacccgcccccccgcccccgtcggcccagcgctgccagcccgagtttgcagagaggtaactccctttggctgcgagcgggcgagctagctgcacattgcaaagaaggctcttaggagccaggcgactggggagcggcttcagcactgcagccacgacccgcctggttagaattccggcggagagaaccctctgttttcccccactctctctccacctcctcctgccttccccaccccgagtgcggagcagagatcaaaagatgaaaaggcagtcaggtcttcagtagccaaaaaacaaaacaaacaaaaacaaaaaagccgaaataaaagaaaaagataataactcagttcttatttgcacctacttcagtggacactgaatttggaaggtggaggattttgtttttttcttttaagatctgggcatcttttgaatctacccttcaagtattaagagacagactgtgagcctagcagggcagatcttgtccaccgtgtgtcttcttctgcacgagactttgaggctgtcagagcgctttttgcgtggttgctcccgcaagtttccttctctggagcttcccgcaggtgggcagctagctgcagcgactaccgcatcatcacagcctgttgaactcttctgagcaagagaaggggaggcggggtaagggaagtaggtggaagattcagccaagctcaaggatggaagtgcagttagggctgggaagggtctaccctcggccgccgtccaagacctaccgaggagctttccagaatctgttccagagcgtgcgcgaagtgatccagaacccgggccccaggcacccagaggccgcgagcgcagcacctcccggcgccagtttgctgctgctcagcagcagcagcagcagcagcagcagcagcagcagcagcagcagcagcaagagactagccccaggcagcagcagcagcagcagggtgaggatggttctccccaagcccatcgtagaggccccacaggctacctggtcctggatgaggaacagcaaccttcacagccgcagtcggccctggagtgccaccccgagagaggttgcgtcccagagcctggagccgccgtggccgccagcaaggggctgccgcagcagctgccagcacctccggacgaggatgactcagctgccccatccacgttgtccctgctgggccccactttccccggcttaagcagctgctccgctgaccttaaagacatcctgagcgaggccagcaccatgcaactccttcagcaacagcagcaggaagcagtatccgaaggcagcagcagcgggagagcgagggaggcctcgggggctcccacttcctccaaggacaattacttagggggcacttcgaccatttctgacaacgccaaggagttgtgtaaggcagtgtcggtgtccatgggcctgggtgtggaggcgttggagcatctgagtccaggggaacagcttcggggggattgcatgtacgccccacttttgggagttccacccgctgtgcgtcccactccttgtgccccattggccgaatgcaaaggttctctgctagacgacagcgcaggcaagagcactgaagatactgctgagtattcccctttcaagggaggttacaccaaagggctagaaggcgagagcctaggctgctctggcagcgctgcagcagggagctccgggacacttgaactgccgtctaccctgtctctctacaagtccggagcactggacgaggcagctgcgtaccagagtcgcgactactacaactttccactggctctggccggaccgccgccccctccgccgcctccccatccccacgctcgcatcaagctggagaacccgctggactacggcagcgcctgggcggctgcggcggcgcagtgccgctatggggacctggcgagcctgcatggcgcgggtgcagcgggacccggttctgggtcaccctcagccgccgcttcctcatcctggcacactctcttcacagccgaagaaggccagttgtatggaccgtgtggtggtggtgggggtggtggcggcggcggcggcggcggcggcggcggcggcggcggcggcggcggcggcggcgaggcgggagctgtagccccctacggctacactcggccccctcaggggctggcgggccaggaaagcgacttcaccgcacctgatgtgtggtaccctggcggcatggtgagcagagtgccctatcccagtcccacttgtgtcaaaagcgaaatgggcccctggatggatagctactccggaccttacggggacatgcgtttggagactgccagggaccatgttttgcccattgactattactttccaccccagaagacctgcctgatctgtggagatgaagcttctgggtgtcactatggagctctcacatgtggaagctgcaaggtcttcttcaaaagagccgctgaagggaaacagaagtacctgtgcgccagcagaaatgattgcactattgataaattccgaaggaaaaattgtccatcttgtcgtcttcggaaatgttatgaagcagggatgactctgggagcccggaagctgaagaaacttggtaatctgaaactacaggaggaaggagaggcttccagcaccaccagccccactgaggagacaacccagaagctgacagtgtcacacattgaaggctatgaatgtcagcccatctttctgaatgtcctggaagccattgagccaggtgtagtgtgtgctggacacgacaacaaccagcccgactcctttgcagccttgctctctagcctcaatgaactgggagagagacagcttgtacacgtggtcaagtgggccaaggccttgcctggcttccgcaacttacacgtggacgaccagatggctgtcattcagtactcctggatggggctcatggtgtttgccatgggctggcgatccttcaccaatgtcaactccaggatgctctacttcgcccctgatctggttttcaatgagtaccgcatgcacaagtcccggatgtacagccagtgtgtccgaatgaggcacctctctcaagagtttggatggctccaaatcaccccccaggaattcctgtgcatgaaagcactgctactcttcagcattattccagtggatgggctgaaaaatcaaaaattctttgatgaacttcgaatgaactacatcaaggaactcgatcgtatcattgcatgcaaaagaaaaaatcccacatcctgctcaagacgcttctaccagctcaccaagctcctggactccgtgcagcctattgcgagagagctgcatcagttcacttttgacctgctaatcaagtcacacatggtgagcgtggactttccggaaatgatggcagagatcatctctgtgcaagtgcccaagatcctttctgggaaagtcaagcccatctatttccacacccagtgaagcattggaaaccctatttccccaccccagctcatgccccctttcagatgtcttctgcctgttataactctgcactactcctctgcagtgccttggggaatttcctctattgatgtacagtctgtcatgaacatgttcctgaattctatttgctgggctttttttttctctttctctcctttctttttcttcttccctccctatctaaccctcccatggcaccttcagactttgcttcccattgtggctcctatctgtgttttgaatggtgttgtatgcctttaaatctgtgatgatcctcatatggcccagtgtcaagttgtgcttgtttacagcactactctgtgccagccacacaaacgtttacttatcttatgccacgggaagtttagagagctaagattatctggggaaatcaaaacaaaaaacaagcaaacaaaaaaaaaa

SEQ ID NO: 53287 - DNA, 798 bp, Homo sapiens
gaactggctttacaaaggttaggcaacaagaacagagcttaaagatcataaggtaaagaacagtaacataataaatctagtttgaaaaacagctctaatccatgaacccaattttgaaagtaaccaactgaacagatcaaaaagtctagatgtatttgatgaacttgttggaaccaggtgacttgttttttttaatcttctataattgtgtttttacttttccagaggaatttatccatgtgtagtaagtagaggcagcaaatgcataaatgcctccttgttcagctacttaagtaattcagagcaatcctaattcactttagcaagagaatctagtgaagtctgttgagatgcaatggcttaagctgtggagtcagctacagacccaattagtcacaaatttttgaccactgtttataaggggctaactgatccaagggaaaaaggatctaacaactgggaccatccagttggatgcatgtttcttggtaaagtatctcttttaatatgatggtgtaagttaagaggtgacaaccaatgttcagattttgctaatttaaatccagaaatatctcaaaccacactggtattttttctttaattgactgagacattatgttgtccatgcatatggttgactactgaatccccctcaaatgaaactgtatcttgatagagcacaacaggtaattccatctacagtctgtgtgtattcatagttacttgtagggaggtgacagcaatacttatttaaggttctattattaaactactatattgttggaagacataaaaaat

SEQ ID NO: 53288 - DNA, 955 bp, Homo sapiens
gtgttgtttgatgactctgcatgtgaccagtagtgacattttactcactgaggctcatattgaggttaagcccgaggtccattggccttgctgagatcgtgtttagaacacagcactgtgcagtaagagactcctataactctatcaaatttgcatttggaggaattgtaaagagcctctgttacctcctaggtgaggcagtccaggaaaacagttgctagaaggagctatctgcagaaatagacagttgtggtcctttcatgttttaataattgttccctggatttcaaggagtcagtccaaaatccccgtaatagattttagtaacgttcatggaatctcagtttgcacatcatgagacctttagtgtggtgtttactgtcttcaccttaatatactttgtatccatgagcaaccttgctacagtcatgcaaagatgattattttttattcagcaataattagccacagtgttgagcacccagatgccttcctgcagcagccccccttttctccccagccaacatctgcaactgtgaacagatttccatcttcagccttggtggttggaaagaaatgtaagtcacctttttttctggttggttctggggcagatgccaccaggctgcagaggcagtctgtgtctgtggggctcaccagggcatgagttctgctcccaggaaagagattcttgcaggattttgtctgtggttctaaggagacaagtaggtggcacacaaaaacagaaaatgaaagaacccatccctccaaaaccacacacacaaagccaaaaggaaaaaaaaaagcacataattatcatgtaggcactgttgcagctaatcctgattttggcctcaattctgaacaagttagctggtttagacaaaccccttattaggtaatggattgttattcattcctccccttctcctagtcatttactccgtgagagctg

SEQ ID NO: 53289 - DNA, 231 bp, Homo sapiens
attctctctccctgtactccaaaagtcttcctgagtatacctagcattaggttttactgttttattttcttaattgatggctagtatttaagaacattatctcccttctgtattatgtattttaaataagagtatttactgtcttgtatatacttgtattgtcttgtatatacttgtcttgtaagagtatttactgtcttgtatatctgaatgggtcacatgtagtgcaag

SEQ ID NO: 53290 - DNA, 637 bp, Homo sapiens
caggtctcaacagtggggtaattcacttagagctggaggcacatagaagggaagtgcacatgtggcctgtgctagacactgtgggagcagcagaccgtgacagttctcatcactgttacaatttctctaggacagttagaggagggctcatcacagcattcaattacagtctacgttttccttctttcaaacactgcagggccaatttcccctcattcagtgatacctatgtggcacacgcacacatgcacagcagataagactttggacattttgacagagaatttgcagatgcagctattgtcctctatcttggtggctgttagaagaggcacacaggcctcagcataatttgcataagagacgtagacaatgttcacactctgttcctcttatctgcttctcataagaaggaagtgattatgtgggggtgtcatgtggggtcttacaccgtgttggtcagggtctgaaagaagcagaattgtactcaggtggctcaactaaaaagacttcagttggctcagcgtgctggctcatgcttgtaatcccagcactttgggaggctgaggcggccagatcaccggaggtcaggagtttgagaccagcctggccaacatggtgaaaccctgtctctact

SEQ ID NO: 53291 - DNA, 313 bp, Homo sapiens
gtcctagcacatcttcatctccatatgtgagatttatatttcataaaacttatatatgatgaagtatttaaattcaacagaagctacattcacaaaatggtaagccttgctttgggaatgtcccctattaacatgcctttctagggcttgctcttcccgtacagcaagctgagtagtactggcactgccactcaaacaagtttctgatcataatgaagaatggctgacttattagttgtgctatcctgggatgtcaagcattgttaaatttgaaaatgtgaactggacatagaaaagtggtttatttcattta

SEQ ID NO: 53292 - DNA, 323 bp, Homo sapiens
gtgaatgtaaatcttctgatgttactttaaaacctaatgtcaagatgtcagaaaagtttcaatgcacttgtctttgttttaccatctaaagacttttctaaattggtttgtcaagaggataggaatcagctgatattcctgtaatgtttggttaaaagatgtaaggaaagagaagcaaattccatgaatccattttgatttgattctttcctttatgttgccccattctggatcacgtttcttcttttccacttagaatgtactgacctgccatctccttccctccctgtgtttctgtacccttgggctgttccgttggtgtg

SEQ ID NO: 53293 - DNA, 415 bp, Homo sapiens
gttgaactaagaaagttcctcttcttccaaataaggttttacttagagactttcagtcccacttaaaacttcaaagcaataagcttcatttcacagcttcactaaatgaaacctaatggtagacatgcctttgactagacataaagtaagcattctttctagagaaaataaatagaaagagaggtttctttctatttccttatcagcttcacctctttcttaggaaatgattgctcgtctgggacagcatttgtcatgagtttgttttcactttaaaggcatgaaggggagagatgaccaggggagtgatacccatctggctcatcttcaagggattgcgtagggagttggagctgtagaggtttcactggcagaaagccagtattgtccaagaagcatcctgagaacatgtaat

SEQ ID NO: 53294 - DNA, 491 bp, Homo sapiens
gcagcattccttatatccttataatctaataatctttatctgttcttatttattttatgtatgttcttctaaccttgcaccccacaaggacatggactctattgacacactatccctagcactcagaagaatgcctgacacatagaagttgatttgcaaatgtttgttgaaagaataagtgattgaatgaatgaatagaaactattttccttatctatgtgccaatagtagcccaggtagaaaatataatggtgatgaaaagagattgataggaacaaaaattattaaaaagagcctaggagtaaactttaaaaatacgtaggacctacattcattcattgactcagcagtctatatcaagcacttaactctgccaggcactatgattttaaggataaataaggcaaacatgatccttgcttgttttgaacttagaaaaatacaaaacttatacctgggagacacagggatgaagacatcatttctcctaa

SEQ ID NO: 53295 - DNA, 241 bp, Homo sapiens
ttgaacggggtgcttttttaacaactgagggaaaataaagttttggaaatgttggtaaggattagagtatacacagatacatggtaataaatgtcaaagatgtgggaggttatcctgcagcaaatagaatgttgctaaagatttatgagcagggtaatgaaacattgagaggagagatacagtaaaattcatctttattccttggccagtttggttgaatcagggaaggagaaatgagagg

SEQ ID NO: 53296 - DNA, 329 bp, Homo sapiens
catcaaagtacctgaaagcagatctacatcttctgacttcacttactcaatttttattaatccatagatcaaggtgcattattccacaaattatgatcctctggcttctacttataccagtgtactaaaatgtcttttgatgagatcaccaaagagttcactcatgtcatactgcaggccctaatcttagttattaccttatttgaaagcagatctacattttctgacttcacttactcaatttttattaatccatagatcaaggtgtattattccacaagttatgatcctctggctcctacttataccagtgtattaaaatgtctttt

SEQ ID NO: 53297 - DNA, 341 bp, Homo sapiens
  misc_feature (1)..(1): n is a, c, g, or t
  misc_feature (3)..(3): n is a, c, g, or t
  misc_feature (6)..(7): n is a, c, g, or t
  misc_feature (86)..(86): n is a, c, g, or t
nanttnngtggcacttacatgaacacccacgcactctctcaatctactaattcccaaccttccactcgcactcctccacttttgcntcctagcccaaacacctgaaccatgagtaagtaattccatgcaatttcagctcggtctctgaaaatactcactttactatttgtctcatcatctttcctgcagcggctgctgcagactgctgctttcagggtccttcttggtatcctttactgtcatcacatcagcttagagagacgaggccaaggtgttcttcctcgccatgagcctcacctgcccttctccaaagctaaccacttgacttacaccatgaattc

SEQ ID NO: 53298 - DNA, 1791 bp, Homo sapiens
atcgctgcagaagcaccccagcacagggggtcttcacatagcccccttcccacttctgcccctagttctagggctggccttcctccactggctatgacattggacttgacatcaggatggcggctctggacacccattcaacccttcagactccctcctggcagctgtagggaaggaaccattctcctctgctctgtcatggatggatgcacagccccactgcttccaaactctgcctgtgtcccatgtggctcaggacatgagcttaacccctgcaaagcctataccacatcccacagcccgggtccccagtcaagcacttggatgcggcagtgatgttcatcgctacgtgagtttctaaagatcactcccaatttttctactttcctcatccttggcagctcgccaacaggtgcagtcagggggccacacggaacacccccatcccatgttccccccagttcttcccatcctgacccttgggattccaagatgggagcaagaggagatcctgaggctctgcctagggacgaggcctacagttctgccatgtctgtaggttgttgtttaaagattattaattcgaatttagcaatacgatctctaagtggtgccatgaattaaagatgccacttcgggctttcagtgcttctcagcttttgggcaaagggcttgtgtcttcaggggcagctcagctttcctgagtcctgactgctggcattcgtctgcatttgcctgtgcttctgcgagtcggacctcaagctgccaacactgcatgtggataaatccagttttcccgggccagcatgcaaaatgaagaggactccatctaagctgagaagcatggcctccccagagcagcctgcggcctccaagccttcctggcccaggcaaatgccagtgtgcaccaggctggctgctgggggcaggtctttggaggggagcagcatttccagccttctgaacatagttaatagtaatgacagccgtaacactaacgcgctctgcaattcgccctgcccagccatcctcggttgccaagattgcctgtgcctgcctgacaaaggaagagaatctccgaatgtgtatctttgggcccaccctagggagaggtcggggtcaccaggctacatggcgacatctaggcagctccgccttgcccagcctccttgccataatcctaatatattggtgtcctctgctcagaggggactgtcatcatggtgggaacaggctgtgcctccccagggactctgcccatgttcccagggcctcatctgtacactgtgaaattaactggcatcctggtgggcccaagggttttcaggactgggggccaatgactcaccccctccttcctcctcctgatccctatctctagctcttatcacagattttgaacaattgtctgtgaggttaatgatggtttcagagggaagcccttttcctccctgagactgtgtggggttcagtcagcctgctgaaattgcttccacttattacccatccttcctcttaaaaaaaaaaaaagcccaccaagttagtattctctgtagctctcagacagctacaagtgttcctggcatatttaccaaagtacaagaaatcattacattatttacggtctcagactacatcagggttgggggagctcctggtggggatggcagtgggtgtcgatgatatgtccacggctgagcaggtcttgtatccgaagcttgaagtaaccatgccaccatttatcatcaaatttgaaccttttaataaaattaaacagcctgaaaaatgttc

SEQ ID NO: 53299 - DNA, 384 bp, Homo sapiens
gtcacaacttgggagctcagtgcacgtatctaggtgactgggaagagggtggcaccaataccagcaacagagcaatgaggaagaggaaccggtttgcagcagaagagaaattttaaacgggttgcatttgagcggctttggaacatccacatggagataacaacagagagttggaaatgctagtctgaaccttaaggaggaaagctctacttttggcagaagaactggaacgtatcccctcttcctggagtgcctttccctcagctgtctcctttccggtcctcagtaaggtctctgctcaagtaccccttcatgccctttcctgccaccctacaatggtgcccctgtcacacacaccaccgccctcgctctgctcagttcttc

SEQ ID NO: 53300 - DNA, 1286 bp, Homo sapiens
tccggccaccgccgcgtggcaccgtcccgagcgcgtggcgcggggcgctggctgccgggcgggggcctggggccgcggacgctgggggcgcctcggccgcgctcagcctttagatcggagaatgcgggcggggtgggggcgctcggggtccccgcagtcactccagggtcgatttctcggcgggcgccgcggcctgtgcgaggccgggccccttggagtgccccgggaggtggtgctgggcgtctgaacaccacatcccttcctgcgcccgtgtgtgggttgggaatgccgggtgtaggccctggatcagagctgacggggttgcgagcggcgtggggtgtgcctgggacggtgaccggatgtgtcttcctgaatcgttgtattcgagctccagttctctctgtttctacagctgggcctcagtcctcacagggctctagtgggcgttcagccacaccaggagaaggcgcccaggggattaacaggacccttccctctcctgctcttccctcgccccccatggctccccctccctcctatttagtaggtacttctccagcaccccacagcgatgatggatgctggccctaaagccagacccaacatgagtgaagtttcctgcaagaaacgggacgactatttggaatggccagagtattttatggctgtggccttcttatcagcacagagaagcaaagatccaaattcccaggtcggcgcctgcatcgtgaattcagaaaacaagattgtcgggattgggtacaatgggatgccaaatgggtgcagtgatgacgtgttgccttggagaaggacagcagagaataagctggacaccaaatacccgtacgtgtgccatgcggagctgaatgccatcatgaacaaaaattcgaccgatgtgaaaggctgtagtatgtatgttgccttgttcccttgtaatgaatgcgctaagctcatcatccaggcaggtataaaagaagtgattttcatgtctgataaataccatgatagtgacgaggcaactgctgcgaggctcctgtttaatatggccggggtgacattccggaaattcataccgaagtgcagcaagattgtcattgactttgattcaattaacagcagaccgagtcaaaagcttcagtgagttacatctcattcaatctccagaagattgggattatcgtcttctaagaggttgctaatgcctttcatcttgaagttacacataacttcttactagccagtatggcaaaagtaggcatctaaagaatataaagcctcaaatcttc

SEQ ID NO: 53301 - DNA, 841 bp, Homo sapiens
  misc_feature (711)..(711): n is a, c, g, or t
  misc_feature (718)..(718): n is a, c, g, or t
  misc_feature (726)..(726): n is a, c, g, or t
taagcatataattataataacataaaaatgtacatgctttggtagggtagattttaataagattttaataatattggtaaggagccaaattacagaataccctagaatgtggaatacaaaatctcagagacaaaataaaaactcatgaaaatataagagcactttaaaaaggtaataatctttaggataaagaaagccttttctcaacacaggtactgagcatgtttaataaaaattaaatgagattaaagagaaggggcacagccacacgctccccgccccgcggtgattaggaaggtgatgcttgtgtaggtgaaagcatggagccagggcacagaagagctccgaacaccaacagtgctgcagtaagctgtctccacgtgggtggaatttctcacaatccactcacgggataggaattaattttctctccagttgcagaggggccttgtacatgaactgcgttggcatgcggaggaggggcaacacatccatgttggggacccctcccatccacagccccagctgccaccacggcagggcatgggctttgggggcaacaaggagagacaggctgtctcctctaggaacaactcattattcagctaaacgaaatggaagagctccatgtgaccaacaaacccaaattgagccaaaacaacagcgtccccacccccagagggataatgtgcacaccctgtgtgcagtggnagagcangaatggangaattattcttggttcagtttaactcctcggcctgcaggggaagtgtgcgcacctaattctggatttcggggagggggggggggggttttcctcaaattttgcagacaaaccctt

SEQ ID NO: 53302 - DNA, 700 bp, Homo sapiens
agcgggagcacggcggcggcggggacgagcaccggcctgcgcgcggagccggcaccggatggtgggcgggggccagccgtgcggacccaacatgagtgaagtttcctgcaagaaacgggacgactatttggaatggccagagtattttatggctgtggccttcttatcagcacagagaagcaaagatccaaattcccaggtcggcgcctgcatcgtgaattcagaaaacaagattgtcgggattgggtacaatgggatgccaaatgggtgcagtgatgacgtgttgccttggagaaggacagcagagaataagctggacaccaaatacccgtacgtgtgccatgcggagctgaatgccatcatgaacaaaaattcgaccgatgtgaaaggctgtagtatgtatgttgccttgttcccttgtaatgaatgcgctaagctcatcatccaggcaggtataaaagaagtgattttcatgtctgataaataccatgatagtgacgaggcaactgctgcgaggctcctgtttaatatggccggggtgacattccggaaattcataccgaagtgcagcaagattgtcattgactttgattcaattaacagcagaccgagtcaaaagcttcatacttgtcgttaaaaaagccttcctggccgggcatggtggctcacgcctgtaatcccagcactttgggaagctgag

SEQ ID NO: 53303 - DNA, 153 bp, Homo sapiens
gcggccgcctactacactactgctcgaattcaagcttctaacgatgtacggggacatgagtttttattttgtctctgagattttgtattccacattctagggtattctgtaatttggctccttaccaatattattaaaatcttattaaaatct

SEQ ID NO: 53304 - DNA, 1942 bp, Homo sapiens
aagatgctaggctggtactggtctgggaatttttgggcatccttccctgagcacggcggcggcggggacgagcaccggcctgcgcgcggagccggcaccggatgacccaacatgagtgaagtttcctgcaagaaacgggacgactatttggaatggccagagtattttatggctgtggccttcttatcagcacagagaagcaaagatccaaattcccaggtcggcgcctgcatcgtgaattcagaaaacaagattgtcgggattgggtacaatgggatgccaaatgggtgcagtgatgacgtgttgccttggagaaggacagcagagaataagctggacaccaaatacccgtacgtgtgccatgcggagctgaatgccatcatgaacaaaaattcgaccgatgtgaaaggctgtagtatgtatgttgccttgttcccttgtaatgaatgcgctaagctcatcatccaggcaggtataaaagaagtgattttcatgtctgataaataccatgatagtgacgaggcaactgctgcgaggctcctgtttaatatggccggggtgacattccggaaattcataccgaagtgcagcaagattgtcattgactttgattcaattaacagcagaccgagtcaaaagcttcagtgagttacatctcattcaatctccagaagattgggattatcgtcttctaagaggttgctaatgcctttcatcttgaagttacacataacttcttactagccagtatggcaaaagtaggcatctaaagaatataaagcctcaaatcttccttactgtctctcttgtcacatggaatctacatgtgtttgaactattgctttaggatttaaaataggggagcctgtggtggcctggtgcacagggctagaacgagagtgcctccccttcttgtgtcctggctggctgggatgctggtggctcttcagaggagcatcagctgtctgtcatctgctgcgatccggcagcctctcttcactgctacatgtgctggaaggacaaataaataattgtggttgtgttcttaatggggacgagcagacacactgatctgaacatctggcccaagtgaagcatggcatatagtgcccttggaagaaaattaggcctcaaatgacagtagcattgaagtgtttgctgcagagttgagggaaacccccagccaccctcccggaatccgagatagggtggcacatctgtcctgacagacgaggagtgtaactgaaccaggaatatttcctccattcctgctctcccactgcacacagggtggtggcacattatccctctggggggtggggacgcctgttgttttggctcaatttgggtttgttggtcacatggagctcttccatttcgtttagctgaataatgagttgttcctagaggagacagcctgtctctccttgttgcccccaaagcccatgccctgccgtggtggcagctggggctgtggatgggaggggtccccaacatggatgtgttgcccctcctccgcatgccaacgcagttcatgtacaaggcccctctgcaactggagagaaaattaattcctatcccgtgagtggattgtgagaaattccacccacgtggagacagcttactgcagcactgttggtgttcggagctcttctgtgccctggctccatgctttcacctacacaagcatcaccttcctaatcaccgcggggcggggagcgtgtggctgtgccccttctctttaatctcatttaatttttattaaacatgctcagtacctgtgttgagaaaaggctttctttatcctaaagattattacctttttaaagtgctcttatattttcatgagtttttattttgtctctgagattttgtattccacattctagggtattctgtaatttggctccttaccaatattattaaaatcttattaaaatct

SEQ ID NO: 53305 - DNA, 2010 bp, Homo sapiens
agcggagggcttcgggcccccggggccagccgccgtcctgcgaacgcgcggcgcccgggccgctgcccccttccggccccgcggcggccccgcctcctcccccgacttccttccctgagcacggcggcggcggggacgagcaccggcctgcgcgcggagccggcaccggatgacccaacatgagtgaagtttcctgcaagaaacgggacgactatttggaatggccagagtattttatggctgtggccttcttatcagcacagagaagcaaagatccaaattcccaggtcggcgcctgcatcgtgaattcagaaaacaagattgtcgggattgggtacaatgggatgccaaatgggtgcagtgatgacgtgttgccttggagaaggacagcagagaataagctggacaccaaatacccgtacgtgtgccatgcggagctgaatgccatcatgaacaaaaattcgaccgatgtgaaaggctgtagtatgtatgttgccttgttcccttgtaatgaatgcgctaagctcatcatccaggcaggtataaaagaagtgattttcatgtctgataaataccatgatagtgacgaggcaactgctgcgaggctcctgtttaatatggccggggtgacattccggaaattcataccgaagtgcagcaagattgtcattgactttgattcaattaacagcagaccgagtcaaaagcttcagtgagttacatctcattcaatctccagaagattgggattatcgtcttctaagaggttgctaatgcctttcatcttgaagttacacataacttcttactagccagtatggcaaaagtaggcatctaaagaatataaagcctcaaatcttccttactgtctctcttgtcacatggaatctacatgtgtttgaactattgctttaggatttaaaataggggagcctgtggtggcctggtgcacagggctagaacgagagtgcctccccttcttgtgtcctggctggctgggatgctggtggctcttcagaggagcatcagctgtctgtcatctgctgcgatccggcagcctctcttcactgctacatgtgctggaaggacaaataaataattgtggttgtgttcttaatggggacgagcagacacactgatctgaacatctggcccaagtgaagcatggcatatagtgcccttggaagaaaattaggcctcaaatgacagtagcattgaagtgtttgctgcagagttgagggaaacccccagccaccctcccggaatccgagatagggtggcacatctgtcctgacagacgaggagtgtaactgaaccaggaatatttcctccattcctgctctcccactgcacacagggtggtggcacattatccctctggggggtggggacgcctgttgttttggctcaatttgggtttgttggtcacatggagctcttccatttcgtttagctgaataatgagttgttcctagaggagacagcctgtctctccttgttgcccccaaagcccatgccctgccgtggtggcagctggggctgtggatgggaggggtccccaacatggatgtgttgcccctcctccgcatgccaacgcagttcatgtacaaggcccctctgcaactggagagaaaattaattcctatcccgtgagtggattgtgagaaattccacccacgtggagacagcttactgcagcactgttggtgttcggagctcttctgtgccctggctccatgctttcacctacacaagcatcaccttcctaatcaccgcggggcggggagcgtgtggctgtgccccttctctttaatctcatttaatttttattaaacatgctcagtacctgtgttgagaaaaggctttctttatcctaaagattattacctttttaaagtgctcttatattttcatgagtttttattttgtctctgagattttgtattccacattctagggtattctgtaatttggctccttaccaatattattaaaatcttattaaaatct

SEQ ID NO: 53306 - DNA, 1900 bp, Homo sapiens
ggctggtaccggtctggagggtttgggatgcaccggcctgcgcgcggagccggcaccggatgacccaacatgagtgaagtttcctgcaagaaacgggacgactatttggaatggccagagtattttatggctgtggccttcttatcagcacagagaagcaaagatccaaattcccaggtcggcgcctgcatcgtgaattcagaaaacaagattgtcgggattgggtacaatgggatgccaaatgggtgcagtgatgacgtgttgccttggagaaggacagcagagaataagctggacaccaaatacccgtacgtgtgccatgcggagctgaatgccatcatgaacaaaaattcgaccgatgtgaaaggctgtagtatgtatgttgccttgttcccttgtaatgaatgcgctaagctcatcatccaggcaggtataaaagaagtgattttcatgtctgataaataccatgatagtgacgaggcaactgctgcgaggctcctgtttaatatggccggggtgacattccggaaattcataccgaagtgcagcaagattgtcattgactttgattcaattaacagcagaccgagtcaaaagcttcagtgagttacatctcattcaatctccagaagattgggattatcgtcttctaagaggttgctaatgcctttcatcttgaagttacacataacttcttactagccagtatggcaaaagtaggcatctaaagaatataaagcctcaaatcttccttactgtctctcttgtcacatggaatctacatgtgtttgaactattgctttaggatttaaaataggggagcctgtggtggcctggtgcacagggctagaacgagagtgcctccccttcttgtgtcctggctggctgggatgctggtggctcttcagaggagcatcagctgtctgtcatctgctgcgatccggcagcctctcttcactgctacatgtgctggaaggacaaataaataattgtggttgtgttcttaatggggacgagcagacacactgatctgaacatctggcccaagtgaagcatggcatatagtgcccttggaagaaaattaggcctcaaatgacagtagcattgaagtgtttgctgcagagttgagggaaacccccagccaccctcccggaatccgagatagggtggcacatctgtcctgacagacgaggagtgtaactgaaccaggaatatttcctccattcctgctctcccactgcacacagggtggtggcacattatccctctggggggtggggacgcctgttgttttggctcaatttgggtttgttggtcacatggagctcttccatttcgtttagctgaataatgagttgttcctagaggagacagcctgtctctccttgttgcccccaaagcccatgccctgccgtggtggcagctggggctgtggatgggaggggtccccaacatggatgtgttgcccctcctccgcatgccaacgcagttcatgtacaaggcccctctgcaactggagagaaaattaattcctatcccgtgagtggattgtgagaaattccacccacgtggagacagcttactgcagcactgttggtgttcggagctcttctgtgccctggctccatgctttcacctacacaagcatcaccttcctaatcaccgcggggcggggagcgtgtggctgtgccccttctctttaatctcatttaatttttattaaacatgctcagtacctgtgttgagaaaaggctttctttatcctaaagattattacctttttaaagtgctcttatattttcatgagtttttattttgtctctgagattttgtattccacattctagggtattctgtaatttggctccttaccaatattattaaaatcttattaaaatct

SEQ ID NO: 53307 - DNA, 2698 bp, Homo sapiens
tccggccaccgccgcgtggcaccgtcccgagcgcgtggcgcggggcgctggctgccgggcgggggcctggggccgcggacgctgggggcgcctcggccgcgctcagcctttagatcggagaatgcgggcggggtgggggcgctcggggtccccgcagtcactccagggtcgatttctcggcgggcgccgcggcctgtgcgaggccgggccccttggagtgccccgggaggtggtgctgggcgtctgaacaccacatcccttcctgcgcccgtgtgtgggttgggaatgccgggtgtaggccctggatcagagctgacggggttgcgagcggcgtggggtgtgcctgggacggtgaccggatgtgtcttcctgaatcgttgtattcgagctccagttctctctgtttctacagctgggcctcagtcctcacagggctctagtgggcgttcagccacaccaggagaaggcgcccaggggattaacaggacccttccctctcctgctcttccctcgccccccatggctccccctccctcctatttagtaggtacttctccagcaccccacagcgatgatggatgctggccctaaagccaggcactgccgccctgcactgtagcagatgcctaaataaagtgtggagcctgaagcagaagttttgggagatgcttgccttcctttagaccacattcctcgcctttctcaagatttctccgtgggacccaccccgtttttgtgttgtcttccttccttgcccttgtttcattccttttgaaagcgaccactcccctgaagtcctaggacccccttcgtgggctctccctgccgtagacagtctctgcttgcccctggtaaactacacccaacatgagtgaagtttcctgcaagaaacgggacgactatttggaatggccagagtattttatggctgtggccttcttatcagcacagagaagcaaagatccaaattcccaggtcggcgcctgcatcgtgaattcagaaaacaagattgtcgggattgggtacaatgggatgccaaatgggtgcagtgatgacgtgttgccttggagaaggacagcagagaataagctggacaccaaatacccgtacgtgtgccatgcggagctgaatgccatcatgaacaaaaattcgaccgatgtgaaaggctgtagtatgtatgttgccttgttcccttgtaatgaatgcgctaagctcatcatccaggcaggtataaaagaagtgattttcatgtctgataaataccatgatagtgacgaggcaactgctgcgaggctcctgtttaatatggccggggtgacattccggaaattcataccgaagtgcagcaagattgtcattgactttgattcaattaacagcagaccgagtcaaaagcttcagtgagttacatctcattcaatctccagaagattgggattatcgtcttctaagaggttgctaatgcctttcatcttgaagttacacataacttcttactagccagtatggcaaaagtaggcatctaaagaatataaagcctcaaatcttccttactgtctctcttgtcacatggaatctacatgtgtttgaactattgctttaggatttaaaataggggagcctgtggtggcctggtgcacagggctagaacgagagtgcctccccttcttgtgtcctggctggctgggatgctggtggctcttcagaggagcatcagctgtctgtcatctgctgcgatccggcagcctctcttcactgctacatgtgctggaaggacaaataaataattgtggttgtgttcttaatggggacgagcagacacactgatctgaacatctggcccaagtgaagcatggcatatagtgcccttggaagaaaattaggcctcaaatgacagtagcattgaagtgtttgctgcagagttgagggaaacccccagccaccctcccggaatccgagatagggtggcacatctgtcctgacagacgaggagtgtaactgaaccaggaatatttcctccattcctgctctcccactgcacacagggtggtggcacattatccctctggggggtggggacgcctgttgttttggctcaatttgggtttgttggtcacatggagctcttccatttcgtttagctgaataatgagttgttcctagaggagacagcctgtctctccttgttgcccccaaagcccatgccctgccgtggtggcagctggggctgtggatgggaggggtccccaacatggatgtgttgcccctcctccgcatgccaacgcagttcatgtacaaggcccctctgcaactggagagaaaattaattcctatcccgtgagtggattgtgagaaattccacccacgtggagacagcttactgcagcactgttggtgttcggagctcttctgtgccctggctccatgctttcacctacacaagcatcaccttcctaatcaccgcggggcggggagcgtgtggctgtgccccttctctttaatctcatttaatttttattaaacatgctcagtacctgtgttgagaaaaggctttctttatcctaaagattattacctttttaaagtgctcttatattttcatgagtttttattttgtctctgagattttgtattccacattctagggtattctgtaatttggctccttaccaatattattaaaatcttattaaaatct

SEQ ID NO: 53308 - DNA, 2435 bp, Homo sapiens
tccggccaccgccgcgtggcaccgtcccgagcgcgtggcgcggggcgctggctgccgggcgggggcctggggccgcggacgctgggggcgcctcggccgcgctcagcctttagatcggagaatgcgggcggggtgggggcgctcggggtccccgcagtcactccagggtcgatttctcggcgggcgccgcggcctgtgcgaggccgggccccttggagtgccccgggaggtggtgctgggcgtctgaacaccacatcccttcctgcgcccgtgtgtgggttgggaatgccgggtgtaggccctggatcagagctgacggggttgcgagcggcgtggggtgtgcctgggacggtgaccggatgtgtcttcctgaatcgttgtattcgagctccagttctctctgtttctacagctgggcctcagtcctcacagggctctagtgggcgttcagccacaccaggagaaggcgcccaggggattaacaggacccttccctctcctgctcttccctcgccccccatggctccccctccctcctatttagtaggtacttctccagcaccccacagcgatgatggatgctggccctaaagccagacccaacatgagtgaagtttcctgcaagaaacgggacgactatttggaatggccagagtattttatggctgtggccttcttatcagcacagagaagcaaagatccaaattcccaggtcggcgcctgcatcgtgaattcagaaaacaagattgtcgggattgggtacaatgggatgccaaatgggtgcagtgatgacgtgttgccttggagaaggacagcagagaataagctggacaccaaatacccgtacgtgtgccatgcggagctgaatgccatcatgaacaaaaattcgaccgatgtgaaaggctgtagtatgtatgttgccttgttcccttgtaatgaatgcgctaagctcatcatccaggcaggtataaaagaagtgattttcatgtctgataaataccatgatagtgacgaggcaactgctgcgaggctcctgtttaatatggccggggtgacattccggaaattcataccgaagtgcagcaagattgtcattgactttgattcaattaacagcagaccgagtcaaaagcttcagtgagttacatctcattcaatctccagaagattgggattatcgtcttctaagaggttgctaatgcctttcatcttgaagttacacataacttcttactagccagtatggcaaaagtaggcatctaaagaatataaagcctcaaatcttccttactgtctctcttgtcacatggaatctacatgtgtttgaactattgctttaggatttaaaataggggagcctgtggtggcctggtgcacagggctagaacgagagtgcctccccttcttgtgtcctggctggctgggatgctggtggctcttcagaggagcatcagctgtctgtcatctgctgcgatccggcagcctctcttcactgctacatgtgctggaaggacaaataaataattgtggttgtgttcttaatggggacgagcagacacactgatctgaacatctggcccaagtgaagcatggcatatagtgcccttggaagaaaattaggcctcaaatgacagtagcattgaagtgtttgctgcagagttgagggaaacccccagccaccctcccggaatccgagatagggtggcacatctgtcctgacagacgaggagtgtaactgaaccaggaatatttcctccattcctgctctcccactgcacacagggtggtggcacattatccctctggggggtggggacgcctgttgttttggctcaatttgggtttgttggtcacatggagctcttccatttcgtttagctgaataatgagttgttcctagaggagacagcctgtctctccttgttgcccccaaagcccatgccctgccgtggtggcagctggggctgtggatgggaggggtccccaacatggatgtgttgcccctcctccgcatgccaacgcagttcatgtacaaggcccctctgcaactggagagaaaattaattcctatcccgtgagtggattgtgagaaattccacccacgtggagacagcttactgcagcactgttggtgttcggagctcttctgtgccctggctccatgctttcacctacacaagcatcaccttcctaatcaccgcggggcggggagcgtgtggctgtgccccttctctttaatctcatttaatttttattaaacatgctcagtacctgtgttgagaaaaggctttctttatcctaaagattattacctttttaaagtgctcttatattttcatgagtttttattttgtctctgagattttgtattccacattctagggtattctgtaatttggctccttaccaatattattaaaatcttattaaaatct

SEQ ID NO: 53309 - DNA, 1804 bp, Homo sapiens
aagatgctaggctggtactggtctgggaatttttgggcatccttccctgagcacggcggcggcggggacgagcaccggcctgcgcgcggagccggcaccggatgacccaacatgagtgaagtttcctgcaagaaacgggacgactatttggaatggccagagtattttatggctgtggccttcttatcagcacagagaagcaaagatccaaattcccaggtcggcgcctgcatcgtgaattcagaaaacaagattgtcgggattgggtacaatgggatgccaaatgggtgcagtgatgacgtgttgccttggagaaggacagcagagaataagctggacaccaaatacccgtacgtgtgccatgcggagctgaatgccatcatgaacaaaaattcgaccgatgtgaaaggctgtagtatgtatgttgccttgttcccttgtaatgaatgcgctaagctcatcatccaggcaggtataaaagaagtgattttcatgtctgataaataccatgatagtgacgaggcaactgctgcgaggctcctgtttaatatggccggggtgacattccggaaattcataccgaagtgcagcaagattgtcattgactttgattcaattaacagcagaccgagtcaaaagcttcagtgagttacatctcattcaatctccagaagattgggattatcgtcttctaagaggttgctaatgcctttcatcttgaagttacacataacttcttactagccagtatggcaaaagtaggcatctaaagaatataaagcctcaaatcttccttactgtctctcttgtcacatggaatctacatgtgtttgaactattgctttaggatttaaaataggggagcctgtggtggcctggtgcacagggctagaacgagagtgcctccccttcttgtgtcctggctggctgggatgctggtggctcttcagaggagcatcagctgtctgtcatctgctgcgatccggcagcctctcttcactgctacatgtgctggaaggacaaataaataattgtggttgtgttcttaatggggacgagcagacacactgatctgaacatctggcccaagtgaagcatggcatatagtgcccttggaagaaaattaggcctcaaatgacagtagcattgaagtgtttgctgcagagttgagggaaacccccagccaccctcccggaatccgagatagggtggcacatctgtcctgacagacgaggagtgtaactgaaccaggaatatttcctccattcctgctctcccactgcacacagggtggtggcacattatccctctggggggtggggacgcctgttgttttggctcaatttgggtttgttggtcacatggagctcttccatttcgtttagctgaataatgagttgttcctagaggagacagcctgtctctccttgttgcccccaaagcccatgccctgccgtggtggcagctggggctgtggatgggaggggtccccaacatggatgtgttgcccctcctccgcatgccaacgcagttcatgtacaaggcccctctgcaactggagagaaaattaattcctatcccgtgagtggattgtgagaaattccacccacgtggagacagcttactgcagcactgttggtgttcggagctcttctgtgccctggctccatgctttcacctacacaagcatcaccttcctaatcaccgcggggcggggagcgtgtggctgtgccccttctctttaatctcatttaatttttattaaacatgctcagtacctgtgttgagaaaaggctttctttat

SEQ ID NO: 53310 - DNA, 2563 bp, Homo sapiens
  misc_feature (2433)..(2433): n is a, c, g, or t
  misc_feature (2440)..(2440): n is a, c, g, or t
  misc_feature (2448)..(2448): n is a, c, g, or t
agcggagggcttcgggcccccggggccagccgccgtcctgcgaacgcgcggcgcccgggccgctgcccccttccggccccgcggcggccccgcctcctcccccgacttccttccctgagcacggcggcggcggggacgagcaccggcctgcgcgcggagccggcaccggatggtgggcgggggccagccgtgcggacccaacatgagtgaagtttcctgcaagaaacgggacgactatttggaatggccagagtattttatggctgtggccttcttatcagcacagagaagcaaagatccaaattcccaggtcggcgcctgcatcgtgaattcagaaaacaagattgtcgggattgggtacaatgggatgccaaatgggtgcagtgatgacgtgttgccttggagaaggacagcagagaataagctggacaccaaatacccgtacgtgtgccatgcggagctgaatgccatcatgaacaaaaattcgaccgatgtgaaaggctgtagtatgtatgttgccttgttcccttgtaatgaatgcgctaagctcatcatccaggcaggtataaaagaagtgattttcatgtctgataaataccatgatagtgacgaggcaactgctgcgaggctcctgtttaatatggccggggtgacattccggaaattcataccgaagtgcagcaagattgtcattgactttgattcaattaacagcagaccgagtcaaaagcttcagtgagttacatctcattcaatctccagaagattgggattatcgtcttctaagaggttgctaatgcctttcatcttgaagttacacataacttcttactagccagtatggcaaaagtaggcatctaaagaatataaagcctcaaatcttccttactgtctctcttgtcacatggaatctacatgtgtttgaactattgctttaggatttaaaataggggagcctgtggtggcctggtgcacagggctagaacgagagtgcctccccttcttgtgtcctggctggctgggatgctggtggctcttcagaggagcatcagctgtctgtcatctgctgcgatccggcagcctctcttcactgctacatgtgctggaaggacaaataaataattgtggttgtgttcttaatggggacgagcagacacactgatctgaacatctggcccaagtgaagcatggcatatagtgcccttggaagaaaattaggcctcaaatgacagtagcattgaagtgtttgctgcagagttgagggaaacccccagccaccctcccggaatccgagatagggtggcacatctgtcctgacagacgaggagtgtaactgaaccaggaatatttcctccattcctgctctcccactgcacacagggtggtggcacattatccctctggggggtggggacgcctgttgttttggctcaatttgggtttgttggtcacatggagctcttccatttcgtttagctgaataatgagttgttcctagaggagacagcctgtctctccttgttgcccccaaagcccatgccctgccgtggtggcagctggggctgtggatgggaggggtccccaacatggatgtgttgcccctcctccgcatgccaacgcagttcatgtacaaggcccctctgcaactggagagaaaattaattcctatcccgtgagtggattgtgagaaattccacccacgtggagacagcttactgcagcactgttggtgttcggagctcttctgtgccctggctccatgctttcacctacacaagcatcaccttcctaatcaccgcggggcggggagcgtgtggctgtgccccttctctttaatctcatttaatttttattaaacatgctcagtacctgtgttgagaaaaggctttctttatcctaaagattattacctttttaaagtgctcttatattttgtactgagcatgtttaataaaaattaaatgagattaaagagaaggggcacagccacacgctccccgccccgcggtgattaggaaggtgatgcttgtgtaggtgaaagcatggagccagggcacagaagagctccgaacaccaacagtgctgcagtaagctgtctccacgtgggtggaatttctcacaatccactcacgggataggaattaattttctctccagttgcagaggggccttgtacatgaactgcgttggcatgcggaggaggggcaacacatccatgttggggacccctcccatccacagccccagctgccaccacggcagggcatgggctttgggggcaacaaggagagacaggctgtctcctctaggaacaactcattattcagctaaacgaaatggaagagctccatgtgaccaacaaacccaaattgagccaaaacaacagcgtccccacccccagagggataatgtgcacaccctgtgtgcagtggnagagcangaatggangaattattcttggttcagtttaactcctcggcctgcaggggaagtgtgcgcacctaattctggatttcggggagggggggggggggttttcctcaaattttgcagacaaaccctt

SEQ ID NO: 53311 - DNA, 1979 bp, Homo sapiens
agcggagggcttcgggcccccggggccagccgccgtcctgcgaacgcgcggcgcccgggccgctgcccccttccggccccgcggcggccccgcctcctcccccgacttccttccctgagcacggcggcggcggggacgagcaccggcctgcgcgcggagccggcaccggatggtgggcgggggccagccgtgcggacccaacatgagtgaagtttcctgcaagaaacgggacgactatttggaatggccagagtattttatggctgtggccttcttatcagcacagagaagcaaagatccaaattcccaggtcggcgcctgcatcgtgaattcagaaaacaagattgtcgggattgggtacaatgggatgccaaatgggtgcagtgatgacgtgttgccttggagaaggacagcagagaataagctggacaccaaatacccgtacgtgtgccatgcggagctgaatgccatcatgaacaaaaattcgaccgatgtgaaaggctgtagtatgtatgttgccttgttcccttgtaatgaatgcgctaagctcatcatccaggcaggtataaaagaagtgattttcatgtctgataaataccatgatagtgacgaggcaactgctgcgaggctcctgtttaatatggccggggtgacattccggaaattcataccgaagtgcagcaagattgtcattgactttgattcaattaacagcagaccgagtcaaaagcttcagtgagttacatctcattcaatctccagaagattgggattatcgtcttctaagaggttgctaatgcctttcatcttgaagttacacataacttcttactagccagtatggcaaaagtaggcatctaaagaatataaagcctcaaatcttccttactgtctctcttgtcacatggaatctacatgtgtttgaactattgctttaggatttaaaataggggagcctgtggtggcctggtgcacagggctagaacgagagtgcctccccttcttgtgtcctggctggctgggatgctggtggctcttcagaggagcatcagctgtctgtcatctgctgcgatccggcagcctctcttcactgctacatgtgctggaaggacaaataaataattgtggttgtgttcttaatggggacgagcagacacactgatctgaacatctggcccaagtgaagcatggcatatagtgcccttgggggaaacccccagccaccctcccggaatccgagatagggtggcacatctgtcctgacagacgaggagtgtaactgaaccaggaatatttcctccattcctgctctcccactgcacacagggtggtggcacattatccctctggggggtggggacgcctgttgttttggctcaatttgggtttgttggtcacatggagctcttccatttcgtttagctgaataatgagttgttcctagaggagacagcctgtctctccttgttgcccccaaagcccatgccctgccgtggtggcagctggggctgtggatgggaggggtccccaacatggatgtgttgcccctcctccgcatgccaacgcagttcatgtacaaggcccctctgcaactggagagaaaattaattcctatcccgtgagtggattgtgagaaattccacccacgtggagacagcttactgcagcactgttggtgttcggagctcttctgtgccctggctccatgctttcacctacacaagcatcaccttcctaatcaccgcggggcggggagcgtgtggctgtgccccttctctttaatctcatttaatttttattaaacatgctcagtacctgtgttgagaaaaggctttctttatcctaaagattattacctttttaaagtgctcttatattttcatgagtttttattttgtctctgagattttgtattccacattctagggtattctgtaatttggctccttaccaatattattaaaatcttattaaaatct

SEQ ID NO: 53312 - DNA, 1841 bp, Homo sapiens
agcggagggcttcgggcccccggggccagccgccgtcctgcgaacgcgcggcgcccgggccgctgcccccttccggccccgcggcggccccgcctcctcccccgacttccttccctgagcacggcggcggcggggacgagcaccggcctgcgcgcggagccggcaccggatggtgggcgggggccagccgtgcggacccaacatgagtgaagtttcctgcaagaaacgggacgactatttggaatggccagagtattttatggctgtggccttcttatcagcacagagaagcaaagatccaaattcccaggtcggcgcctgcatcgtgaattcagaaaacaagattgtcgggattgggtacaatgggatgccaaatgggtgcagtgatgacgtgttgccttggagaaggacagcagagaataagctggacaccaaatacccgtacgtgtgccatgcggagctgaatgccatcatgaacaaaaattcgaccgatgtgaaaggctgtagtatgtatgttgccttgttcccttgtaatgaatgcgctaagctcatcatccaggcaggtataaaagaagtgattttcatgtctgataaataccatgatagtgacgaggcaactgctgcgaggctcctgtttaatatggccggggtgacattccggaaattcataccgaagtgcagcaagattgtcattgactttgattcaattaacagcagaccgagtcaaaagcttcagtgagttacatctcattcaatctccagaagattgggattatcgtcttctaagaggttgctaatgcctttcatcttgaagttacacataacttcttactagccagtatggcaaaagtaggcatctaaagaatataaagcctcaaatcttccttactgtctctcttgtcacatggaatctacatgtgtttgaactattgctttaggatttaaaataggggagcctgtggtggcctggtgcacagggctagaacgagagtgcctccccttcttgtgtcctggctggctgggatgctggtggctcttcagaggagcatcagctgtctgtcatctgctgcgatccggcagcctctcttcactgctacatgtgctggaaggacaaataaataattgtggttgtgttcttaatggggacgagcagacacactgatctgaacatctggcccaagtgaagcatggcatatagtgcccttggaagaaaattaggcctcaaatgacagtagcattgaagtgtttgctgcagagttgagggaaacccccagccaccctcccggaatccgagatagggtggcacatctgtcctgacagacgaggagtgtaactgaaccaggaatatttcctccattcctgctctcccactgcacacagggtggtggcacattatccctctggggggtggggacgcctgttgttttggctcaatttgggtttgttggtcacatggagctcttccatttcgtttagctgaataatgagttgttcctagaggagacagcctgtctctccttgttgcccccaaagcccatgccctgccgtggtggcagctggggctgtggatgggaggggtccccaacatggatgtgttgcccctcctccgcatgccaacgcagttcatgtacaaggcccctctgcaactggagagcagcttactgcagcactgttggtgttcggagctcttctgtgccctggctccatgctttcacctacacaagcatcaccttcctaatcaccgcggggcggggagcgtgtggctgtgccccttctctttaatctcatttaatttttattaaacatgctcagtacctgtgttgagaaaaggctttctttat

SEQ ID NO: 53313 - DNA, 1567 bp, Homo sapiens
  misc_feature (1)..(1): n is a, c, g, or t
  misc_feature (12)..(12): n is a, c, g, or t
ncggtgatctanaggatcccagacgatgtgaaaggctgtagtatgtatgttgccttgttcccttgtaatgaatgcgctaagctcatcatccaggcaggtataaaagaagtgattttcatgtctgataaataccatgatagtgacgaggcaactgctgcgaggctcctgtttaatatggccggggtgacattccggaaattcataccgaagtgcagcaagattgtcattgactttgattcaattaacagcagaccgagtcaaaagcttcagtgagttacatctcattcaatctccagaagattgggattatcgtcttctaagaggttgctaatgcctttcatcttgaagttacacataacttcttactagccagtatggcaaaagtaggcatctaaagaatataaagcctcaaatcttccttactgtctctcttgtcacatggaatctacatgtgtttgaactattgctttaggatttaaaataggggagcctgtggtggcctggtgcacagggctagaacgagagtgcctccccttcttgtgtcctggctggctgggatgctggtggctcttcagaggagcatcagctgtctgtcatctgctgcgatccggcagcctctcttcactgctacatgtgctggaaggacaaataaataattgtggttgtgttcttaatggggacgagcagacacactgatctgaacatctggcccaagtgaagcatggcatatagtgcccttggaagaaaattaggcctcaaatgacagtagcattgaagtgtttgctgcagagttgagggaaacccccagccaccctcccggaatccgagatagggtggcacatctgtcctgacagacgaggagtgtaactgaaccaggaatatttcctccattcctgctctcccactgcacacagggtggtggcacattatccctctggggggtggggacgcctgttgttttggctcaatttgggtttgttggtcacatggagctcttccatttcgtttagctgaataatgagttgttcctagaggagacagcctgtctctccttgttgcccccaaagcccatgccctgccgtggtggcagctggggctgtggatgggaggggtccccaacatggatgtgttgcccctcctccgcatgccaacgcagttcatgtacaaggcccctctgcaactggagagaaaattaattcctatcccgtgagtggattgtgagaaattccacccacgtggagacagcttactgcagcactgttggtgttcggagctcttctgtgccctggctccatgctttcacctacacaagcatcaccttcctaatcaccgcggggcggggagcgtgtggctgtgccccttctctttaatctcatttaatttttattaaacatgctcagtacctgtgttgagaaaaggctttctttatcctaaagattattacctttttaaagtgctcttatattttcatgagtttttattttgtctctgagattttgtattccacattctagggtattctgtaatttggctccttaccaatattattaaaatcttattaaaatct

SEQ ID NO: 53314 - DNA, 2080 bp, Homo sapiens
tgtattggtggtgctggcaggcctgtgggccgagcagtccgggccccacactgcagcctcctctgccttcagaggctgatggagcagcggccttcagtgcggggcccttgggattcctggctgccgagttagcgctgcctgctgagatcaggacaagaaaacagatctgccctctgtagagctggtttgaagtggtctgcaaagccatgctgggaagcacagtggtgcccacctctgaatttgccagcagcccccactccctccattagtcctcccactagtaagagaagctaccttgtgcatactgccttgattacctgtagtaagggaaattggttaatcggatcaaggcttgactacttgacatgttttccctttgcatttgtttaaaaaaaaaatccataaagactggagggaagattagatagaatccaccctctgctgtattagaaagcagcagatatgtatttcagtgactggacactgtctgcaagcacactcagaaaaggtcattaatcatagacgctgaaagtgctccagctcgttccgcctgtcttttgcagcatctgtaggtgcgtacactaagggagctcccattgttaccttacaggtataaaagaagtgattttcatgtctgataaataccatgatagtgacgaggcaactgctgcgaggctcctgtttaatatggccggggtgacattccggaaattcataccgaagtgcagcaagattgtcattgactttgattcaattaacagcagaccgagtcaaaagcttcagtgagttacatctcattcaatctccagaagattgggattatcgtcttctaagaggttgctaatgcctttcatcttgaagttacacataacttcttactagccagtatggcaaaagtaggcatctaaagaatataaagcctcaaatcttccttactgtctctcttgtcacatggaatctacatgtgtttgaactattgctttaggatttaaaataggggagcctgtggtggcctggtgcacagggctagaacgagagtgcctccccttcttgtgtcctggctggctgggatgctggtggctcttcagaggagcatcagctgtctgtcatctgctgcgatccggcagcctctcttcactgctacatgtgctggaaggacaaataaataattgtggttgtgttcttaatggggacgagcagacacactgatctgaacatctggcccaagtgaagcatggcatatagtgcccttggaagaaaattaggcctcaaatgacagtagcattgaagtgtttgctgcagagttgagggaaacccccagccaccctcccggaatccgagatagggtggcacatctgtcctgacagacgaggagtgtaactgaaccaggaatatttcctccattcctgctctcccactgcacacagggtggtggcacattatccctctggggggtggggacgcctgttgttttggctcaatttgggtttgttggtcacatggagctcttccatttcgtttagctgaataatgagttgttcctagaggagacagcctgtctctccttgttgcccccaaagcccatgccctgccgtggtggcagctggggctgtggatgggaggggtccccaacatggatgtgttgcccctcctccgcatgccaacgcagttcatgtacaaggcccctctgcaactggagagaaaattaattcctatcccgtgagtggattgtgagaaattccacccacgtggagacagcttactgcagcactgttggtgttcggagctcttctgtgccctggctccatgctttcacctacacaagcatcaccttcctaatcaccgcggggcggggagcgtgtggctgtgccccttctctttaatctcatttaatttttattaaacatgctcagtacctgtgttgagaaaaggctttctttatcctaaagattattacctttttaaagtgctcttatattttcatgagtttttattttgtctctgagattttgtattccacattctagggtattctgtaatttggctccttaccaatattattaaaatcttattaaaatct

SEQ ID NO: 53315 - DNA, 991 bp, Homo sapiens
  misc_feature (29)..(29): n is a, c, g, or t
cggtacccccaccacctcatctgcacctnatctgcagcaaatacttcactgctacatgtgctggaaggacaaataaataattgtggttgtgttcttaatggggacgagcagacacactgatctgaacatctggcccaagtgaagcatggcatatagtgcccttggaagaaaattaggcctcaaatgacagtagcattgaagtgtttgctgcagagttgagggaaacccccagccaccctcccggaatccgagatagggtggcacatctgtcctgacagacgaggagtgtaactgaaccaggaatatttcctccattcctgctctcccactgcacacagggtggtggcacattatccctctggggggtggggacgcctgttgttttggctcaatttgggtttgttggtcacatggagctcttccatttcgtttagctgaataatgagttgttcctagaggagacagcctgtctctccttgttgcccccaaagcccatgccctgccgtggtggcagctggggctgtggatgggaggggtccccaacatggatgtgttgcccctcctccgcatgccaacgcagttcatgtacaaggcccctctgcaactggagagaaaattaattcctatcccgtgagtggattgtgagaaattccacccacgtggagacagcttactgcagcactgttggtgttcggagctcttctgtgccctggctccatgctttcacctacacaagcatcaccttcctaatcaccgcggggcggggagcgtgtggctgtgccccttctctttaatctcatttaatttttattaaacatgctcagtacctgtgttgagaaaaggctttctttatcctaaagattattacctttttaaagtgctcttatattttcatgagtttttattttgtctctgagattttgtattccacattctagggtattctgtaatttggctccttaccaatattattaaaatcttattaaaatct

SEQ ID NO: 53316 - DNA, 904 bp, Homo sapiens
agcggagggcttcgggcccccggggccagccgccgtcctgcgaacgcgcggcgcccgggccgctgcccccttccggccccgcggcggccccgcctcctcccccgacttccttccctgagcacggcggcggcggggacgagcaccggcctgcgcgcggagccggcaccggatggtgggcgggggccagccgtgcggacccaacatgagtgaagtttcctgcaagaaacgggacgactatttggaatggccagagtattttatggctgtggccttcttatcagcacagagaagcaaagatccaaattcccaggtcggcgcctgcatcgtgaattcagaaaacaagattgtcgggattgggtacaatgggatgccaaatgggtgcagtgatgacgtgttgccttggagaaggacagcagagaataagctggacaccaaatacccgtacgtgtgccatgcggagctgaatgccatcatgaacaaaaattcgaccgatgtgaaaggctgtagtatgtatgttgccttgttcccttgtaatgaatgcgctaagctcatcatccaggcaggtataaaagaagtgattttcatgtctgataaataccatgatagtgacgaggcaactgctgcgaggctcctgtttaatatggccggggtgacattccggaaattcataccgaagtgcagcaagattgtcattgactttgattcaattaacagcagaccgagtcaaaagcttcagtgagttacatctcattcaatctccagaagattgggattatcgtcttctaagaggttgctaatgcctttcatcttgaagttacacataacttcttactagccagtatggcaaaagtaggcatctaaagaatataaagcctcaaatcttcaaaaaaccacaaagtcgagc

SEQ ID NO: 53317 - DNA, 778 bp, Homo sapiens
agcggagggcttcgggcccccggggccagccgccgtcctgcgaacgcgcggcgcccgggccgctgcccccttccggccccgcggcggccccgcctcctcccccgacttccttccctgagcacggcggcggcggggacgagcaccggcctgcgcgcggagccggcaccggatgacccaacatgagtgaagtttcctgcaagaaacgggacgactatttggaatggccagagtattttatggctgtggccttcttatcagcacagagaagcaaagatccaaattcccaggtcggcgcctgcatcgtgaattcagaaaacaagattgtcgggattgggtacaatgggatgccaaatgggtgcagtgatgacgtgttgccttggagaaggacagcagagaataagctggacaccaaatacccgtacgtgtgccatgcggagctgaatgccatcatgaacaaaaattcgaccgatgtgaaaggctgtagtatgtatgttgccttgttcccttgtaatgaatgcgctaagctcatcatccaggcaggtataaaagaagtgattttcatgtctgataaataccatgatagtgacgaggcaactgctgcgaggctcctgtttaatatggccggggtgacattccggaaattcataccgaagtgcagcaagattgtcattgactttgattcaattaacagcagaccgagtcaaaagcttcagtgagttacatctcattcaatcttttccccccccaagggtaaaaaaaaggggggtaaatatttttt

SEQ ID NO: 53318 - DNA, 1038 bp, Homo sapiens
tccggccaccgccgcgtggcaccgtcccgagcgcgtggcgcggggcgctggctgccgggcgggggcctggggccgcggacgctgggggcgcctcggccgcgctcagcctttagatcggagaatgcgggcggggtgggggcgctcggggtccccgcagtcactccagggtcgatttctcggcgggcgccgcggcctgtgcgaggccgggccccttggagtgccccgggaggtggtgctgggcgtctgaacaccacatcccttcctgcgcccgtgtgtgggttgggaatgccgggtgtaggccctggatcagagctgacggggttgcgagcggcgtggggtgtgcctgggacggtgaccggatgtgtcttcctgaatcgttgtattcgagctccagttctctctgtttctacagctgggcctcagtcctcacagggctctagtgggcgttcagccacaccaggagaaggcgcccaggggattaacaggacccttccctctcctgctcttccctcgccccccatggctccccctccctcctatttagtaggtacttctccagcaccccacagcgatgatggatgctggccctaaagccaggcactgccgccctgcactgtagcagatgcctaaataaagtgtggagcctgaagcagaagttttgggagatgcttgccttcctttagaccacattcctcgcctttctcaagatttctccgtgggacccaccccgtttttgtgttgtcttccttccttgcccttgtttcattccttttgaaagcgaccactcccctgaagtcctaggacccccttcgtgggctctccctgccgtagacagtctctgcttgcccctggtaaactacacccaacatgagtgaagtttcctgcaagaaacgggacgactatttggaatggccagagtattttatggctgtggccttcttatcagcacagagaagcaaagatccaaattcccagcgcgcgatggccatgatgttggagttacgaataccttttgcacgcggaacgtaccaggtgcct

SEQ ID NO: 53319 - DNA, 224 bp, Homo sapiens
  misc_feature (6)..(8): n is a, c, g, or t
  misc_feature (10)..(10): n is a, c, g, or t
  misc_feature (12)..(12): n is a, c, g, or t
  misc_feature (16)..(17): n is a, c, g, or t
  misc_feature (20)..(20): n is a, c, g, or t
  misc_feature (22)..(23): n is a, c, g, or t
  misc_feature (27)..(27): n is a, c, g, or t
  misc_feature (30)..(30): n is a, c, g, or t
aggggnnntntnttanngangnncagngcntgggggggggaaggggggggggtggcctaaagattattacctttttaaagtgctcttatattttcatgagtttttattttgtctctgagattttgtattccacattctagggtattctgtaatttggctccttaccaatattattaaaatcttattaaaatctaccctaccaaagcaaaaaaaaaagtcgacgc

SEQ ID NO: 53320 - DNA, 884 bp, Homo sapiens
agcggagggcttcgggcccccggggccagccgccgtcctgcgaacgcgcggcgcccgggccgctgcccccttccggccccgcggcggccccgcctcctcccccgacttccttccctgagcacggcggcggcggggacgagcaccggcctgcgcgcggagccggcaccggatggtgggcgggggccagccgtgcggacccaacatgagtgaagtttcctgcaagaaacgggacgactatttggaatggccagagtattttatggctgtggccttcttatcagcacagagaagcaaagatccaaattcccaggtcggcgcctgcatcgtgaattcagaaaacaagattgtcgggattgggtacaatgggatgccaaatgggtgcagtgatgacgtgttgccttggagaaggacagcagagaataagctggacaccaaatacccgtacgtgtgccatgcggagctgaatgccatcatgaacaaaaattcgaccgatgtgaaaggctgtagtatgtatgttgccttgttcccttgtaatgaatgcgctaagctcatcatccaggcaggtataaaagaagtgattttcatgtctgataaataccatgatagtgacgaggcaactgctgcgaggctcctgtttaatatggccggggtgacattccggaaattcataccgaagtgcagcaagattgtcattgactttgattcaattaacagcagaccgagtcaaaagcttcagtgagttacatctcattcaatctccagaagattgggattatcgtcttctaagaggttgctaatgcctttcatcttgaagttacacataacttcttactagccagtatggcaaaagtaggcatctaaagaatataaagcctcaaatcttc

SEQ ID NO: 53321 - DNA, 2033 bp, Homo sapiens
agcggagggcttcgggcccccggggccagccgccgtcctgcgaacgcgcggcgcccgggccgctgcccccttccggccccgcggcggccccgcctcctcccccgacttccttccctgagcacggcggcggcggggacgagcaccggcctgcgcgcggagccggcaccggatggtgggcgggggccagccgtgcggacccaacatgagtgaagtttcctgcaagaaacgggacgactatttggaatggccagagtattttatggctgtggccttcttatcagcacagagaagcaaagatccaaattcccaggtcggcgcctgcatcgtgaattcagaaaacaagattgtcgggattgggtacaatgggatgccaaatgggtgcagtgatgacgtgttgccttggagaaggacagcagagaataagctggacaccaaatacccgtacgtgtgccatgcggagctgaatgccatcatgaacaaaaattcgaccgatgtgaaaggctgtagtatgtatgttgccttgttcccttgtaatgaatgcgctaagctcatcatccaggcaggtataaaagaagtgattttcatgtctgataaataccatgatagtgacgaggcaactgctgcgaggctcctgtttaatatggccggggtgacattccggaaattcataccgaagtgcagcaagattgtcattgactttgattcaattaacagcagaccgagtcaaaagcttcagtgagttacatctcattcaatctccagaagattgggattatcgtcttctaagaggttgctaatgcctttcatcttgaagttacacataacttcttactagccagtatggcaaaagtaggcatctaaagaatataaagcctcaaatcttccttactgtctctcttgtcacatggaatctacatgtgtttgaactattgctttaggatttaaaataggggagcctgtggtggcctggtgcacagggctagaacgagagtgcctccccttcttgtgtcctggctggctgggatgctggtggctcttcagaggagcatcagctgtctgtcatctgctgcgatccggcagcctctcttcactgctacatgtgctggaaggacaaataaataattgtggttgtgttcttaatggggacgagcagacacactgatctgaacatctggcccaagtgaagcatggcatatagtgcccttggaagaaaattaggcctcaaatgacagtagcattgaagtgtttgctgcagagttgagggaaacccccagccaccctcccggaatccgagatagggtggcacatctgtcctgacagacgaggagtgtaactgaaccaggaatatttcctccattcctgctctcccactgcacacagggtggtggcacattatccctctggggggtggggacgcctgttgttttggctcaatttgggtttgttggtcacatggagctcttccatttcgtttagctgaataatgagttgttcctagaggagacagcctgtctctccttgttgcccccaaagcccatgccctgccgtggtggcagctggggctgtggatgggaggggtccccaacatggatgtgttgcccctcctccgcatgccaacgcagttcatgtacaaggcccctctgcaactggagagaaaattaattcctatcccgtgagtggattgtgagaaattccacccacgtggagacagcttactgcagcactgttggtgttcggagctcttctgtgccctggctccatgctttcacctacacaagcatcaccttcctaatcaccgcggggcggggagcgtgtggctgtgccccttctctttaatctcatttaatttttattaaacatgctcagtacctgtgttgagaaaaggctttctttatcctaaagattattacctttttaaagtgctcttatattttcatgagtttttattttgtctctgagattttgtattccacattctagggtattctgtaatttggctccttaccaatattattaaaatcttattaaaatct

SEQ ID NO: 53322 - DNA, 2558 bp, Homo sapiens
tccggccaccgccgcgtggcaccgtcccgagcgcgtggcgcggggcgctggctgccgggcgggggcctggggccgcggacgctgggggcgcctcggccgcgctcagcctttagatcggagaatgcgggcggggtgggggcgctcggggtccccgcagtcactccagggtcgatttctcggcgggcgccgcggcctgtgcgaggccgggccccttggagtgccccgggaggtggtgctgggcgtctgaacaccacatcccttcctgcgcccgtgtgtgggttgggaatgccgggtgtaggccctggatcagagctgacggggttgcgagcggcgtggggtgtgcctgggacggtgaccggatgtgtcttcctgaatcgttgtattcgagctccagttctctctgtttctacagctgggcctcagtcctcacagggctctagtgggcgttcagccacaccaggagaaggcgcccaggggattaacaggacccttccctctcctgctcttccctcgccccccatggctccccctccctcctatttagtaggtacttctccagcaccccacagcgatgatggatgctggccctaaagccaggcactgccgccctgcactgtagcagatgcctaaataaagtgtggagcctgaagcagaagttttgggagatgcttgccttcctttagaccacattcctcgcctttctcaagatttctccgtgggacccaacatgagtgaagtttcctgcaagaaacgggacgactatttggaatggccagagtattttatggctgtggccttcttatcagcacagagaagcaaagatccaaattcccaggtcggcgcctgcatcgtgaattcagaaaacaagattgtcgggattgggtacaatgggatgccaaatgggtgcagtgatgacgtgttgccttggagaaggacagcagagaataagctggacaccaaatacccgtacgtgtgccatgcggagctgaatgccatcatgaacaaaaattcgaccgatgtgaaaggctgtagtatgtatgttgccttgttcccttgtaatgaatgcgctaagctcatcatccaggcaggtataaaagaagtgattttcatgtctgataaataccatgatagtgacgaggcaactgctgcgaggctcctgtttaatatggccggggtgacattccggaaattcataccgaagtgcagcaagattgtcattgactttgattcaattaacagcagaccgagtcaaaagcttcagtgagttacatctcattcaatctccagaagattgggattatcgtcttctaagaggttgctaatgcctttcatcttgaagttacacataacttcttactagccagtatggcaaaagtaggcatctaaagaatataaagcctcaaatcttccttactgtctctcttgtcacatggaatctacatgtgtttgaactattgctttaggatttaaaataggggagcctgtggtggcctggtgcacagggctagaacgagagtgcctccccttcttgtgtcctggctggctgggatgctggtggctcttcagaggagcatcagctgtctgtcatctgctgcgatccggcagcctctcttcactgctacatgtgctggaaggacaaataaataattgtggttgtgttcttaatggggacgagcagacacactgatctgaacatctggcccaagtgaagcatggcatatagtgcccttggaagaaaattaggcctcaaatgacagtagcattgaagtgtttgctgcagagttgagggaaacccccagccaccctcccggaatccgagatagggtggcacatctgtcctgacagacgaggagtgtaactgaaccaggaatatttcctccattcctgctctcccactgcacacagggtggtggcacattatccctctggggggtggggacgcctgttgttttggctcaatttgggtttgttggtcacatggagctcttccatttcgtttagctgaataatgagttgttcctagaggagacagcctgtctctccttgttgcccccaaagcccatgccctgccgtggtggcagctggggctgtggatgggaggggtccccaacatggatgtgttgcccctcctccgcatgccaacgcagttcatgtacaaggcccctctgcaactggagagaaaattaattcctatcccgtgagtggattgtgagaaattccacccacgtggagacagcttactgcagcactgttggtgttcggagctcttctgtgccctggctccatgctttcacctacacaagcatcaccttcctaatcaccgcggggcggggagcgtgtggctgtgccccttctctttaatctcatttaatttttattaaacatgctcagtacctgtgttgagaaaaggctttctttatcctaaagattattacctttttaaagtgctcttatattttcatgagtttttattttgtctctgagattttgtattccacattctagggtattctgtaatttggctccttaccaatattattaaaatcttattaaaatct

SEQ ID NO: 53323 - DNA, 2156 bp, Homo sapiens
agcggagggcttcgggcccccggggccagccgccgtcctgcgaacgcgcggcgcccgggccgctgcccccttccggccccgcggcggccccgcctcctcccccgacttccttccctgagcacggcggcggcggggacgagcaccggcctgcgcgcggagccggcaccggatggtgggcgggggccagccgtgcgggcactgccgccctgcactgtagcagatgcctaaataaagtgtggagcctgaagcagaagttttgggagatgcttgccttcctttagaccacattcctcgcctttctcaagatttctccgtgggacccaacatgagtgaagtttcctgcaagaaacgggacgactatttggaatggccagagtattttatggctgtggccttcttatcagcacagagaagcaaagatccaaattcccaggtcggcgcctgcatcgtgaattcagaaaacaagattgtcgggattgggtacaatgggatgccaaatgggtgcagtgatgacgtgttgccttggagaaggacagcagagaataagctggacaccaaatacccgtacgtgtgccatgcggagctgaatgccatcatgaacaaaaattcgaccgatgtgaaaggctgtagtatgtatgttgccttgttcccttgtaatgaatgcgctaagctcatcatccaggcaggtataaaagaagtgattttcatgtctgataaataccatgatagtgacgaggcaactgctgcgaggctcctgtttaatatggccggggtgacattccggaaattcataccgaagtgcagcaagattgtcattgactttgattcaattaacagcagaccgagtcaaaagcttcagtgagttacatctcattcaatctccagaagattgggattatcgtcttctaagaggttgctaatgcctttcatcttgaagttacacataacttcttactagccagtatggcaaaagtaggcatctaaagaatataaagcctcaaatcttccttactgtctctcttgtcacatggaatctacatgtgtttgaactattgctttaggatttaaaataggggagcctgtggtggcctggtgcacagggctagaacgagagtgcctccccttcttgtgtcctggctggctgggatgctggtggctcttcagaggagcatcagctgtctgtcatctgctgcgatccggcagcctctcttcactgctacatgtgctggaaggacaaataaataattgtggttgtgttcttaatggggacgagcagacacactgatctgaacatctggcccaagtgaagcatggcatatagtgcccttggaagaaaattaggcctcaaatgacagtagcattgaagtgtttgctgcagagttgagggaaacccccagccaccctcccggaatccgagatagggtggcacatctgtcctgacagacgaggagtgtaactgaaccaggaatatttcctccattcctgctctcccactgcacacagggtggtggcacattatccctctggggggtggggacgcctgttgttttggctcaatttgggtttgttggtcacatggagctcttccatttcgtttagctgaataatgagttgttcctagaggagacagcctgtctctccttgttgcccccaaagcccatgccctgccgtggtggcagctggggctgtggatgggaggggtccccaacatggatgtgttgcccctcctccgcatgccaacgcagttcatgtacaaggcccctctgcaactggagagaaaattaattcctatcccgtgagtggattgtgagaaattccacccacgtggagacagcttactgcagcactgttggtgttcggagctcttctgtgccctggctccatgctttcacctacacaagcatcaccttcctaatcaccgcggggcggggagcgtgtggctgtgccccttctctttaatctcatttaatttttattaaacatgctcagtacctgtgttgagaaaaggctttctttatcctaaagattattacctttttaaagtgctcttatattttcatgagtttttattttgtctctgagattttgtattccacattctagggtattctgtaatttggctccttaccaatattattaaaatcttattaaaatct

SEQ ID NO: 53324 - DNA, 2064 bp, Homo sapiens
agcggagggcttcgggcccccggggccagccgccgtcctgcgaacgcgcggcgcccgggccgctgcccccttccggccccgcggcggccccgcctcctcccccgacttccttccctgagcacggcggcggcggggacgagcaccggcctgcgcgcggagccggcaccggatggtgggcgggggccagccgtgcggacccaacatgagtgaagtttcctgcaagaaacgggacgactatttggaatggccagagtattttatggctgtggccttcttatcagcacagagaagcaaagatccaaattcccaggtcggcgcctgcatcgtgaattcagaaaacaagattgtcgggattgggtacaatgggatgccaaatgggtgcagtgatgacgtgttgccttggagaaggacagcagagaataagctggacaccaaatacccgtacgtgtgccatgcggagctgaatgccatcatgaacaaaaattcgaccgatgtgaaaggctgtagtatgtatgttgccttgttcccttgtaatgaatgcgctaagctcatcatccaggcaggtataaaagaagtgattttcatgtctgataaataccatgatagtgacgaggcaactgctgcgaggctcctgtttaatatggccggggtgacattccggaaattcataccgaagtgcagcaagattgtcattgactttgattcaattaacagcagaccgagtcaaaagcttcagtgagttacatctcattcaatctccagaagattgggattatcgtcttctaagaggttgctaatgcctttcatcttgaagttacacataacttcttactagccagtatggcaaaagtaggcatctaaagaatataaagcctcaaatcttccttactgtctctcttgtcacatggaatctacatgtgtttgaactattgctttaggatttaaaataggggagcctgtggtggcctggtgcacagggctagaacgagagtgcctccccttcttgtgtcctggctggctgggatgctggtggctcttcagaggagcatcagctgtctgtcatctgctgcgatccggcagcctctcttcactgctacatgtgctggaaggacaaataaataattgtggttgtgttcttaatggggacgagcagacacactgatctgaacatctggcccaagtgaagcatggcatatagtgcccttggaagaaaattaggcctcaaatgacagtagcattgaagtgtttgctgcagagttgagggaaacccccagccaccctcccggaatccgagatagggtggcacatctgtcctgacagacgaggagtgtaactgaaccaggaatatttcctccattcctgctctcccactgcacacagggtggtggcacattatccctctggggggtggggacgcctgttgttttggctcaatttgggtttgttggtcacatggagctcttccatttcgtttagctgaataatgagttgttcctagaggagacagcctgtctctccttgttgcccccaaagcccatgccctgccgtggtggcagctggggctgtggatgggaggggtccccaacatggatgtgttgcccctcctccgcatgccaacgcagttcatgtacaaggcccctctgcaactggagagaaaattaattcctatcccgtgagtggattgtgagaaattccacccacgtggagacagcttactgcagcactgttggtgttcggagctcttctgtgccctggctccatgctttcacctacacaagcatcaccttcctaatcaccgcggggcggggagcgtgtggctgtgccccttctctttaatctcatttaatttttattaaacatgctcagtacctgtgttgagaaaaggctttctttatcctaaagattattacctttttaaagtgctcttatattttcatgagtttttattttgtctctgagattttgtattccacattctagggtattctgtaatttggctccttaccaatattattaaaatcttattaaaatctaccctaccaaagcaaaaaaaaaagtcgacgc

SEQ ID NO: 53325 - DNA, 1897 bp, Homo sapiens
agcggagggcttcgggcccccggggccagccgccgtcctgcgaacgcgcggcgcccgggccgctgcccccttccggccccgcggcggccccgcctcctcccccgacttccttccctgagcacggcggcggcggggacgagcaccggcctgcgcgcggagccggcaccggatggtgggcgggggccagccgtgcggacccaacatgagtgaagtttcctgcaagaaacgggacgactatttggaatggccagagtattttatggctgtggccttcttatcagcacagagaagcaaagatccaaattcccagtgtgccatgcggagctgaatgccatcatgaacaaaaattcgaccgatgtgaaaggctgtagtatgtatgttgccttgttcccttgtaatgaatgcgctaagctcatcatccaggcaggtataaaagaagtgattttcatgtctgataaataccatgatagtgacgaggcaactgctgcgaggctcctgtttaatatggccggggtgacattccggaaattcataccgaagtgcagcaagattgtcattgactttgattcaattaacagcagaccgagtcaaaagcttcagtgagttacatctcattcaatctccagaagattgggattatcgtcttctaagaggttgctaatgcctttcatcttgaagttacacataacttcttactagccagtatggcaaaagtaggcatctaaagaatataaagcctcaaatcttccttactgtctctcttgtcacatggaatctacatgtgtttgaactattgctttaggatttaaaataggggagcctgtggtggcctggtgcacagggctagaacgagagtgcctccccttcttgtgtcctggctggctgggatgctggtggctcttcagaggagcatcagctgtctgtcatctgctgcgatccggcagcctctcttcactgctacatgtgctggaaggacaaataaataattgtggttgtgttcttaatggggacgagcagacacactgatctgaacatctggcccaagtgaagcatggcatatagtgcccttggaagaaaattaggcctcaaatgacagtagcattgaagtgtttgctgcagagttgagggaaacccccagccaccctcccggaatccgagatagggtggcacatctgtcctgacagacgaggagtgtaactgaaccaggaatatttcctccattcctgctctcccactgcacacagggtggtggcacattatccctctggggggtggggacgcctgttgttttggctcaatttgggtttgttggtcacatggagctcttccatttcgtttagctgaataatgagttgttcctagaggagacagcctgtctctccttgttgcccccaaagcccatgccctgccgtggtggcagctggggctgtggatgggaggggtccccaacatggatgtgttgcccctcctccgcatgccaacgcagttcatgtacaaggcccctctgcaactggagagaaaattaattcctatcccgtgagtggattgtgagaaattccacccacgtggagacagcttactgcagcactgttggtgttcggagctcttctgtgccctggctccatgctttcacctacacaagcatcaccttcctaatcaccgcggggcggggagcgtgtggctgtgccccttctctttaatctcatttaatttttattaaacatgctcagtacctgtgttgagaaaaggctttctttatcctaaagattattacctttttaaagtgctcttatattttcatgagtttttattttgtctctgagattttgtattccacattctagggtattctgtaatttggctccttaccaatattattaaaatcttattaaaatct

SEQ ID NO: 53326 - DNA, 2509 bp, Homo sapiens
  misc_feature (2379)..(2379): n is a, c, g, or t
  misc_feature (2386)..(2386): n is a, c, g, or t
  misc_feature (2394)..(2394): n is a, c, g, or t
agcggagggcttcgggcccccggggccagccgccgtcctgcgaacgcgcggcgcccgggccgctgcccccttccggccccgcggcggccccgcctcctcccccgacttccttccctgagcacggcggcggcggggacgagcaccggcctgcgcgcggagccggcaccggatggtgggcgggggccagccgtgcggacccaacatgagtgaagtttcctgcaagaaacgggacgactatttggaatggccagagtattttatggctgtggccttcttatcagcacagagaagcaaagatccaaattcccaggtcggcgcctgcatcgtgaattcagaaaacaagattgtcgggattgggtacaatgggatgccaaatgggtgcagtgatgacgtgttgccttggagaaggacagcagagaataagctggacaccaaatacccgtacgtgtgccatgcggagctgaatgccatcatgaacaaaaattcgaccgatgtgaaaggctgtagtatgtatgttgccttgttcccttgtaatgaatgcgctaagctcatcatccaggcaggtataaaagaagtgattttcatgtctgataaataccatgatagtgacgaggcaactgctgcgaggctcctgtttaatatggccggggtgacattccggaaattcataccgaagtgcagcaagattgtcattgactttgattcaattaacagcagaccgagtcaaaagcttcagtgagttacatctcattcaatctccagaagattgggattatcgtcttctaagaggttgctaatgcctttcatcttgaagttacacataacttcttactagccagtatggcaaaagtaggcatctaaagaatataaagcctcaaatcttccttactgtctctcttgtcacatggaatctacatgtgtttgaactattgctttaggatttaaaataggggagcctgtggtggcctggtgcacagggctagaacgagagtgcctccccttcttgtgtcctggctggctgggatgctggtggctcttcagaggagcatcagctgtctgtcatctgctgcgatccggcagcctctcttcactgctacatgtgctggaaggacaaataaataattgtggttgtgttcttaatggggacgagcagacacactgatctgaacatctggcccaagtgaagcatggcatatagtgcccttggaagaaaattaggcctcaaatgacagtagcattgaagtgtttgctgcagagttgagggaaacccccagccaccctcccggaatccgagatagggtggcacatctgtcctgacagacgaggagtgtaactgaaccaggaatatttcctccattcctgctctcccactgcacacagggtggtggcacattatccctctggggggtggggacgcctgttgttttggctcaatttgggtttgttggtcacatggagctcttccatttcgtttagctgaataatgagttgttcctagaggagacagcctgtctctccttgttgcccccaaagcccatgccctgccgtggtggcagctggggctgtggatgggaggggtccccaacatggatgtgttgcccctcctccgcatgccaacgcagttcatgtacaaggcccctctgcaactggagagcagcttactgcagcactgttggtgttcggagctcttctgtgccctggctccatgctttcacctacacaagcatcaccttcctaatcaccgcggggcggggagcgtgtggctgtgccccttctctttaatctcatttaatttttattaaacatgctcagtacctgtgttgagaaaaggctttctttatcctaaagattattacctttttaaagtgctcttatattttgtactgagcatgtttaataaaaattaaatgagattaaagagaaggggcacagccacacgctccccgccccgcggtgattaggaaggtgatgcttgtgtaggtgaaagcatggagccagggcacagaagagctccgaacaccaacagtgctgcagtaagctgtctccacgtgggtggaatttctcacaatccactcacgggataggaattaattttctctccagttgcagaggggccttgtacatgaactgcgttggcatgcggaggaggggcaacacatccatgttggggacccctcccatccacagccccagctgccaccacggcagggcatgggctttgggggcaacaaggagagacaggctgtctcctctaggaacaactcattattcagctaaacgaaatggaagagctccatgtgaccaacaaacccaaattgagccaaaacaacagcgtccccacccccagagggataatgtgcacaccctgtgtgcagtggnagagcangaatggangaattattcttggttcagtttaactcctcggcctgcaggggaagtgtgcgcacctaattctggatttcggggagggggggggggggttttcctcaaattttgcagacaaaccctt

SEQ ID NO: 53327 - DNA, 1852 bp, Homo sapiens
agcggagggcttcgggcccccggggccagccgccgtcctgcgaacgcgcggcgcccgggccgctgcccccttccggccccgcggcggccccgcctcctcccccgacttccttccctgagcacggcggcggcggggacgagcaccggcctgcgcgcggagccggcaccggatgacccaacatgagtgaagtttcctgcaagaaacgggacgactatttggaatggccagagtattttatggctgtggccttcttatcagcacagagaagcaaagatccaaattcccagcagagaataagctggacaccaaatacccgtacgtgtgccatgcggagctgaatgccatcatgaacaaaaattcgaccgatgtgaaaggctgtagtatgtatgttgccttgttcccttgtaatgaatgcgctaagctcatcatccaggcaggtataaaagaagtgattttcatgtctgataaataccatgatagtgacgaggcaactgctgcgaggctcctgtttaatatggccggggtgacattccggaaattcataccgaagtgcagcaagattgtcattgactttgattcaattaacagcagaccgagtcaaaagcttcagtgagttacatctcattcaatctccagaagattgggattatcgtcttctaagaggttgctaatgcctttcatcttgaagttacacataacttcttactagccagtatggcaaaaatggaatctacatgtgtttgaactattgctttaggatttaaaataggggagcctgtggtggcctggtgcacagggctagaacgagagtgcctccccttcttgtgtcctggctggctgggatgctggtggctcttcagaggagcatcagctgtctgtcatctgctgcgatccggcagcctctcttcactgctacatgtgctggaaggacaaataaataattgtggttgtgttcttaatggggacgagcagacacactgatctgaacatctggcccaagtgaagcatggcatatagtgcccttggaagaaaattaggcctcaaatgacagtagcattgaagtgtttgctgcagagttgagggaaacccccagccaccctcccggaatccgagatagggtggcacatctgtcctgacagacgaggagtgtaactgaaccaggaatatttcctccattcctgctctcccactgcacacagggtggtggcacattatccctctggggggtggggacgcctgttgttttggctcaatttgggtttgttggtcacatggagctcttccatttcgtttagctgaataatgagttgttcctagaggagacagcctgtctctccttgttgcccccaaagcccatgccctgccgtggtggcagctggggctgtggatgggaggggtccccaacatggatgtgttgcccctcctccgcatgccaacgcagttcatgtacaaggcccctctgcaactggagagaaaattaattcctatcccgtgagtggattgtgagaaattccacccacgtggagacagcttactgcagcactgttggtgttcggagctcttctgtgccctggctccatgctttcacctacacaagcatcaccttcctaatcaccgcggggcggggagcgtgtggctgtgccccttctctttaatctcatttaatttttattaaacatgctcagtacctgtgttgagaaaaggctttctttatcctaaagattattacctttttaaagtgctcttatattttcatgagtttttattttgtctctgagattttgtattccacattctagggtattctgtaatttggctccttaccaatattattaaaatcttattaaaatct

SEQ ID NO: 53328 - DNA, 1966 bp, Homo sapiens
tccggccaccgccgcgtggcaccgtcccgagcgcgtggcgcggggcgctggctgccgggcgggggcctggggccgcggacgctgggggcgcctcggccgcgctcagcctttagatcggagaatgcgggcggggtgggggcgctcggggtccccgcagtcactccagggtcgatttctcggcgggcgccgcggcctgtgcgaggccgggccccttggagtgccccgggaggtggtgctgggcgtctgaacaccacatcccttcctgcgcccgtgtgtgggttgggaatgccgggtgtaggccctggatcagagctgacggggttgcgagcggcgtggggtgtgcctgggacggtgaccggatgtgtcttcctgaatcgttgtattcgagctccagttctctctgtttctacagctgggcctcagtcctcacagggctctagtgggcgttcagccacaccaggagaaggcgcccaggggattaacaggacccttccctctcctgctcttccctcgccccccatggctccccctccctcctatttagtaggtacttctccagcaccccacagcgatgatggatgctggccctaaagccaggcactgccgccctgcactgtagcagatgcctaaataaagtgtggagcctgaagcagaagttttgggagatgcttgccttcctttagaccacattcctcgcctttctcaagatttctccgtgggacccaacatgagtgaagtttcctgcaagaaacgggacgactatttggaatggccagagtattttatggctgtggccttcttatcagcacagagaagcaaagatccaaattcccaggtcggcgcctgcatcgtgaattcagaaaacaagattgtcgggattgggtacaatgggatgccaaatgggtgcagtgatgacgtgttgccttggagaaggacagcagagaataagctggacaccaaatacccgtacgtgtgccatgcggagctgaatgccatcatgaacaaaaattcgaccgatgtgaaaggctgtagtatgtatgttgccttgttcccttgtaatgaatgcgctaagctcatcatccaggcaggtataaaagaagtgattttcatgtctgataaataccatgatagtgacgaggcaactgctgcgaggctcctgtttaatatggccggggtgacattccggaaattcataccgaagtgcagcaagattgtcattgactttgattcaattaacagcagaccgagtcaaaagcttcaacgctccacactcatgctcagagcagcattattcacagcagccaggaggggacgtcgcccaggtgttcctcggtggatgaatggataaagaaaatgtaaacacacagtggaatcttactcagccttgaaaaggaaggaaagtccatccaacacatgctactgcatggacgaactttggacagtgagctaagtgaaaggagacagtcacaaaaggacaaataccagatgatcccacctgcgcgagatgatagacagagtctcactacattgcccaggctggtctcaaactcctcgcctcaagcaatcttcctgttactggaaaggagacctgatccagaccccaagagagggttcttggacctcacacaagaattcgagatgaatccatagagtaaagtgaaagccagtttattaagcaagtaaaggaattaaagaatggctactccataggcagagcagccccgagggcttgctgtgcccaattttaaaggtatttctcgatgatgtgctaagtaagaggtggattattcaggtcttcgtcttttagaccatgtagggtgacttcctgatgttggcatggacttgccatcacggcgctgttgagagtgtatagcaatgaggacgaccagaggtcactctcaattgcctccttgcttttgcggggtttagccggcttctttaacgaacctcgtttatgcagggcctc

SEQ ID NO: 53329 - DNA, 1261 bp, Homo sapiens
tccggccaccgccgcgtggcaccgtcccgagcgcgtggcgcggggcgctggctgccgggcgggggcctggggccgcggacgctgggggcgcctcggccgcgctcagcctttagatcggagaatgcgggcggggtgggggcgctcggggtccccgcagtcactccagggtcgatttctcggcgggcgccgcggcctgtgcgaggccgggccccttggagtgccccgggaggtggtgctgggcgtctgaacaccacatcccttcctgcgcccgtgtgtgggttgggaatgccgggtgtaggccctggatcagagctgacggggttgcgagcggcgtggggtgtgcctgggacggtgaccggatgtgtcttcctgaatcgttgtattcgagctccagttctctctgtttctacagctgggcctcagtcctcacagggctctagtgggcgttcagccacaccaggagaaggcgcccaggggattaacaggacccttccctctcctgctcttccctcgccccccatggctccccctccctcctatttagtaggtacttctccagcaccccacagcgatgatggatgctggccctaaagccaggcactgccgccctgcactgtagcagatgcctaaataaagtgtggagcctgaagcagaagttttgggagatgcttgccttcctttagaccacattcctcgcctttctcaagatttctccgtgggacccaccccgtttttgtgttgtcttccttccttgcccttgtttcattccttttgaaagcgaccactcccctgaagtcctaggacccccttcgtgggctctccctgccgtagacagtctctgcttgcccctggtaaactacacccaacatgagtgaagtttcctgcaagaaacgggacgactatttggaatggccagagtattttatggctgtggccttcttatcagcacagagaagcaaagatccaaattcccagcatcaccttcctaatcaccgcggggcggggagcgtgtggctgtgccccttctctttaatctcatttaatttttattaaacatgctcagtacctgtgttgagaaaaggctttctttatcctaaagattattacctttttaaagtgctcttatattttcatgagtttttattttgtctctgagattttgtattccacattctagggtattctgtaatttggctccttaccaatattattaaaatcttattaaaatctaccctaccaaagcaaaaaaaaaagtcgacgc

SEQ ID NO: 53330 - DNA, 2897 bp, Homo sapiens
cagccccaaactcaccacctggccgtggacacctgtgtcagcatgtgggacctggttctctccatcgccttgtctgtggggtgcactggtgccgtgcccctcatccagtctcggattgtgggaggctgggagtgtgagaagcattcccaaccctggcaggtggctgtgtacagtcatggatgggcacactgtgggggtgtcctggtgcacccccagtgggtgctcacagctgcccattgcctaaagaagaatagccaggtctggctgggtcggcacaacctgtttgagcctgaagacacaggccagagggtccctgtcagccacagcttcccacacccgctctacaatatgagccttctgaagcatcaaagccttagaccagatgaagactccagccatgacctcatgctgctccgcctgtcagagcctgccaagatcacagatgttgtgaaggtcctgggcctgcccacccaggagccagcactggggaccacctgctacgcctcaggctggggcagcatcgaaccagaggagttcttgcgccccaggagtcttcagtgtgtgagcctccatctcctgtccaatgacatgtgtgctagagcttactctgagaaggtgacagagttcatgttgtgtgctgggctctggacaggtggtaaagacacttgtggggtgagtcatccctactcccaacatctggaggggaaaggggtgattctgggggtccacttgtctgtaatggtgtgcttcaaggtatcacatcatggggccctgagccatgtgccctgcctgaaaagcctgctgtgtacaccaaggtggtgcattaccggaagtggatcaaggacaccatcgcagccaacccctgagtgcccctgtcccacccctacctctagtaaatttaagtccacctcacgttctggcatcacttggcctttctggatgctggacacctgaagcttggaactcacctggccgaagctcgagcctcctgagtcctactgacctgtgctttctggtgtggagtccagggctgctaggaaaaggaatgggcagacacaggtgtatgccaatgtttctgaaatgggtataatttcgtcctctccttcggaacactggctgtctctgaagacttctcgctcagtttcagtgaggacacacacaaagacgtgggtgaccatgttgtttgtggggtgcagagatgggaggggtggggcccaccctggaagagtggacagtgacacaaggtggacactctctacagatcactgaggataagctggagccacaatgcatgaggcacacacacagcaaggatgacgctgtaaacatagcccacgctgtcctgggggcactgggaagcctagataaggccgtgagcagaaagaaggggaggatcctcctatgttgttgaaggagggactagggggagaaactgaaagctgattaattacaggaggtttgttcaggtcccccaaaccaccgtcagatttgatgatttcctagcaggacttacagaaataaagagctatcatgctgtggtttattatggtttgttacattgatgggatacatactgaaatcagcaaacaaaacagatgtatagattagagtgtggagaaaacagaggaaaacttgcagttacgaagactggcaacttggctttactaagttttcagactggcaggaagtcaaacctattaggctgaggaccttgtggagtgtagctgatccagctgatagaggaactagccaggtgggggcctttccctttggatggggggcatatctgacagttattctctccaagtggagacttacggacagcatataattctccctgcaaggatgtatgataatatgtacaaagtaattccaactgaggaagctcacctgatccttagtgtccaaggtttttactgggggtctgtaggacgagtatggagtacttgaataattgacctgaagtcctcagacctgaggttccctagagttcaaacagatacagcatggtccagagtcccagatgtacaaaaacagggattcatcacaaatcccatctttagcatgaagggtctggcatggcccaaggccccaagtatatcaaggcacttgggcagaacatgccaaggaatcaaatgtcatctcccaggagttattcaagggtgagccctttacttgggatgtacaggctttgagcagtgcagggctgctgagtcaaccttttattgtacaggggatgagggaaagggagaggatgaggaagcccccctggggatttggtttggtcttgtgatcaggtggtctatggggctatccctacaaagaagaatccagaaataggggcacattgaggaatgatactgagcccaaagagcattcaatcattgttttatttgccttcttttcacaccattggtgagggagggattaccaccctggggttatgaagatggttgaacaccccacacatagcaccggagatatgagatcaacagtttcttagccatagagattcacagcccagagcaggaggacgctgcacaccatgcaggatgacatgggggatgcgctcgggattggtgtgaagaagcaaggactgttagaggcaggctttatagtaacaagacggtggggcaaactctgatttccgtgggggaatgtcatggtcttgctttactaagttttgagactggcaggtagtgaaactcattaggctgagaaccttgtggaatgcagctgacccagctgatagaggaagtagccaggtgggagcctttcccagtgggtgtgggacatatctggcaagattttgtggcactcctggttacagatactggggcagcaaataaaactgaatcttgttttcagaccttatactgtgtaattgtaagtggaca

SEQ ID NO: 53331 - DNA, 874 bp, Homo sapiens
cagccccaaactcaccacctggccgtggacacctgtgtcagcatgtgggacctggttctctccatcgccttgtctgtggggtgcactggtgccgtgcccctcatccagtctcggattgtgggaggctgggagtgtgagaagcattcccaaccctggcaggtggctgtgtacagtcatggatgggcacactgtgggggtgtcctggtgcacccccagtgggtgctcacagctgcccattgcctaaagaagaatagccaggtctggctgggtcggcacaacctgtttgagcctgaagacacaggccagagggtccctgtcagccacagcttcccacacccgctctacaatatgagccttctgaagcatcaaagccttagaccagatgaagactccagccatgacctcatgctgctccgcctgtcagagcctgccaagatcacagatgttgtgaaggtcctgggcctgcccacccaggagccagcactggggaccacctgctacgcctcaggctggggcagcatcgaaccagaggagttcttgcgccccaggagtcttcagtgtgtgagcctccatctcctgtccaatgacatgtgtgctagagcttactctgagaaggtgacagagttcatgttgtgtgctgggctctggacaggtggtaaagacacttgtgggggtgattctgggggtccacttgtctgtaatggtgtgcttcaaggtatcacatcatggggccctgagccatgtgccctgcctgaaaagcctgctgtgtacaccaaggtggtgcattaccggaagtggatcaaggacaccatcgcagccaacccctgagtgcccctgtcccacccctacctctagtaaatttaagtccacctca

SEQ ID NO: 53332 - DNA, 444 bp, Homo sapiens
  misc_feature (6)..(6): n is a, c, g, or t
  misc_feature (25)..(25): n is a, c, g, or t
  misc_feature (27)..(28): n is a, c, g, or t
gcagcncctactactactaaattcncnncccgtcgacagcgctcagtttcagtgaggacacacacaaagacgtgggtgaccatgttgtttgtggggtgcagagatgggaggggtggggcccaccctggaagagtggacagtgacacaaggtggacactctctacagatcactgaggataagctggagccacaatgcatgaggcacacacacagcaaggatgacgctgtaaacatagcccacgctgtcctgggggcactgggaagcctagataaggccgtgagcagaaagaaggggaggatcctcctatgttgttgaaggagggactagggggagaaactgaaagctgattaattacaggaggtttgttcaggtcccccaaaccaccgtcagatttgatgatttcctagcaggacttacagaaataaagagctatcatgctgtgg

SEQ ID NO: 53333 - DNA, 332 bp, Homo sapiens
  misc_feature (11)..(11): n is a, c, g, or t
ttattattaantccgcccgcttcaccattacaacaaggtggacactctctacagatcactgaggataagctggagccacaatgcatgaggcacacacacagcaaggatgacgctgtaaacatagcccacgctgtcctgggggcactgggaagcctagataaggccgtgagcagaaagaaggggaggatcctcctatgttgttgaaggagggactagggggagaaactgaaagctgattaattacaggaggtttgttcaggtcccccaaaccaccgtcagatttgatgatttcctagcaggacttacagaaataaagagctatcatgctgtgg

SEQ ID NO: 53334 - DNA, 740 bp, Homo sapiens
ggagagagaaagggggacgtggccctgagctgtgggccgggccacccgccactacagagccctcactccagccccagctgcaggtgagccaccctcatgcctctcctcctccccctgctactccacactcctcagatgcccccgtggcctccctcctttttctctcccacactgtatcacccctggcttcctctctgctgtttctccttctctctctgacttcccgcatccttttctcatttgtctatttctcactcccttcctggttctgttctttctcccttcctcttccccatgtctatttcttgctgtctctgtctcttctttgctcatcctaattctcactgttctcccttctgtttttgtcattcctctgccattttatgctctctcttttccacttcgtttctttcagtttctgtctctgcctctctcttttctgtctccctgtgtctgtgtctcccccgtctctgtctctgggtctctctgtggccatctctgtcaccgtgtgtctcaccctgcatctctttgcctgtctttctctctgggtctctgcctcagcccttcctcatcactactgaacacaccccgtgagggtgggtggggagcacccagaaaaaggaaggactttaagctcaatgtgtgtgcatgtgagggggtgcctgtcattgcacagcactctctgcaggacatccctccaccctggggagacacagggagggctgctttcagctgtagcc

SEQ ID NO: 53335 - DNA, 329 bp, Homo sapiens
cagccccaaactcaccacctggccgtggacacctgtgtcagcatgtgggacctggttctctccatcgccttgtctgtggggtgcactgacacacacagcaaggatgacgctgtaaacatagcccacgctgtcctgggggcactgggaagcctagataaggccgtgagcagaaagaaggggaggatcctcctatgttgttgaaggagggactagggggagaaactgaaagctgattaattacaggaggtttgttcaggtcccccaaaccaccgtcagatttgatgatttcctagcaggacttacagaaataaagagctatcatgctgtgg

SEQ ID NO: 53336 - DNA, 514 bp, Homo sapiens
agggcgtgaggaggagcgagggggctgcatggctggagtgagggatcaggggcagggcgcgagatggcctcacacagggaagagagggcccctcctgcagggcctcacctgggccacaggaggacactgcttttcctctgaggagtcaggagctgtggatggtgctggacagaagaaggacagggcctggctcagggtgattctgggggtccacttgtctgtaatggtgtgcttcaaggtatcacatcatggggccctgagccatgtgccctgcctgaaaagcctgctgtgtacaccaaggtggtgcattaccggaagtggatcaaggacaccatcgcagccaacccctgagtgcccctgtcccacccctacctctagtaaatttaagtccacctcacgttctggcatcacttggcctttctggatgctggacacctgaagcttggaactcacctggccgaagctcgagcctcctgtgctactttgccttttgcaaacttattttcatagatga

SEQ ID NO: 53337 - DNA, 3262 bp, Homo sapiens
ggagagagaaagggggacgtggccctgagctgtgggccgggccacccgccactacagagccctcactccagccccagctgcaggtgagccaccctcatgcctctcctcctccccctgctactccacactcctcagatgcccccgtggcctccctcctttttctctcccacactgtatcacccctggcttcctctctgctgtttctccttctctctctgacttcccgcatccttttctcatttgtctatttctcactcccttcctggttctgttctttctcccttcctcttccccatgtctatttcttgctgtctctgtctcttctttgctcatcctaattctcactgttctcccttctgtttttgtcattcctctgccattttatgctctctcttttccacttcgtttctttcagtttctgtctctgcctctcacatgatcacactcctgttttctaactcactgtctgtatttcaccacgactatatctccccgacccctgtgcttttctcactgtttctttttcttccctttggagtctcccttatcctcccctgatccatccctttccccattttctctctcctcatgcatccacccccttcctccccaggaatagccaggtctggctgggtcggcacaacctgtttgagcctgaagacacaggccagagggtccctgtcagccacagcttcccacacccgctctacaatatgagccttctgaagcatcaaagccttagaccagatgaagactccagccatgacctcatgctgctccgcctgtcagagcctgccaagatcacagatgttgtgaaggtcctgggcctgcccacccaggagccagcactggggaccacctgctacgcctcaggctggggcagcatcgaaccagaggagttcttgcgccccaggagtcttcagtgtgtgagcctccatctcctgtccaatgacatgtgtgctagagcttactctgagaaggtgacagagttcatgttgtgtgctgggctctggacaggtggtaaagacacttgtggggtgagtcatccctactcccaacatctggaggggaaaggggtgattctgggggtccacttgtctgtaatggtgtgcttcaaggtatcacatcatggggccctgagccatgtgccctgcctgaaaagcctgctgtgtacaccaaggtggtgcattaccggaagtggatcaaggacaccatcgcagccaacccctgagtgcccctgtcccacccctacctctagtaaatttaagtccacctcacgttctggcatcacttggcctttctggatgctggacacctgaagcttggaactcacctggccgaagctcgagcctcctgagtcctactgacctgtgctttctggtgtggagtccagggctgctaggaaaaggaatgggcagacacaggtgtatgccaatgtttctgaaatgggtataatttcgtcctctccttcggaacactggctgtctctgaagacttctcgctcagtttcagtgaggacacacacaaagacgtgggtgaccatgttgtttgtggggtgcagagatgggaggggtggggcccaccctggaagagtggacagtgacacaaggtggacactctctacagatcactgaggataagctggagccacaatgcatgaggcacacacacagcaaggatgacgctgtaaacatagcccacgctgtcctgggggcactgggaagcctagataaggccgtgagcagaaagaaggggaggatcctcctatgttgttgaaggagggactagggggagaaactgaaagctgattaattacaggaggtttgttcaggtcccccaaaccaccgtcagatttgatgatttcctagcaggacttacagaaataaagagctatcatgctgtggtttattatggtttgttacattgatgggatacatactgaaatcagcaaacaaaacagatgtatagattagagtgtggagaaaacagaggaaaacttgcagttacgaagactggcaacttggctttactaagttttcagactggcaggaagtcaaacctattaggctgaggaccttgtggagtgtagctgatccagctgatagaggaactagccaggtgggggcctttccctttggatggggggcatatctgacagttattctctccaagtggagacttacggacagcatataattctccctgcaaggatgtatgataatatgtacaaagtaattccaactgaggaagctcacctgatccttagtgtccaaggtttttactgggggtctgtaggacgagtatggagtacttgaataattgacctgaagtcctcagacctgaggttccctagagttcaaacagatacagcatggtccagagtcccagatgtacaaaaacagggattcatcacaaatcccatctttagcatgaagggtctggcatggcccaaggccccaagtatatcaaggcacttgggcagaacatgccaaggaatcaaatgtcatctcccaggagttattcaagggtgagccctttacttgggatgtacaggctttgagcagtgcagggctgctgagtcaaccttttattgtacaggggatgagggaaagggagaggatgaggaagcccccctggggatttggtttggtcttgtgatcaggtggtctatggggctatccctacaaagaagaatccagaaataggggcacattgaggaatgatactgagcccaaagagcattcaatcattgttttatttgccttcttttcacaccattggtgagggagggattaccaccctggggttatgaagatggttgaacaccccacacatagcaccggagatatgagatcaacagtttcttagccatagagattcacagcccagagcaggaggacgctgcacaccatgcaggatgacatgggggatgcgctcgggattggtgtgaagaagcaaggactgttagaggcaggctttatagtaacaagacggtggggcaaactctgatttccgtgggggaatgtcatggtcttgctttactaagttttgagactggcaggtagtgaaactcattaggctgagaaccttgtggaatgcagctgacccagctgatagaggaagtagccaggtgggagcctttcccagtgggtgtgggacatatctggcaagattttgtggcactcctggttacagatactggggcagcaaataaaactgaatcttgttttcagaccttatactgtgtaattgtaagtggaca

SEQ ID NO: 53338 - DNA, 3003 bp, Homo sapiens
cagccccaaactcaccacctggccgtggacacctgtgtcagcatgtgggacctggttctctccatcgccttgtctgtggggtgcactggtgccgtgcccctcatccagtctcggattgtgggaggctgggagtgtgagaagcattcccaaccctggcaggtggctgtgtacagtcatggatgggcacactgtgggggtgtcctggtgcacccccagtgggtgctcacagctgcccattgcctaaagaagaatagccaggtctggctgggtcggcacaacctgtttgagcctgaagacacaggccagagggtccctgtcagccacagcttcccacacccgctctacaatatgagccttctgaagcatcaaagccttagaccagatgaagactccagccatgacctcatgctgctccgcctgtcagagcctgccaagatcacagatgttgtgaaggtcctgggcctgcccacccaggagccagcactggggaccacctgctacgcctcaggctggggcagcatcgaaccagaggagttcttgcgccccaggagtcttcagtgtgtgagcctccatctcctgtccaatgacatgtgtgctagagcttactctgagaaggtgacagagttcatgttgtgtgctgggctctggacaggtggtaaagacacttgtgggcataattcacccattcctgtgttgagcacatgcttactgggcacctgctacgtgaccagcattgccgtagaccctgggaagcagcagtgaacagtcaggagctgtggatggtgctggacagaagaaggacagggcctggctcagggtgattctgggggtccacttgtctgtaatggtgtgcttcaaggtatcacatcatggggccctgagccatgtgccctgcctgaaaagcctgctgtgtacaccaaggtggtgcattaccggaagtggatcaaggacaccatcgcagccaacccctgagtgcccctgtcccacccctacctctagtaaatttaagtccacctcacgttctggcatcacttggcctttctggatgctggacacctgaagcttggaactcacctggccgaagctcgagcctcctgagtcctactgacctgtgctttctggtgtggagtccagggctgctaggaaaaggaatgggcagacacaggtgtatgccaatgtttctgaaatgggtataatttcgtcctctccttcggaacactggctgtctctgaagacttctcgctcagtttcagtgaggacacacacaaagacgtgggtgaccatgttgtttgtggggtgcagagatgggaggggtggggcccaccctggaagagtggacagtgacacaaggtggacactctctacagatcactgaggataagctggagccacaatgcatgaggcacacacacagcaaggatgacgctgtaaacatagcccacgctgtcctgggggcactgggaagcctagataaggccgtgagcagaaagaaggggaggatcctcctatgttgttgaaggagggactagggggagaaactgaaagctgattaattacaggaggtttgttcaggtcccccaaaccaccgtcagatttgatgatttcctagcaggacttacagaaataaagagctatcatgctgtggtttattatggtttgttacattgatgggatacatactgaaatcagcaaacaaaacagatgtatagattagagtgtggagaaaacagaggaaaacttgcagttacgaagactggcaacttggctttactaagttttcagactggcaggaagtcaaacctattaggctgaggaccttgtggagtgtagctgatccagctgatagaggaactagccaggtgggggcctttccctttggatggggggcatatctgacagttattctctccaagtggagacttacggacagcatataattctccctgcaaggatgtatgataatatgtacaaagtaattccaactgaggaagctcacctgatccttagtgtccaaggtttttactgggggtctgtaggacgagtatggagtacttgaataattgacctgaagtcctcagacctgaggttccctagagttcaaacagatacagcatggtccagagtcccagatgtacaaaaacagggattcatcacaaatcccatctttagcatgaagggtctggcatggcccaaggccccaagtatatcaaggcacttgggcagaacatgccaaggaatcaaatgtcatctcccaggagttattcaagggtgagccctttacttgggatgtacaggctttgagcagtgcagggctgctgagtcaaccttttattgtacaggggatgagggaaagggagaggatgaggaagcccccctggggatttggtttggtcttgtgatcaggtggtctatggggctatccctacaaagaagaatccagaaataggggcacattgaggaatgatactgagcccaaagagcattcaatcattgttttatttgccttcttttcacaccattggtgagggagggattaccaccctggggttatgaagatggttgaacaccccacacatagcaccggagatatgagatcaacagtttcttagccatagagattcacagcccagagcaggaggacgctgcacaccatgcaggatgacatgggggatgcgctcgggattggtgtgaagaagcaaggactgttagaggcaggctttatagtaacaagacggtggggcaaactctgatttccgtgggggaatgtcatggtcttgctttactaagttttgagactggcaggtagtgaaactcattaggctgagaaccttgtggaatgcagctgacccagctgatagaggaagtagccaggtgggagcctttcccagtgggtgtgggacatatctggcaagattttgtggcactcctggttacagatactggggcagcaaataaaactgaatcttgttttcagaccttatactgtgtaattgtaagtggaca

SEQ ID NO: 53339 - DNA, 2774 bp, Homo sapiens
ggttgtggggggagtgacgatgaggatgacctgggggtggctccaggccttgcccctgcctgggccctcacccagcctccctcacagtctcctggccctcagtctctcccctccactccatcctccatctggcctcagtgggtcattctgatcactgaactgaccatacccagccctgcccacggccctccatggctccccaatgccctggagaggggacatctagctcagagagtagtcctgaagaggtggcctctgcgatgtgcctgtgggggcagcatcctgcagatggtcccggccctcatcctgctgacctgtctgcagggactgtcctcctggaccttgccccttgtgcaggagctggaccctgaagtcccctccccataggccaagactggagccttgttccctctgttggactccctgcccatattcttgtgggagtgggttctggagacatttctgtctgttcctgagagctgggaattgctctcagtcatctgcctgcgcggttctgagagatggagttgcctaggcagttattggggccaatctttctcactgtgtctctcctcctttacccttagggtgattctgggggtccacttgtctgtaatggtgtgcttcaaggtatcacatcatggggccctgagccatgtgccctgcctgaaaagcctgctgtgtacaccaaggtggtgcattaccggaagtggatcaaggacaccatcgcagccaacccctgagtgcccctgtcccacccctacctctagtaaatttaagtccacctcacgttctggcatcacttggcctttctggatgctggacacctgaagcttggaactcacctggccgaagctcgagcctcctgagtcctactgacctgtgctttctggtgtggagtccagggctgctaggaaaaggaatgggcagacacaggtgtatgccaatgtttctgaaatgggtataatttcgtcctctccttcggaacactggctgtctctgaagacttctcgctcagtttcagtgaggacacacacaaagacgtgggtgaccatgttgtttgtggggtgcagagatgggaggggtggggcccaccctggaagagtggacagtgacacaaggtggacactctctacagatcactgaggataagctggagccacaatgcatgaggcacacacacagcaaggatgacgctgtaaacatagcccacgctgtcctgggggcactgggaagcctagataaggccgtgagcagaaagaaggggaggatcctcctatgttgttgaaggagggactagggggagaaactgaaagctgattaattacaggaggtttgttcaggtcccccaaaccaccgtcagatttgatgatttcctagcaggacttacagaaataaagagctatcatgctgtggtttattatggtttgttacattgatgggatacatactgaaatcagcaaacaaaacagatgtatagattagagtgtggagaaaacagaggaaaacttgcagttacgaagactggcaacttggctttactaagttttcagactggcaggaagtcaaacctattaggctgaggaccttgtggagtgtagctgatccagctgatagaggaactagccaggtgggggcctttccctttggatggggggcatatctgacagttattctctccaagtggagacttacggacagcatataattctccctgcaaggatgtatgataatatgtacaaagtaattccaactgaggaagctcacctgatccttagtgtccaaggtttttactgggggtctgtaggacgagtatggagtacttgaataattgacctgaagtcctcagacctgaggttccctagagttcaaacagatacagcatggtccagagtcccagatgtacaaaaacagggattcatcacaaatcccatctttagcatgaagggtctggcatggcccaaggccccaagtatatcaaggcacttgggcagaacatgccaaggaatcaaatgtcatctcccaggagttattcaagggtgagccctttacttgggatgtacaggctttgagcagtgcagggctgctgagtcaaccttttattgtacaggggatgagggaaagggagaggatgaggaagcccccctggggatttggtttggtcttgtgatcaggtggtctatggggctatccctacaaagaagaatccagaaataggggcacattgaggaatgatactgagcccaaagagcattcaatcattgttttatttgccttcttttcacaccattggtgagggagggattaccaccctggggttatgaagatggttgaacaccccacacatagcaccggagatatgagatcaacagtttcttagccatagagattcacagcccagagcaggaggacgctgcacaccatgcaggatgacatgggggatgcgctcgggattggtgtgaagaagcaaggactgttagaggcaggctttatagtaacaagacggtggggcaaactctgatttccgtgggggaatgtcatggtcttgctttactaagttttgagactggcaggtagtgaaactcattaggctgagaaccttgtggaatgcagctgacccagctgatagaggaagtagccaggtgggagcctttcccagtgggtgtgggacatatctggcaagattttgtggcactcctggttacagatactggggcagcaaataaaactgaatcttgttttcagaccttatactgtgtaattgtaagtggaca

SEQ ID NO: 53340 - DNA, 2435 bp, Homo sapiens
tcccgggtcgactactattaatttcgcggccgcgtcgatctgagaaggtgacagagttcatgttgtgtgctgggctctggacaggtggtaaagacacttgtgggcataattcacccattcctgtgttgagcacatgcttactgggcacctgctacgtgaccagcattgccgtagaccctgggaagcagcagtgaacagtcaggagctgtggatggtgctggacagaagaaggacagggcctggctcagggtgattctgggggtccacttgtctgtaatggtgtgcttcaaggtatcacatcatggggccctgagccatgtgccctgcctgaaaagcctgctgtgtacaccaaggtggtgcattaccggaagtggatcaaggacaccatcgcagccaacccctgagtgcccctgtcccacccctacctctagtaaatttaagtccacctcacgttctggcatcacttggcctttctggatgctggacacctgaagcttggaactcacctggccgaagctcgagcctcctgagtcctactgacctgtgctttctggtgtggagtccagggctgctaggaaaaggaatgggcagacacaggtgtatgccaatgtttctgaaatgggtataatttcgtcctctccttcggaacactggctgtctctgaagacttctcgctcagtttcagtgaggacacacacaaagacgtgggtgaccatgttgtttgtggggtgcagagatgggaggggtggggcccaccctggaagagtggacagtgacacaaggtggacactctctacagatcactgaggataagctggagccacaatgcatgaggcacacacacagcaaggatgacgctgtaaacatagcccacgctgtcctgggggcactgggaagcctagataaggccgtgagcagaaagaaggggaggatcctcctatgttgttgaaggagggactagggggagaaactgaaagctgattaattacaggaggtttgttcaggtcccccaaaccaccgtcagatttgatgatttcctagcaggacttacagaaataaagagctatcatgctgtggtttattatggtttgttacattgatgggatacatactgaaatcagcaaacaaaacagatgtatagattagagtgtggagaaaacagaggaaaacttgcagttacgaagactggcaacttggctttactaagttttcagactggcaggaagtcaaacctattaggctgaggaccttgtggagtgtagctgatccagctgatagaggaactagccaggtgggggcctttccctttggatggggggcatatctgacagttattctctccaagtggagacttacggacagcatataattctccctgcaaggatgtatgataatatgtacaaagtaattccaactgaggaagctcacctgatccttagtgtccaaggtttttactgggggtctgtaggacgagtatggagtacttgaataattgacctgaagtcctcagacctgaggttccctagagttcaaacagatacagcatggtccagagtcccagatgtacaaaaacagggattcatcacaaatcccatctttagcatgaagggtctggcatggcccaaggccccaagtatatcaaggcacttgggcagaacatgccaaggaatcaaatgtcatctcccaggagttattcaagggtgagccctttacttgggatgtacaggctttgagcagtgcagggctgctgagtcaaccttttattgtacaggggatgagggaaagggagaggatgaggaagcccccctggggatttggtttggtcttgtgatcaggtggtctatggggctatccctacaaagaagaatccagaaataggggcacattgaggaatgatactgagcccaaagagcattcaatcattgttttatttgccttcttttcacaccattggtgagggagggattaccaccctggggttatgaagatggttgaacaccccacacatagcaccggagatatgagatcaacagtttcttagccatagagattcacagcccagagcaggaggacgctgcacaccatgcaggatgacatgggggatgcgctcgggattggtgtgaagaagcaaggactgttagaggcaggctttatagtaacaagacggtggggcaaactctgatttccgtgggggaatgtcatggtcttgctttactaagttttgagactggcaggtagtgaaactcattaggctgagaaccttgtggaatgcagctgacccagctgatagaggaagtagccaggtgggagcctttcccagtgggtgtgggacatatctggcaagattttgtggcactcctggttacagatactggggcagcaaataaaactgaatcttgttttcagaccttatactgtgtaattgtaagtggaca

SEQ ID NO: 53341 - DNA, 1904 bp, Homo sapiens
ggagagagaaagggggacgtggccctgagctgtgggccgggccacccgccactacagagccctcactccagccccagctgcaggtgagccaccctcatgcctctcctcctccccctgctactccacactcctcagatgcccccgtggcctccctcctttttctctcccacactgtatcacccctggcttcctctctgctgtttctccttctctctctgacttcccgcatccttttctcatttgtctatttctcactcccttcctggttctgttctttctcccttcctcttccccatgtctatttcttgctgtctctgtctcttctttgctcatcctaattctcactgttctcccttctgtttttgtcattcctctgccattttatgctctctcttttccacttcgtttctttcagtttctgtctctgcctctcacatgatcacactcctgttttctaactcactgtctgtatttcaccacgactatatctccccgacccctgtgcttttctcactgtttctttttcttccctttggagtctcccttatcctcccctgatccatccctttccccattttctctctcctcatgcatccacccccttcctccccaggaatagccaggtctggctgggtcggcacaacctgtttgagcctgaagacacaggccagagggtccctgtcagccacagcttcccacacccgctctacaatatgagccttctgaagcatcaaagccttagaccagatgaagactccagccatgacctcatgctgctccgcctgtcagagcctgccaagatcacagatgttgtgaaggtcctgggcctgcccacccaggagccagcactggggaccacctgctacgcctcaggctggggcagcatcgaaccagaggagttcttgcgccccaggagtcttcagtgtgtgagcctccatctcctgtccaatgacatgtgtgctagagcttactctgagaaggtgacagagttcatgttgtgtgctgggctctggacaggtggtaaagacacttgtggggtgagtcatccctactcccaacatctggaggggaaaggggtgattctgggggtccacttgtctgtaatggtgtgcttcaaggtatcacatcatggggccctgagccatgtgccctgcctgaaaagcctgctgtgtacaccaaggtggtgcattaccggaagtggatcaaggacaccatcgcagccaacccctgagtgcccctgtcccacccctacctctagtaaatttaagtccacctcacgttctggcatcacttggcctttctggatgctggacacctgaagcttggaactcacctggccgaagctcgagcctcctgagtcctactgacctgtgctttctggtgtggagtccagggctgctaggaaaaggaatgggcagacacaggtgtatgccaatgtttctgaaatgggtataatttcgtcctctccttcggaacactggctgtctctgaagacttctcgctcagtttcagtgaggacacacacaaagacgtgggtgaccatgttgtttgtggggtgcagagatgggaggggtggggcccaccctggaagagtggacagtgacacaaggtggacactctctacagatcactgaggataagctggagccacaatgcatgaggcacacacacagcaaggatgacgctgtaaacatagcccacgctgtcctgggggcactgggaagcctagataaggccgtgagcagaaagaaggggaggatcctcctatgttgttgaaggagggactagggggagaaactgaaagctgattaattacaggaggtttgttcaggtcccccaaaccaccgtcagatttgatgatttcctagcaggacttacagaaataaagagctatcatgctgtgg

SEQ ID NO: 53342 - DNA, 2965 bp, Homo sapiens
ggagagagaaagggggacgtggccctgagctgtgggccgggccacccgccactacagagccctcactccagccccagctgcaggtgagccaccctcatgcctctcctcctccccctgctactccacactcctcagatgcccccgtggcctccctcctttttctctcccacactgtatcacccctggcttcctctctgctgtttctccttctctctctgacttcccgcatccttttctcatttgtctatttctcactcccttcctggttctgttctttctcccttcctcttccccatgtctatttcttgctgtctctgtctcttctttgctcatcctaattctcactgttctcccttctgtttttgtcattcctctgccattttatgctctctcttttccacttcgtttctttcagtttctgtctctgcctctcacatgatcacactcctgttttctaactcactgtctgtatttcaccacgactatatctccccgacccctgtgcttttctcactgtttctttttcttccctttggagtctcccttatcctcccctgatccatccctttccccattttctctctcctcatgcatccacccccttcctccccaggaatagccaggtctggctgggtcggcacaacctgtttgagcctgaagacacaggccagagggtccctgtcagccacagcttcccacacccgctctacaatatgagccttctgaagcatcaaagccttagaccagatgaagactccagccatgacctcatgctgctccgcctgtcagagcctgccaagatcacagatgttgtgaaggtcctgggcctgcccacccaggagccagcactggggaccacctgctacgcctcaggctggggcagcatcgaaccagaggagttcttgcgccccaggagtcttcagtgtgtgagcctccatccctgtcccacccctacctctagtaaatttaagtccacctcacgttctggcatcacttggcctttctggatgctggacacctgaagcttggaactcacctggccgaagctcgagcctcctgagtcctactgacctgtgctttctggtgtggagtccagggctgctaggaaaaggaatgggcagacacaggtgtatgccaatgtttctgaaatgggtataatttcgtcctctccttcggaacactggctgtctctgaagacttctcgctcagtttcagtgaggacacacacaaagacgtgggtgaccatgttgtttgtggggtgcagagatgggaggggtggggcccaccctggaagagtggacagtgacacaaggtggacactctctacagatcactgaggataagctggagccacaatgcatgaggcacacacacagcaaggatgacgctgtaaacatagcccacgctgtcctgggggcactgggaagcctagataaggccgtgagcagaaagaaggggaggatcctcctatgttgttgaaggagggactagggggagaaactgaaagctgattaattacaggaggtttgttcaggtcccccaaaccaccgtcagatttgatgatttcctagcaggacttacagaaataaagagctatcatgctgtggtttattatggtttgttacattgatgggatacatactgaaatcagcaaacaaaacagatgtatagattagagtgtggagaaaacagaggaaaacttgcagttacgaagactggcaacttggctttactaagttttcagactggcaggaagtcaaacctattaggctgaggaccttgtggagtgtagctgatccagctgatagaggaactagccaggtgggggcctttccctttggatggggggcatatctgacagttattctctccaagtggagacttacggacagcatataattctccctgcaaggatgtatgataatatgtacaaagtaattccaactgaggaagctcacctgatccttagtgtccaaggtttttactgggggtctgtaggacgagtatggagtacttgaataattgacctgaagtcctcagacctgaggttccctagagttcaaacagatacagcatggtccagagtcccagatgtacaaaaacagggattcatcacaaatcccatctttagcatgaagggtctggcatggcccaaggccccaagtatatcaaggcacttgggcagaacatgccaaggaatcaaatgtcatctcccaggagttattcaagggtgagccctttacttgggatgtacaggctttgagcagtgcagggctgctgagtcaaccttttattgtacaggggatgagggaaagggagaggatgaggaagcccccctggggatttggtttggtcttgtgatcaggtggtctatggggctatccctacaaagaagaatccagaaataggggcacattgaggaatgatactgagcccaaagagcattcaatcattgttttatttgccttcttttcacaccattggtgagggagggattaccaccctggggttatgaagatggttgaacaccccacacatagcaccggagatatgagatcaacagtttcttagccatagagattcacagcccagagcaggaggacgctgcacaccatgcaggatgacatgggggatgcgctcgggattggtgtgaagaagcaaggactgttagaggcaggctttatagtaacaagacggtggggcaaactctgatttccgtgggggaatgtcatggtcttgctttactaagttttgagactggcaggtagtgaaactcattaggctgagaaccttgtggaatgcagctgacccagctgatagaggaagtagccaggtgggagcctttcccagtgggtgtgggacatatctggcaagattttgtggcactcctggttacagatactggggcagcaaataaaactgaatcttgttttcagaccttatactgtgtaattgtaagtggaca

SEQ ID NO: 53343 - DNA, 2094 bp, Homo sapiens
  misc_feature (6)..(6): n is a, c, g, or t
  misc_feature (25)..(25): n is a, c, g, or t
  misc_feature (27)..(28): n is a, c, g, or t
gcagcncctactactactaaattcncnncccgtcgacaggacaccatcgcagccaacccctgagtgcccctgtcccacccctacctctagtaaatttaagtccacctcacgttctggcatcacttggcctttctggatgctggacacctgaagcttggaactcacctggccgaagctcgagcctcctgagtcctactgacctgtgctttctggtgtggagtccagggctgctaggaaaaggaatgggcagacacaggtgtatgccaatgtttctgaaatgggtataatttcgtcctctccttcggaacactggctgtctctgaagacttctcgctcagtttcagtgaggacacacacaaagacgtgggtgaccatgttgtttgtggggtgcagagatgggaggggtggggcccaccctggaagagtggacagtgacacaaggtggacactctctacagatcactgaggataagctggagccacaatgcatgaggcacacacacagcaaggatgacgctgtaaacatagcccacgctgtcctgggggcactgggaagcctagataaggccgtgagcagaaagaaggggaggatcctcctatgttgttgaaggagggactagggggagaaactgaaagctgattaattacaggaggtttgttcaggtcccccaaaccaccgtcagatttgatgatttcctagcaggacttacagaaataaagagctatcatgctgtggtttattatggtttgttacattgatgggatacatactgaaatcagcaaacaaaacagatgtatagattagagtgtggagaaaacagaggaaaacttgcagttacgaagactggcaacttggctttactaagttttcagactggcaggaagtcaaacctattaggctgaggaccttgtggagtgtagctgatccagctgatagaggaactagccaggtgggggcctttccctttggatggggggcatatctgacagttattctctccaagtggagacttacggacagcatataattctccctgcaaggatgtatgataatatgtacaaagtaattccaactgaggaagctcacctgatccttagtgtccaaggtttttactgggggtctgtaggacgagtatggagtacttgaataattgacctgaagtcctcagacctgaggttccctagagttcaaacagatacagcatggtccagagtcccagatgtacaaaaacagggattcatcacaaatcccatctttagcatgaagggtctggcatggcccaaggccccaagtatatcaaggcacttgggcagaacatgccaaggaatcaaatgtcatctcccaggagttattcaagggtgagccctttacttgggatgtacaggctttgagcagtgcagggctgctgagtcaaccttttattgtacaggggatgagggaaagggagaggatgaggaagcccccctggggatttggtttggtcttgtgatcaggtggtctatggggctatccctacaaagaagaatccagaaataggggcacattgaggaatgatactgagcccaaagagcattcaatcattgttttatttgccttcttttcacaccattggtgagggagggattaccaccctggggttatgaagatggttgaacaccccacacatagcaccggagatatgagatcaacagtttcttagccatagagattcacagcccagagcaggaggacgctgcacaccatgcaggatgacatgggggatgcgctcgggattggtgtgaagaagcaaggactgttagaggcaggctttatagtaacaagacggtggggcaaactctgatttccgtgggggaatgtcatggtcttgctttactaagttttgagactggcaggtagtgaaactcattaggctgagaaccttgtggaatgcagctgacccagctgatagaggaagtagccaggtgggagcctttcccagtgggtgtgggacatatctggcaagattttgtggcactcctggttacagatactggggcagcaaataaaactgaatcttgttttcagaccttatactgtgtaattgtaagtggaca

SEQ ID NO: 53344 - DNA, 2091 bp, Homo sapiens
  misc_feature (3)..(3): n is a, c, g, or t
  misc_feature (32)..(32): n is a, c, g, or t
gcngccgcctactactactaaattcgcggccngtcggacaccatcgcagccaacccctgagtgcccctgtcccacccctacctctagtaaatttaagtccacctcacgttctggcatcacttggcctttctggatgctggacacctgaagcttggaactcacctggccgaagctcgagcctcctgagtcctactgacctgtgctttctggtgtggagtccagggctgctaggaaaaggaatgggcagacacaggtgtatgccaatgtttctgaaatgggtataatttcgtcctctccttcggaacactggctgtctctgaagacttctcgctcagtttcagtgaggacacacacaaagacgtgggtgaccatgttgtttgtggggtgcagagatgggaggggtggggcccaccctggaagagtggacagtgacacaaggtggacactctctacagatcactgaggataagctggagccacaatgcatgaggcacacacacagcaaggatgacgctgtaaacatagcccacgctgtcctgggggcactgggaagcctagataaggccgtgagcagaaagaaggggaggatcctcctatgttgttgaaggagggactagggggagaaactgaaagctgattaattacaggaggtttgttcaggtcccccaaaccaccgtcagatttgatgatttcctagcaggacttacagaaataaagagctatcatgctgtggtttattatggtttgttacattgatgggatacatactgaaatcagcaaacaaaacagatgtatagattagagtgtggagaaaacagaggaaaacttgcagttacgaagactggcaacttggctttactaagttttcagactggcaggaagtcaaacctattaggctgaggaccttgtggagtgtagctgatccagctgatagaggaactagccaggtgggggcctttccctttggatggggggcatatctgacagttattctctccaagtggagacttacggacagcatataattctccctgcaaggatgtatgataatatgtacaaagtaattccaactgaggaagctcacctgatccttagtgtccaaggtttttactgggggtctgtaggacgagtatggagtacttgaataattgacctgaagtcctcagacctgaggttccctagagttcaaacagatacagcatggtccagagtcccagatgtacaaaaacagggattcatcacaaatcccatctttagcatgaagggtctggcatggcccaaggccccaagtatatcaaggcacttgggcagaacatgccaaggaatcaaatgtcatctcccaggagttattcaagggtgagccctttacttgggatgtacaggctttgagcagtgcagggctgctgagtcaaccttttattgtacaggggatgagggaaagggagaggatgaggaagcccccctggggatttggtttggtcttgtgatcaggtggtctatggggctatccctacaaagaagaatccagaaataggggcacattgaggaatgatactgagcccaaagagcattcaatcattgttttatttgccttcttttcacaccattggtgagggagggattaccaccctggggttatgaagatggttgaacaccccacacatagcaccggagatatgagatcaacagtttcttagccatagagattcacagcccagagcaggaggacgctgcacaccatgcaggatgacatgggggatgcgctcgggattggtgtgaagaagcaaggactgttagaggcaggctttatagtaacaagacggtggggcaaactctgatttccgtgggggaatgtcatggtcttgctttactaagttttgagactggcaggtagtgaaactcattaggctgagaaccttgtggaatgcagctgacccagctgatagaggaagtagccaggtgggagcctttcccagtgggtgtgggacatatctggcaagattttgtggcactcctggttacagatactggggcagcaaataaaactgaatcttgttttcagaccttatactgtgtaattgtaagtggaca

SEQ ID NO: 53345 - DNA, 1910 bp, Homo sapiens
  misc_feature (3)..(3): n is a, c, g, or t
  misc_feature (32)..(32): n is a, c, g, or t
gcngccgcctactactactaaattcgcggccngtcgtccagggctgctaggaaaaggaatgggcagacacaggtgtatgccaatgtttctgaaatgggtataatttcgtcctctccttcggaacactggctgtctctgaagacttctcgctcagtttcagtgaggacacacacaaagacgtgggtgaccatgttgtttgtggggtgcagagatgggaggggtggggcccaccctggaagagtggacagtgacacaaggtggacactctctacagatcactgaggataagctggagccacaatgcatgaggcacacacacagcaaggatgacgctgtaaacatagcccacgctgtcctgggggcactgggaagcctagataaggccgtgagcagaaagaaggggaggatcctcctatgttgttgaaggagggactagggggagaaactgaaagctgattaattacaggaggtttgttcaggtcccccaaaccaccgtcagatttgatgatttcctagcaggacttacagaaataaagagctatcatgctgtggtttattatggtttgttacattgatgggatacatactgaaatcagcaaacaaaacagatgtatagattagagtgtggagaaaacagaggaaaacttgcagttacgaagactggcaacttggctttactaagttttcagactggcaggaagtcaaacctattaggctgaggaccttgtggagtgtagctgatccagctgatagaggaactagccaggtgggggcctttccctttggatggggggcatatctgacagttattctctccaagtggagacttacggacagcatataattctccctgcaaggatgtatgataatatgtacaaagtaattccaactgaggaagctcacctgatccttagtgtccaaggtttttactgggggtctgtaggacgagtatggagtacttgaataattgacctgaagtcctcagacctgaggttccctagagttcaaacagatacagcatggtccagagtcccagatgtacaaaaacagggattcatcacaaatcccatctttagcatgaagggtctggcatggcccaaggccccaagtatatcaaggcacttgggcagaacatgccaaggaatcaaatgtcatctcccaggagttattcaagggtgagccctttacttgggatgtacaggctttgagcagtgcagggctgctgagtcaaccttttattgtacaggggatgagggaaagggagaggatgaggaagcccccctggggatttggtttggtcttgtgatcaggtggtctatggggctatccctacaaagaagaatccagaaataggggcacattgaggaatgatactgagcccaaagagcattcaatcattgttttatttgccttcttttcacaccattggtgagggagggattaccaccctggggttatgaagatggttgaacaccccacacatagcaccggagatatgagatcaacagtttcttagccatagagattcacagcccagagcaggaggacgctgcacaccatgcaggatgacatgggggatgcgctcgggattggtgtgaagaagcaaggactgttagaggcaggctttatagtaacaagacggtggggcaaactctgatttccgtgggggaatgtcatggtcttgctttactaagttttgagactggcaggtagtgaaactcattaggctgagaaccttgtggaatgcagctgacccagctgatagaggaagtagccaggtgggagcctttcccagtgggtgtgggacatatctggcaagattttgtggcactcctggttacagatactggggcagcaaataaaactgaatcttgttttcagaccttatactgtgtaattgtaagtggaca

SEQ ID NO: 53346 - DNA, 1524 bp, Homo sapiens
cagccccaaactcaccacctggccgtggacacctgtgtcagcatgtgggacctggttctctccatcgccttgtctgtggggtgcactggtgccgtgcccctcatccagtctcggattgtgggaggctgggagtgtgagaagcattcccaaccctggcaggtggctgtgtacagtcatggatgggcacactgtgggggtgtcctggtgcacccccagtgggtgctcacagctgcccattgcctaaagaagaatagccaggtctggctgggtcggcacaacctgtttgagcctgaagacacaggccagagggtccctgtcagccacagcttcccacacccgctctacaatatgagccttctgaagcatcaaagccttagaccagatgaagactccagccatgacctcatgctgctccgcctgtcagagcctgccaagatcacagatgttgtgaaggtcctgggcctgcccacccaggagccagcactggggaccacctgctacgcctcaggctggggcagcatcgaaccagaggagttcttgcgccccaggagtcttcagtgtgtgagcctccatctcctgtccaatgacatgtgtgctagagcttactctgagaaggtgacagagttcatgttgtgtgctgggctctggacaggtggtaaagacacttgtgggggtgattctgggggtccacttgtctgtaatggtgtgcttcaaggtatcacatcatggggccctgagccatgtgccctgcctgaaaagcctgctgtgtacaccaaggtggtgcattaccggaagtggatcaaggacaccatcgcagccaacccctgagtgcccctgtcccacccctacctctagtaaatttaagtccacctcacgttctggcatcacttggcctttctggatgctggacacctgaagcttggaactcacctggccgaagctcgagcctcctgagtcctactgacctgtgctttctggtgtggagtccagggctgctaggaaaaggaatgggcagacacaggtgtatgccaatgtttctgaaatgggtataatttcgtcctctccttcggaacactggctgtctctgaagacttctcgctcagtttcagtgaggacacacacaaagacgtgggtgaccatgttgtttgtggggtgcagagatgggaggggtggggcccaccctggaagagtggacagtgacacaaggtggacactctctacagatcactgaggataagctggagccacaatgcatgaggcacacacacagcaaggatgacgctgtaaacatagcccacgctgtcctgggggcactgggaagcctagataaggccgtgagcagaaagaaggggaggatcctcctatgttgttgaaggagggactagggggagaaactgaaagctgattaattacaggaggtttgttcaggtcccccaaaccaccgtcagatttgatgatttcctagcaggacttacagaaataaagagctatcatgctgtggaaaaaaaaaaaaaaagtcgacgc

SEQ ID NO: 53347 - DNA, 1832 bp, Homo sapiens
  misc_feature (3)..(3): n is a, c, g, or t
  misc_feature (32)..(32): n is a, c, g, or t
gcngccgcctactactactaaattcgcggccngtcgccttcggaacactggctgtctctgaagacttctcgctcagtttcagtgaggacacacacaaagacgtgggtgaccatgttgtttgtggggtgcagagatgggaggggtggggcccaccctggaagagtggacagtgacacaaggtggacactctctacagatcactgaggataagctggagccacaatgcatgaggcacacacacagcaaggatgacgctgtaaacatagcccacgctgtcctgggggcactgggaagcctagataaggccgtgagcagaaagaaggggaggatcctcctatgttgttgaaggagggactagggggagaaactgaaagctgattaattacaggaggtttgttcaggtcccccaaaccaccgtcagatttgatgatttcctagcaggacttacagaaataaagagctatcatgctgtggtttattatggtttgttacattgatgggatacatactgaaatcagcaaacaaaacagatgtatagattagagtgtggagaaaacagaggaaaacttgcagttacgaagactggcaacttggctttactaagttttcagactggcaggaagtcaaacctattaggctgaggaccttgtggagtgtagctgatccagctgatagaggaactagccaggtgggggcctttccctttggatggggggcatatctgacagttattctctccaagtggagacttacggacagcatataattctccctgcaaggatgtatgataatatgtacaaagtaattccaactgaggaagctcacctgatccttagtgtccaaggtttttactgggggtctgtaggacgagtatggagtacttgaataattgacctgaagtcctcagacctgaggttccctagagttcaaacagatacagcatggtccagagtcccagatgtacaaaaacagggattcatcacaaatcccatctttagcatgaagggtctggcatggcccaaggccccaagtatatcaaggcacttgggcagaacatgccaaggaatcaaatgtcatctcccaggagttattcaagggtgagccctttacttgggatgtacaggctttgagcagtgcagggctgctgagtcaaccttttattgtacaggggatgagggaaagggagaggatgaggaagcccccctggggatttggtttggtcttgtgatcaggtggtctatggggctatccctacaaagaagaatccagaaataggggcacattgaggaatgatactgagcccaaagagcattcaatcattgttttatttgccttcttttcacaccattggtgagggagggattaccaccctggggttatgaagatggttgaacaccccacacatagcaccggagatatgagatcaacagtttcttagccatagagattcacagcccagagcaggaggacgctgcacaccatgcaggatgacatgggggatgcgctcgggattggtgtgaagaagcaaggactgttagaggcaggctttatagtaacaagacggtggggcaaactctgatttccgtgggggaatgtcatggtcttgctttactaagttttgagactggcaggtagtgaaactcattaggctgagaaccttgtggaatgcagctgacccagctgatagaggaagtagccaggtgggagcctttcccagtgggtgtgggacatatctggcaagattttgtggcactcctggttacagatactggggcagcaaataaaactgaatcttgttttcagaccttatactgtgtaattgtaagtggaca

SEQ ID NO: 53348 - DNA, 2455 bp, Homo sapiens
cagccccaaactcaccacctggccgtggacacctgtgtcagcatgtgggacctggttctctccatcgccttgtctgtggggtgcactggtgccgtgcccctcatccagtctcggattgtgggaggctgggagtgtgagaagcattcccaaccctggcaggtggctgtgtacagtcatggatgggcacactgtgggggtgtcctggtgcacccccagtgggtgctcacagctgcccattgcctaaagaagaatagccaggtctggctgggtcggcacaacctgtttgagcctgaagacacaggccagagggtccctgtcagccacagcttcccacacccgctctacaatatgagccttctgaagcatcaaagccttagaccagatgaagactccagccatgacctcatgctgctccgcctgtcagagcctgccaagatcacagatgttgtgaaggtcctgggcctgcccacccaggagccagcactggggaccacctgctacgcctcaggctggggcagcatcgaaccagaggagttcttgcgccccaggagtcttcagtgtgtgagcctccatctcctgtccaatgacatgtgtgctagagcttactctgagaaggtgacagagttcatgttgtgtgctgggctctggacaggtggtaaagacacttgtgggggtgattctgggggtccacttgtctgtaatggtgtgcttcaaggtatcacatcatggggccctgagccatgtgccctgcctgaaaagcctgctgtgtacaccaaggtggtgcattaccggaagtggatcaaggacaccatcgcagccaacccctgagtgcccctgtcccacccctacctctagtaaatttaagtccacctcacgttctggcatcacttggcctttctggatgctggacacctgaagctagataaggccgtgagcagaaagaaggggaggatcctcctatgttgttgaaggagggactagggggagaaactgaaagctgattaattacaggaggtttgttcaggtcccccaaaccaccgtcagatttgatgatttcctagcaggacttacagaaataaagagctatcatgctgtggtttattatggtttgttacattgatgggatacatactgaaatcagcaaacaaaacagatgtatagattagagtgtggagaaaacagaggaaaacttgcagttacgaagactggcaacttggctttactaagttttcagactggcaggaagtcaaacctattaggctgaggaccttgtggagtgtagctgatccagctgatagaggaactagccaggtgggggcctttccctttggatggggggcatatctgacagttattctctccaagtggagacttacggacagcatataattctccctgcaaggatgtatgataatatgtacaaagtaattccaactgaggaagctcacctgatccttagtgtccaaggtttttactgggggtctgtaggacgagtatggagtacttgaataattgacctgaagtcctcagacctgaggttccctagagttcaaacagatacagcatggtccagagtcccagatgtacaaaaacagggattcatcacaaatcccatctttagcatgaagggtctggcatggcccaaggccccaagtatatcaaggcacttgggcagaacatgccaaggaatcaaatgtcatctcccaggagttattcaagggtgagccctttacttgggatgtacaggctttgagcagtgcagggctgctgagtcaaccttttattgtacaggggatgagggaaagggagaggatgaggaagcccccctggggatttggtttggtcttgtgatcaggtggtctatggggctatccctacaaagaagaatccagaaataggggcacattgaggaatgatactgagcccaaagagcattcaatcattgttttatttgccttcttttcacaccattggtgagggagggattaccaccctggggttatgaagatggttgaacaccccacacatagcaccggagatatgagatcaacagtttcttagccatagagattcacagcccagagcaggaggacgctgcacaccatgcaggatgacatgggggatgcgctcgggattggtgtgaagaagcaaggactgttagaggcaggctttatagtaacaagacggtggggcaaactctgatttccgtgggggaatgtcatggtcttgctttactaagttttgagactggcaggtagtgaaactcattaggctgagaaccttgtggaatgcagctgacccagctgatagaggaagtagccaggtgggagcctttcccagtgggtgtgggacatatctggcaagattttgtggcactcctggttacagatactggggcagcaaataaaactgaatcttgttttcagaccttatactgtgtaattgtaagtggaca

SEQ ID NO: 53349 - DNA, 1400 bp, Homo sapiens
cagccccaaactcaccacctggccgtggacacctgtgtcagcatgtgggacctggttctctccatcgccttgtctgtggggtgcactggtgccgtgcccctcatccagtctcggattgtgggaggctgggagtgtgagaagcattcccaaccctggcaggtggctgtgtacagtcatggatgggcacactgtgggggtgtcctggtgcacccccagtgggtgctcacagctgcccattgcctaaagaagaatagccaggtctggctgggtcggcacaacctgtttgagcctgaagacacaggccagagggtccctgtcagccacagcttcccacacccgctctacaatatgagccttctgaagcatcaaagccttagaccagatgaagactccagccatgacctcatgctgctccgcctgtcagagcctgccaagatcacagatgttgtgaaggtcctgggcctgcccacccaggagccagcactggggaccacctgctacgcctcaggctggggcagcatcgaaccagaggagttcttgcgccccaggagtcttcagtgtgtgagcctccatctcctgtccaatgacatgtgtgctagagcttactctgagaaggtgacagagttcatgttgtgtgctgggctctggacaggtggtaaagacacttgtgggggtgattctgggggtccacttgtctgtaatggtgtgcttcaaggtatcacatcatggggccctgagccatgtgccctgcctgaaaagcctgctgtgtacaccaaggtggtgcattaccggaagtggatcaaggacaccatcgcagccaacccctgagtgcccctgtcccacccctacctctagtaaatttaagtccacctcacgttctggcatcacttggcctttctggatgctggacacctgaagcttggaactcacctggccgaagctcgagcctcctgagtcctactgacctgtgctttctggtgtggagtccagggctgctaggaaaaggaatgggcagacacaggtgtatgccaatgtttctgaaatgggtataatttcgtcctctccttcggaacactggctgtctctgaagacttctcgctcagtttcagtgaggacacacacatcactgaggataagctggagccacaatgcatgaggcacacacacagcaaggatgacgctgtaaacatagcccacgctgtcctgggggcactgggaagcctagataaggccgtgagcagaaagaaggggaggatcctcctatgttgttgaaggagggactagggggagaaactgaaagctgattaattacaggaggtttgttcaggtcccccaaaccaccgtcagatttgatgatttcctagcaggacttacagaaataaagagctatcatgctgtgg

SEQ ID NO: 53350 - DNA, 1363 bp, Homo sapiens
cagccccaaactcaccacctggccgtggacacctgtgtcagcatgtgggacctggttctctccatcgccttgtctgtggggtgcactggtgccgtgcccctcatccagtctcggattgtgggaggctgggagtgtgagaagcattcccaaccctggcaggtggctgtgtacagtcatggatgggcacactgtgggggtgtcctggtgcacccccagtgggtgctcacagctgcccattgcctaaagaagaatagccaggtctggctgggtcggcacaacctgtttgagcctgaagacacaggccagagggtccctgtcagccacagcttcccacacccgctctacaatatgagccttctgaagcatcaaagccttagaccagatgaagactccagccatgacctcatgctgctccgcctgtcagagcctgccaagatcacagatgttgtgaaggtcctgggcctgcccacccaggagccagcactggggaccacctgctacgcctcaggctggggcagcatcgaaccagaggagttcttgcgccccaggagtcttcagtgtgtgagcctccatctcctgtccaatgacatgtgtgctagagcttactctgagaaggtgacagagttcatgttgtgtgctgggctctggacaggtggtaaagacacttgtgggggtgattctgggggtccacttgtctgtaatggtgtgcttcaaggtatcacatcatggggccctgagccatgtgccctgcctgaaaagcctgctgtgtacaccaaggtggtgcattaccggaagtggatcaaggacaccatcgcagccaacccctgagtgcccctgtcccacccctacctctagtaaatttaagtccacctcacgttctggcatcacttggcctttctggatgctggacacctgaagcttggaactcacctggccgaagctcgagcctcctgagtcctactgacctgtgctttctggtgtggagtccagggctgctaggaaaaggaatgggcagacacaggtgtatgccaatgtttctgaaatgggtataatttcgtcctctccttcggaacactggctgtctctgaagacttctcgctcagtttcagtgaggacacacacacacacacagcaaggatgacgctgtaaacatagcccacgctgtcctgggggcactgggaagcctagataaggccgtgagcagaaagaaggggaggatcctcctatgttgttgaaggagggactagggggagaaactgaaagctgattaattacaggaggtttgttcaggtcccccaaaccaccgtcagatttgatgatttcctagcaggacttacagaaataaagagctatcatgctgtgg

SEQ ID NO: 53351 - DNA, 1277 bp, Homo sapiens
ggagagagaaagggggacgtggccctgagctgtgggccgggccacccgccactacagagccctcactccagccccagctgcaggtgagccaccctcatgcctctcctcctccccctgctactccacactcctcagatgcccccgtggcctccctcctttttctctcccacactgtatcacccctggcttcctctctgctgtttctccttctctctctgacttcccgcatccttttctcatttgtctatttctcactcccttcctggttctgttctttctcccttcctcttccccatgtctatttcttgctgtctctgtctcttctttgctcatcctaattctcactgttctcccttctgtttttgtcattcctctgccattttatgctctctcttttccacttcgtttctttcagtttctgtctctgcctctcacatgatcacactcctgttttctaactcactgtctgtatttcaccacgactatatctccccgacccctgtgcttttctcactgtttctttttcttccctttggagtctcccttatcctcccctgatccatccctttccccattttctctctcctcatgcatccacccccttcctccccaggaatagccaggtctggctgggtcggcacaacctgtttgagcctgaagacacaggccagagggtccctgtcagccacagcttcccacacccgctctacaatatgagccttctgaagcatcaaagccttagaccagatgaagactccagccatgacctcatgctgctccgcctgtcagagcctgccaagatcacagatgttgtgaaggtcctgggcctgcccacccaggagccagcactggggaccacctgctacgcctcaggctggggcagcatcgaaccagaggagttcttgcgccccaggagtcttcagtgtgtgagcctccatctcctgtccaatgacatgtgtgctagagcttactctgagaaggtgacagagttcatgttgtgtgctgggctctggacaggtggtaaagacacttgtggggtgagtcatccctactcccaacatctggaggggaaaggggtgattctgggggtccacttgtctgtaatggtgtgcttcaaggtatcacatcatggggccctgagccatgtgccctgcctgaaaagcctgctgtgtacaccaaggtggtgcattaccggaagtggatcaaggacaccatcgcagccaacccctgagtgcccctgtcccacccctacctctagtaaatttaagtccacctca

SEQ ID NO: 53352 - DNA, 2859 bp, Homo sapiens
cagccccaaactcaccacctggccgtggacacctgtgtcagcatgtgggacctggttctctccatcgccttgtctgtggggtgcactggtgccgtgcccctcatccagtctcggattgtgggaggctgggagtgtgagaagcattcccaaccctggcaggtggctgtgtacagtcatggatgggcacactgtgggggtgtcctggtgcacccccagtgggtgctcacagctgcccattgcctaaagaagaatagccaggtctggctgggtcggcacaacctgtttgagcctgaagacacaggccagagggtccctgtcagccacagcttcccacacccgctctacaatatgagccttctgaagcatcaaagccttagaccagatgaagactccagccatgacctcatgctgctccgcctgtcagagcctgccaagatcacagatgttgtgaaggtcctgggcctgcccacccaggagccagcactggggaccacctgctacgcctcaggctggggcagcatcgaaccagaggagttcttgcgccccaggagtcttcagtgtgtgagcctccatctcctgtccaatgacatgtgtgctagagcttactctgagaaggtgacagagttcatgttgtgtgctgggctctggacaggtggtaaagacacttgtgggggtgattctgggggtccacttgtctgtaatggtgtgcttcaaggtatcacatcatggggccctgagccatgtgccctgcctgaaaagcctgctgtgtacaccaaggtggtgcattaccggaagtggatcaaggacaccatcgcagccaacccctgagtgcccctgtcccacccctacctctagtaaatttaagtccacctcacgttctggcatcacttggcctttctggatgctggacacctgaagcttggaactcacctggccgaagctcgagcctcctgagtcctactgacctgtgctttctggtgtggagtccagggctgctaggaaaaggaatgggcagacacaggtgtatgccaatgtttctgaaatgggtataatttcgtcctctccttcggaacactggctgtctctgaagacttctcgctcagtttcagtgaggacacacacaaagacgtgggtgaccatgttgtttgtggggtgcagagatgggaggggtggggcccaccctggaagagtggacagtgacacaaggtggacactctctacagatcactgaggataagctggagccacaatgcatgaggcacacacacagcaaggatgacgctgtaaacatagcccacgctgtcctgggggcactgggaagcctagataaggccgtgagcagaaagaaggggaggatcctcctatgttgttgaaggagggactagggggagaaactgaaagctgattaattacaggaggtttgttcaggtcccccaaaccaccgtcagatttgatgatttcctagcaggacttacagaaataaagagctatcatgctgtggtttattatggtttgttacattgatgggatacatactgaaatcagcaaacaaaacagatgtatagattagagtgtggagaaaacagaggaaaacttgcagttacgaagactggcaacttggctttactaagttttcagactggcaggaagtcaaacctattaggctgaggaccttgtggagtgtagctgatccagctgatagaggaactagccaggtgggggcctttccctttggatggggggcatatctgacagttattctctccaagtggagacttacggacagcatataattctccctgcaaggatgtatgataatatgtacaaagtaattccaactgaggaagctcacctgatccttagtgtccaaggtttttactgggggtctgtaggacgagtatggagtacttgaataattgacctgaagtcctcagacctgaggttccctagagttcaaacagatacagcatggtccagagtcccagatgtacaaaaacagggattcatcacaaatcccatctttagcatgaagggtctggcatggcccaaggccccaagtatatcaaggcacttgggcagaacatgccaaggaatcaaatgtcatctcccaggagttattcaagggtgagccctttacttgggatgtacaggctttgagcagtgcagggctgctgagtcaaccttttattgtacaggggatgagggaaagggagaggatgaggaagcccccctggggatttggtttggtcttgtgatcaggtggtctatggggctatccctacaaagaagaatccagaaataggggcacattgaggaatgatactgagcccaaagagcattcaatcattgttttatttgccttcttttcacaccattggtgagggagggattaccaccctggggttatgaagatggttgaacaccccacacatagcaccggagatatgagatcaacagtttcttagccatagagattcacagcccagagcaggaggacgctgcacaccatgcaggatgacatgggggatgcgctcgggattggtgtgaagaagcaaggactgttagaggcaggctttatagtaacaagacggtggggcaaactctgatttccgtgggggaatgtcatggtcttgctttactaagttttgagactggcaggtagtgaaactcattaggctgagaaccttgtggaatgcagctgacccagctgatagaggaagtagccaggtgggagcctttcccagtgggtgtgggacatatctggcaagattttgtggcactcctggttacagatactggggcagcaaataaaactgaatcttgttttcagaccttatactgtgtaattgtaagtggaca

SEQ ID NO: 53353 - DNA, 882 bp, Homo sapiens
cagccccaaactcaccacctggccgtggacacctgtgtcagcatgtgggacctggttctctccatcgccttgtctgtggggtgcactggtgccgtgcccctcatccagtctcggattgtgggaggctgggagtgtgagaagcattcccaaccctggcaggtggctgtgtacagtcatggatgggcacactgtgggggtgtcctggtgcacccccagtgggtgctcacagctgcccattgcctaaagaagtaagtaggaccctgggatctggggagggaatggctgtgtcccacaggaataacagcgggatgcttcccccagggtcacttctcaggtgaggcttcagactaaaggagagagggaaggtcctggcccaggtcgcacccggaggcagagctggggctggaccactctccccatggctgcctgggtttctctctgtgtctgatctcgctgtgtctcttggtatctggctctggttgtgtctgtatgactgtgttttggtctctatgtccctctctcttttctgtctccctgtgtctgtgtctcccccgtctctgtctctgggtctctctgtggccatctctgtcaccgtgtgtctcaccctgcatctctttgcctgtctttctctctgggtctctgcctcagcccttcctcatcactactgaacacaccccgtgagggtgggtggggccccgaaaaggaggctttagtcaggtggctgtagggccgcatgccgtctttgggttctcccgggggacaggggcgtcccgtggtgcctgggggaggacaagggggggggggccctcccgggcgggggtggggaggcggcgcaaaaaatcggttttcgtttcgtcgtctttgttcttttcctcggggggg

SEQ ID NO: 53354 - DNA, 241 bp, Homo sapiens
attcgcggccgaatcgacgccgcgtccagggctgctaggaaaaggaatgggcagacacaggtgtatgccaatgtttctgaaatgggtataatttcgtcctctccttcggaacactggctgtctctgaagacttctcgctcagtttcagtgaggacacacacaaagacgtgggtgaccatgttgtttgtggggtgcagagatgggaggggtgtttccacttttttgaaagggtcttttcata

SEQ ID NO: 53355 - DNA, 3375 bp, Homo sapiens
ggagagagaaagggggacgtggccctgagctgtgggccgggccacccgccactacagagccctcactccagccccagctgcaggtgagccaccctcatgcctctcctcctccccctgctactccacactcctcagatgcccccgtggcctccctcctttttctctcccacactgtatcacccctggcttcctctctgctgtttctccttctctctctgacttcccgcatccttttctcatttgtctatttctcactcccttcctggttctgttctttctcccttcctcttccccatgtctatttcttgctgtctctgtctcttctttgctcatcctaattctcactgttctcccttctgtttttgtcattcctctgccattttatgctctctcttttccacttcgtttctttcagtttctgtctctgcctctcacatgatcacactcctgttttctaactcactgtctgtatttcaccacgactatatctccccgacccctgtgcttttctcactgtttctttttcttccctttggagtctcccttatcctcccctgatccatccctttccccattttctctctcctcatgcatccacccccttcctccccaggaatagccaggtctggctgggtcggcacaacctgtttgagcctgaagacacaggccagagggtccctgtcagccacagcttcccacacccgctctacaatatgagccttctgaagcatcaaagccttagaccagatgaagactccagccatgacctcatgctgctccgcctgtcagagcctgccaagatcacagatgttgtgaaggtcctgggcctgcccacccaggagccagcactggggaccacctgctacgcctcaggctggggcagcatcgaaccagaggagtgtacgcctgggccagatggtgtagctgggagcccagatgcctgggtctgagggaagtggggccaaagaaccaggtggggtccggccacagcccagtttttctctgacccatagtcttgcgccccaggagtcttcagtgtgtgagcctccatctcctgtccaatgacatgtgtgctagagcttactctgagaaggtgacagagttcatgttgtgtgctgggctctggacaggtggtaaagacacttgtggggtgagtcatccctactcccaacatctggaggggaaaggggtgattctgggggtccacttgtctgtaatggtgtgcttcaaggtatcacatcatggggccctgagccatgtgccctgcctgaaaagcctgctgtgtacaccaaggtggtgcattaccggaagtggatcaaggacaccatcgcagccaacccctgagtgcccctgtcccacccctacctctagtaaatttaagtccacctcacgttctggcatcacttggcctttctggatgctggacacctgaagcttggaactcacctggccgaagctcgagcctcctgagtcctactgacctgtgctttctggtgtggagtccagggctgctaggaaaaggaatgggcagacacaggtgtatgccaatgtttctgaaatgggtataatttcgtcctctccttcggaacactggctgtctctgaagacttctcgctcagtttcagtgaggacacacacaaagacgtgggtgaccatgttgtttgtggggtgcagagatgggaggggtggggcccaccctggaagagtggacagtgacacaaggtggacactctctacagatcactgaggataagctggagccacaatgcatgaggcacacacacagcaaggatgacgctgtaaacatagcccacgctgtcctgggggcactgggaagcctagataaggccgtgagcagaaagaaggggaggatcctcctatgttgttgaaggagggactagggggagaaactgaaagctgattaattacaggaggtttgttcaggtcccccaaaccaccgtcagatttgatgatttcctagcaggacttacagaaataaagagctatcatgctgtggtttattatggtttgttacattgatgggatacatactgaaatcagcaaacaaaacagatgtatagattagagtgtggagaaaacagaggaaaacttgcagttacgaagactggcaacttggctttactaagttttcagactggcaggaagtcaaacctattaggctgaggaccttgtggagtgtagctgatccagctgatagaggaactagccaggtgggggcctttccctttggatggggggcatatctgacagttattctctccaagtggagacttacggacagcatataattctccctgcaaggatgtatgataatatgtacaaagtaattccaactgaggaagctcacctgatccttagtgtccaaggtttttactgggggtctgtaggacgagtatggagtacttgaataattgacctgaagtcctcagacctgaggttccctagagttcaaacagatacagcatggtccagagtcccagatgtacaaaaacagggattcatcacaaatcccatctttagcatgaagggtctggcatggcccaaggccccaagtatatcaaggcacttgggcagaacatgccaaggaatcaaatgtcatctcccaggagttattcaagggtgagccctttacttgggatgtacaggctttgagcagtgcagggctgctgagtcaaccttttattgtacaggggatgagggaaagggagaggatgaggaagcccccctggggatttggtttggtcttgtgatcaggtggtctatggggctatccctacaaagaagaatccagaaataggggcacattgaggaatgatactgagcccaaagagcattcaatcattgttttatttgccttcttttcacaccattggtgagggagggattaccaccctggggttatgaagatggttgaacaccccacacatagcaccggagatatgagatcaacagtttcttagccatagagattcacagcccagagcaggaggacgctgcacaccatgcaggatgacatgggggatgcgctcgggattggtgtgaagaagcaaggactgttagaggcaggctttatagtaacaagacggtggggcaaactctgatttccgtgggggaatgtcatggtcttgctttactaagttttgagactggcaggtagtgaaactcattaggctgagaaccttgtggaatgcagctgacccagctgatagaggaagtagccaggtgggagcctttcccagtgggtgtgggacatatctggcaagattttgtggcactcctggttacagatactggggcagcaaataaaactgaatcttgttttcagaccttatactgtgtaattgtaagtggaca

SEQ ID NO: 53356 - DNA, 2737 bp, Homo sapiens
cagccccaaactcaccacctggccgtggacacctgtgtcagcatgtgggacctggttctctccatcgccttgtctgtggggtgcactggaatagccaggtctggctgggtcggcacaacctgtttgagcctgaagacacaggccagagggtccctgtcagccacagcttcccacacccgctctacaatatgagccttctgaagcatcaaagccttagaccagatgaagactccagccatgacctcatgctgctccgcctgtcagagcctgccaagatcacagatgttgtgaaggtcctgggcctgcccacccaggagccagcactggggaccacctgctacgcctcaggctggggcagcatcgaaccagaggagttcttgcgccccaggagtcttcagtgtgtgagcctccatctcctgtccaatgacatgtgtgctagagcttactctgagaaggtgacagagttcatgttgtgtgctgggctctggacaggtggtaaagacacttgtggggtgagtcatccctactcccaacatctggaggggaaaggggtgattctgggggtccacttgtctgtaatggtgtgcttcaaggtatcacatcatggggccctgagccatgtgccctgcctgaaaagcctgctgtgtacaccaaggtggtgcattaccggaagtggatcaaggacaccatcgcagccaacccctgagtgcccctgtcccacccctacctctagtaaatttaagtccacctcacgttctggcatcacttggcctttctggatgctggacacctgaagcttggaactcacctggccgaagctcgagcctcctgagtcctactgacctgtgctttctggtgtggagtccagggctgctaggaaaaggaatgggcagacacaggtgtatgccaatgtttctgaaatgggtataatttcgtcctctccttcggaacactggctgtctctgaagacttctcgctcagtttcagtgaggacacacacaaagacgtgggtgaccatgttgtttgtggggtgcagagatgggaggggtggggcccaccctggaagagtggacagtgacacaaggtggacactctctacagatcactgaggataagctggagccacaatgcatgaggcacacacacagcaaggatgacgctgtaaacatagcccacgctgtcctgggggcactgggaagcctagataaggccgtgagcagaaagaaggggaggatcctcctatgttgttgaaggagggactagggggagaaactgaaagctgattaattacaggaggtttgttcaggtcccccaaaccaccgtcagatttgatgatttcctagcaggacttacagaaataaagagctatcatgctgtggtttattatggtttgttacattgatgggatacatactgaaatcagcaaacaaaacagatgtatagattagagtgtggagaaaacagaggaaaacttgcagttacgaagactggcaacttggctttactaagttttcagactggcaggaagtcaaacctattaggctgaggaccttgtggagtgtagctgatccagctgatagaggaactagccaggtgggggcctttccctttggatggggggcatatctgacagttattctctccaagtggagacttacggacagcatataattctccctgcaaggatgtatgataatatgtacaaagtaattccaactgaggaagctcacctgatccttagtgtccaaggtttttactgggggtctgtaggacgagtatggagtacttgaataattgacctgaagtcctcagacctgaggttccctagagttcaaacagatacagcatggtccagagtcccagatgtacaaaaacagggattcatcacaaatcccatctttagcatgaagggtctggcatggcccaaggccccaagtatatcaaggcacttgggcagaacatgccaaggaatcaaatgtcatctcccaggagttattcaagggtgagccctttacttgggatgtacaggctttgagcagtgcagggctgctgagtcaaccttttattgtacaggggatgagggaaagggagaggatgaggaagcccccctggggatttggtttggtcttgtgatcaggtggtctatggggctatccctacaaagaagaatccagaaataggggcacattgaggaatgatactgagcccaaagagcattcaatcattgttttatttgccttcttttcacaccattggtgagggagggattaccaccctggggttatgaagatggttgaacaccccacacatagcaccggagatatgagatcaacagtttcttagccatagagattcacagcccagagcaggaggacgctgcacaccatgcaggatgacatgggggatgcgctcgggattggtgtgaagaagcaaggactgttagaggcaggctttatagtaacaagacggtggggcaaactctgatttccgtgggggaatgtcatggtcttgctttactaagttttgagactggcaggtagtgaaactcattaggctgagaaccttgtggaatgcagctgacccagctgatagaggaagtagccaggtgggagcctttcccagtgggtgtgggacatatctggcaagattttgtggcactcctggttacagatactggggcagcaaataaaactgaatcttgttttcagaccttatactgtgtaattgtaagtggaca

SEQ ID NO: 53357 - DNA, 1501 bp, Homo sapiens
cagccccaaactcaccacctggccgtggacacctgtgtcagcatgtgggacctggttctctccatcgccttgtctgtggggtgcactggtgccgtgcccctcatccagtctcggattgtgggaggctgggagtgtgagaagcattcccaaccctggcaggtggctgtgtacagtcatggatgggcacactgtgggggtgtcctggtgcacccccagtgggtgctcacagctgcccattgcctaaagaagaatagccaggtctggctgggtcggcacaacctgtttgagcctgaagacacaggccagagggtccctgtcagccacagcttcccacacccgctctacaatatgagccttctgaagcatcaaagccttagaccagatgaagactccagccatgacctcatgctgctccgcctgtcagagcctgccaagatcacagatgttgtgaaggtcctgggcctgcccacccaggagccagcactggggaccacctgctacgcctcaggctggggcagcatcgaaccagaggagttcttgcgccccaggagtcttcagtgtgtgagcctccatctcctgtccaatgacatgtgtgctagagcttactctgagaaggtgacagagttcatgttgtgtgctgggctctggacaggtggtaaagacacttgtgggggtgattctgggggtccacttgtctgtaatggtgtgcttcaaggtatcacatcatggggccctgagccatgtgccctgcctgaaaagcctgctgtgtacaccaaggtggtgcattaccggaagtggatcaaggacaccatcgcagccaacccctgagtgcccctgtcccacccctacctctagtaaatttaagtccacctcacgttctggcatcacttggcctttctggatgctggacacctgaagcttggaactcacctggccgaagctcgagcctcctgagtcctactgacctgtgctttctggtgtggagtccagggctgctaggaaaaggaatgggcagacacaggtgtatgccaatgtttctgaaatgggtataatttcgtcctctccttcggaacactggctgtctctgaagacttctcgctcagtttcagtgaggacacacacaaagacgtgggtgaccatgttgtttgtggggtgcagagatgggaggggtggggcccaccctggaagagtggacagtgacacaaggtggacactctctacagatcactgaggataagctggagccacaatgcatgaggcacacacacagcaaggatgacgctgtaaacatagcccacgctgtcctgggggcactgggaagcctagataaggccgtgagcagaaagaaggggaggatcctcctatgttgttgaaggagggactagggggagaaactgaaagctgattaattacaggaggtttgttcaggtcccccaaaccaccgtcagatttgatgatttcctagcaggacttacagaaataaagagctatcatgctgtgg

SEQ ID NO: 53358 - DNA, 1536 bp, Homo sapiens
cagccccaaactcaccacctggccgtggacacctgtgtcagcatgtgggacctggttctctccatcgccttgtctgtggggtgcactggtgccgtgcccctcatccagtctcggattgtgggaggctgggagtgtgagaagcattcccaaccctggcaggtggctgtgtacagtcatggatgggcacactgtgggggtgtcctggtgcacccccagtgggtgctcacagctgcccattgcctaaagaagaatagccaggtctggctgggtcggcacaacctgtttgagcctgaagacacaggccagagggtccctgtcagccacagcttcccacacccgctctacaatatgagccttctgaagcatcaaagccttagaccagatgaagactccagccatgacctcatgctgctccgcctgtcagagcctgccaagatcacagatgttgtgaaggtcctgggcctgcccacccaggagccagcactggggaccacctgctacgcctcaggctggggcagcatcgaaccagaggagttcttgcgccccaggagtcttcagtgtgtgagcctccatctcctgtccaatgacatgtgtgctagagcttactctgagaaggtgacagagttcatgttgtgtgctgggctctggacaggtggtaaagacacttgtgggggtgattctgggggtccacttgtctgtaatggtgtgcttcaaggtatcacatcatggggccctgagccatgtgccctgcctgaaaagcctgctgtgtacaccaaggtggtgcattaccggaagtggatcaaggacaccatcgcagccaacccctgagtgcccctgtcccacccctacctctagtaaatttaagtccacctcacgttctggcatcacttggcctttctggatgctggacacctgaagcttggaactcacctggccgaagctcgagcctcctgagtcctactgacctgtgctttctggtgtggagtccagggctgctaggaaaaggaatgggcagacacaggtgtatgccaatgtttctgaaatgggtataatttcgtcctctccttcggaacactggctgtctctgaagacttctcgctcagtttcagtgaggacacacacaaagacgtgggtgaccatgttgtttgtggggtgcagagatgggaggggtggggcccaccctggaagagtggacagtgacacaaggtggacactctctacagatcactgaggataagctggagccacaatgcatgaggcacacacacagcaaggatgacgctgtaaacatagcccacgctgtcctgggggcactgggaagcctagataaggccgtgagcagaaagaaggggaggatcctcctatgttgttgaaggagggactagggggagaaactgaaagctgattaattacaggaggtttgttcaggtcccccaaaccaccgtcagatttgatgatttcctagcaggacttacagaaataaagagctatcatgctgtggaaaaaaaagaaagggtgaaaggagaaaaagttttg

SEQ ID NO: 53359 - DNA, 3000 bp, Homo sapiens
  misc_feature (3000)..(3000): n is a, c, g, or t
cagccccaaactcaccacctggccgtggacacctgtgtcagcatgtgggacctggttctctccatcgccttgtctgtggggtgcactggtgccgtgcccctcatccagtctcggattgtgggaggctgggagtgtgagaagcattcccaaccctggcaggtggctgtgtacagtcatggatgggcacactgtgggggtgtcctggtgcacccccagtgggtgctcacagctgcccattgcctaaagaagaatagccaggtctggctgggtcggcacaacctgtttgagcctgaagacacaggccagagggtccctgtcagccacagcttcccacacccgctctacaatatgagccttctgaagcatcaaagccttagaccagatgaagactccagccatgacctcatgctgctccgcctgtcagagcctgccaagatcacagatgttgtgaaggtcctgggcctgcccacccaggagccagcactggggaccacctgctacgcctcaggctggggcagcatcgaaccagaggagttcttgcgccccaggagtcttcagtgtgtgagcctccatctcctgtccaatgacatgtgtgctagagcttactctgagaaggtgacagagttcatgttgtgtgctgggctctggacaggtggtaaagacacttgtgggggtgattctgggggtccacttgtctgtaatggtgtgcttcaaggtatcacatcatggggccctgagccatgtgccctgcctgaaaagcctgctgtgtacaccaaggtggtgcattaccggaagtggatcaaggacaccatcgcagccaacccctgagtgcccctgtcccacccctacctctagtaaatttaagtccacctcacgttctggcatcacttggcctttctggatgctggacacctgaagcttggaactcacctggccgaagctcgagcctcctgagtcctactgacctgtgctttctggtgtggagtccagggctgctaggaaaaggaatgggcagacacaggtgtatgccaatgtttctgaaatgggtataatttcgtcctctccttcggaacactggctgtctctgaagacttctcgctcagtttcagtgaggacacacacaaagacgtgggtgaccatgttgtttgtggggtgcagagatgggaggggtggggcccaccctggaagagtggacagtgacacaaggtggacactctctacagatcactgaggataagctggagccacaatgcatgaggcacacacacagcaaggatgacgctgtaaacatagcccacgctgtcctgggggcactgggaagcctagataaggccgtgagcagaaagaaggggaggatcctcctatgttgttgaaggagggactagggggagaaactgaaagctgattaattacaggaggtttgttcaggtcccccaaaccaccgtcagatttgatgatttcctagcaggacttacagaaataaagagctatcatgctgtggcaacacacaaaaaaacaaaaaaaaaaaaaaaaaaaaaaaaacaaaaacaacaaaaacaaaaaaaaaaaaaaaaaaaacaaaaacaagaaaaaaagagcacaacggagacgaagacgaaaacacaacacgagaacgaaagaacaagcgagagacgcgacgacgcggcacgcgcgcgacgacagccgaccgaagaagtagcacaagacagaaaagagcagaacgacgaggaggacgaagaaaggaaggacgagtagaagtaaggaaagaggacagaccaaccaccgcgggcaacaggggagcgcgaagaggagagagacaatgccgagaggcggaaacgggtgtagggggggagacgaagcaggacggaacaacccgcaccccgagcagaggaaagggaaactgctgcaccgacacacaacgcgcacggcgcccgcggcaagggaccacaaaagcggagaggcatgaggcgcgggggaaggcgcggacgaggcgcacgcggccgcaggcgagaggcggcgggaggcagcggggccgcatcgaagccgccaaccaccggcgtggcggaaggaagaacaccgcgccggcacaggggggaggcgacggagcggaggggcgccgcgggcgccccacgcgagaggcagggcaggcagcagagtaagaagaggacggattgatggtgggacgatgggtggaggagagtaagtcagtgaacaagccgaagaaaaggacgttaaggtggcaagcaggagcgtgagaatgagaagtagacggggtaccggagaaagaagggcgagaggcgaggtagcgacagagcaacaaagcagataacaaccacgccagcctgaccccagaacagctcaacacaactcgccatcaaatcaataacacctaacacacacaacggcaaaataaacagctaacagacactaagagccacaccgcgtcaacacacgatcagaaaatcataaacccctgacggcgagagcacccaccaattcaaactctcaaacacacaaccaaataacggtcggacctcctacccacagactcaacagccacagaacaatataacgcaacacacaaaacgagaaaaggaaacgcgaacaacaatcgggaagaaaggacagcagaagacgaccaaaaagacacagaaccgaaacccagcccgcgagcgggaggctgaacgcagagcacacacagaagcaaggaggaccagagaggcacaaaaaagcgacaggaggcagagagagaactgcaagaacagagagcgaggacagggagagggagcaggaacgcaaaaacaagcaagcaagcagggaacacgacagacaggaacggagacggggcgagaggaaaagcaacggagagaaacagccggagcagacggaaaggacgtagcaacagaagacagcgagaacaagcaccagacagaagcggacggaaaacgagcagacaagcagcaaggccaaagaaaccgaactacagaacacaagccgaan

SEQ ID NO: 53360 - DNA, 1095 bp, Homo sapiens
ggagagagaaagggggacgtggccctgagctgtgggccgggccacccgccactacagagccctcactccagccccagctgcaggtgagccaccctcatgcctctcctcctccccctgctactccacactcctcagatgcccccgtggcctccctcctttttctctcccacactgtatcacccctggcttcctctctgctgtttctccttctctctctgacttcccgcatccttttctcatttgtctatttctcactcccttcctggttctgttctttctcccttcctcttccccatgtctatttcttgctgtctctgtctcttctttgctcatcctaattctcactgttctcccttctgtttttgtcattcctctgccattttatgctctctcttttccacttcgtttctttcagtttctgtctctgcctctcacatgatcacactcctgttttctaactcactgtctgtatttcaccacgactatatctccccgacccctgtgcttttctcactgtttctttttcttccctttggagtctcccttatcctcccctgatccatccctttccccattttctctctcctcatgcatccacccccttcctccccaggaatagccaggtctggctgggtcggcacaacctgtttgagcctgaagacacaggccagagggtccctgtcagccacagcttcccacacccgctctacaatatgagccttctgaagcatcaaagccttagaccagatgaagactccagccatgacctcatgctgctccgcctgtcagagcctgccaagatcacagatgttgtgaaggtcctgggcctgcccacccaggagccagcactggggaccacctgctacgcctcaggctggggcagcatcgaaccagaggagttcttgcgccccaggagtcttcagtgtgtgagcctccatctcctgtccaatgacatgtgtgctagagcttactctgagaaggtgacagagttcatgttgtgtgctgggctctggacaggtggtaaagacacttgtggggtgagtcatccctactcccaacatctggaggggaaagggatggatcgggggatcctct

SEQ ID NO: 53361 - DNA, 1097 bp, Homo sapiens
cagccccaaactcaccacctggccgtggacacctgtgtcagcatgtgggacctggttctctccatcgccttgtctgtggggtgcactggtgccgtgcccctcatccagtctcggattgtgggaggctgggagtgtgagaagcattcccaaccctggcaggtggctgtgtacagtcatggatgggcacactgtgggggtgtcctggtgcacccccagtgggtgctcacagctgcccattgcctaaagaagaatagccaggtctggctgggtcggcacaacctgtttgagcctgaagacacaggccagagggtccctgtcagccacagcttcccacacccgctctacaatatgagccttctgaagcatcaaagccttagaccagatgaagactccagccatgacctcatgctgctccgcctgtcagagcctgccaagatcacagatgttgtgaaggtcctgggcctgcccacccaggagccagcactggggaccacctgctacgcctcaggctggggcagcatcgaaccagaggagttcttgcgccccaggagtcttcagtgtgtgagcctccatctcctgtccaatgacatgtgtgctagagcttactctgagaaggtgacagagttcatgttgtgtgctgggctctggacaggtggtaaagacacttgtgggggtgattctgggggtccacttgtctgtaatggtgtgcttcaaggtatcacatcatggggccctgagccatgtgccctgcctgaaaagcctgctgtgtacaccaaggtggtgcattaccggaagtggatcaaggacaccatcgcagccaacccctgagtgcccctgtcccacccctacctctagtaaatttaagtccacctcacgttctggcatcacttggcctttctggatgctggacacctgaagctagataaggccgtgagcagaaagaaggggaggatcctcctatgttgttgaaggagggactagggggagaaactgaaagctgattaattacaggaggtttgttcaggtcccccaaaccaccgtcagatttgatgatttcctagcaggacttacagaaataaagagctatcatgctgtgg

SEQ ID NO: 53362 - DNA, 1018 bp, Homo sapiens
cagccccaaactcaccacctggccgtggacacctgtgtcagcatgtgggacctggttctctccatcgccttgtctgtggggtgcactggtgccgtgcccctcatccagtctcggattgtgggaggctgggagtgtgagaagcattcccaaccctggcaggtggctgtgtacagtcatggatgggcacactgtgggggtgtcctggtgcacccccagtgggtgctcacagctgcccattgcctaaagaagaatagccaggtctggctgggtcggcacaacctgtttgagcctgaagacacaggccagagggtccctgtcagccacagcttcccacacccgctctacaatatgagccttctgaagcatcaaagccttagaccagatgaagactccagccatgacctcatgctgctccgcctgtcagagcctgccaagatcacagatgttgtgaaggtcctgggcctgcccacccaggagccagcactggggaccacctgctacgcctcaggctggggcagcatcgaaccagaggagttcttgcgccccaggagtcttcagtgtgtgagcctccatctcctgtccaatgacatgtgtgctagagcttactctgagaaggtgacagagttcatgttgtgtgctgggctctggacaggtggtaaagacacttgtgggcataattcacccattcctgtgttgagcacatgcttactgggcacctgctacgtgaccagcattgccgtagaccctgggaagcagcagtgaacagtcaggagctgtggatggtgctggacagaagaaggacagggcctggctcagggtgattctgggggtccacttgtctgtaatggtgtgcttcaaggtatcacatcatggggccctgagccatgtgccctgcctgaaaagcctgctgtgtacaccaaggtggtgcattaccggaagtggatcaaggacaccatcgcagccaacccctgagtgcccctgtcccacccctacctctagtaaatttaagtccacctca

SEQ ID NO: 53363 - DNA, 581 bp, Homo sapiens
  misc_feature (41)..(41): n is a, c, g, or t
gcggccgcctactactactactactactactaaattcgcgnccgctcgagccaaaagacaaaaaaaattttactacttttgagattgccccaatgtacagaattatataattctaacgcttaaatcatgtgaaagggttgctgctgtcagccttgcccactgtgacttcaaacccaaggaggaactcttgatcaagatgcccaaccctgtgatcagaacctccaaatactgccatgagaaactagagggcaggtcttcataaaagccctttgaacccccttcctgccctgtgttaggagatagggatattggcccctcactgcagctgccagcacttggtcagtcactctcagccatagcactttgttcactgtcctgtgtcagagcactgagctccacccttttctgagagttattacagccagaaagtgtgggctgaagatggttggtttcatgtttttgtattatgtatctttttgtatggtaaagactatattttgtacttaaccagatatatttttaccccagatggggatattctttgtaaaaaatgaaaataaagtttttttaatggaaaaaaa

SEQ ID NO: 53364 - DNA, 1036 bp, Homo sapiens
  misc_feature (909)..(909): n is a, c, g, or t
  misc_feature (920)..(920): n is a, c, g, or t
  misc_feature (926)..(926): n is a, c, g, or t
  misc_feature (952)..(953): n is a, c, g, or t
  misc_feature (983)..(983): n is a, c, g, or t
  misc_feature (995)..(995): n is a, c, g, or t
acgtttccgccttccagcggaaactaacccctctttttctccaaaggagtgcttgtggagatcggatcttttctccagcaattgggggaaagaaggctttttctctgaattcgcttagtgtaaccagcggcgtatattttttaggcgccttttcgaaaacctagtagttaatattcatttgtttaaatcttattttatttttaagctcaaactgcttaagaataccttaattccttaaagtgaaataattttttgcaaaggggtttcctcgatttggagctttttttttcttccaccgtcatttctaactcttaaaaccaactcagttccatcatggtgatgttcaagaagatcaagtcttttgaggtggtctttaacgaccctgaaaaggtgtacggcagtggcgagaaggtggctggccgggtgatagtggaggtgtgtgaagttactcgtgtcaaagccgttaggatcctggcttgcggagtggctaaagtgctttggatgcagggatcccagcagtgcaaacagacttcggagtacctgcgctatgaagacacgcttcttctggaagaccagccaacaggtgagaatgagatggtgatcatgagacctggaaacaaatatgagtacaagttcggctttgagcttcctcaggggcctctgggaacatccttcaaaggaaaatatgggtgtgtagactactgggtgaaggcttttcttgaccgcccgagccagccaactcaagagacaaagaaaaactttgaagtagtggatctggtggatgtcaatacccctgatttaatggcacctgtgtctgctaaaaaagaaaagaaagtttcctgcatgttcattcctgatgggcgggtgtctgtctctgctcgaattgacagaaaaggattctgtgaaggngaaagggggangaagantttccatcccatggctgacttttgannaataacatggtttcccggaaattggggggncccccaaaagcntggccatttggggggcccggcccacaccttaaccttttggc

SEQ ID NO: 53365 - DNA, 806 bp, Homo sapiens
acgtttccgccttccagcggaaactaacccctctttttctccaaaggagtgcttgtggagatcggatcttttctccagcaattgggggaaagaaggctttttctctgaattcgcttagtgtaaccagcggcgtatattttttaggcgccttttcgaaaacctagtagttaatattcatttgtttaaatcttattttatttttaagctcaaactgcttaagaataccttaattccttaaagtgaaataattttttgcaaaggggtttcctcgatttggagctttttttttcttccaccgtcatttctaactcttaaaaccaactcagttccatcatggtgatgttcaagaagatcaagtcttttgaggtggtctttaacgaccctgaaaaggtgtacggcagtggcgagaaggtggctggccgggtgatagtggaggtgtgtgaagttactcgtgtcaaagccgttaggatcctggcttgcggagtggctaaagtgctttggatgcagggatcccagcagtgcaaacagacttcggagtacctgcgctatgaagacacgcttcttctggaagaccagccaacagggtaagcggcccaattcattgttggagggtgaaagctgattagagaagagaattgaatacacaaaacctgtacgaaatgttttaagttgctcagtttgagtggtttgaattacgtgttgttgcttccttttttctgttttaatttgcagacattctcctcccccccaagggggttggtcccttttatgggcgggtccaaggggccgaggggtgcccggttgtg

SEQ ID NO: 53366 - DNA, 3596 bp, Homo sapiens
acgtttccgccttccagcggaaactaacccctctttttctccaaaggagtgcttgtggagatcggatcttttctccagcaattgggggaaagaaggctttttctctgaattcgcttagtgtaaccagcggcgtatattttttaggcgccttttcgaaaacctagtagttaatattcatttgtttaaatcttattttatttttaagctcaaactgcttaagaataccttaattccttaaagtgaaataattttttgcaaaggggtttcctcgatttggagctttttttttcttccaccgtcatttctaactcttaaaaccaactcagttccatcatggtgatgttcaagaagatcaagtcttttgaggtggtctttaacgaccctgaaaaggtgtacggcagtggcgagaaggtggctggccgggtgatagtggaggtgtgtgaagttactcgtgtcaaagccgttaggatcctggcttgcggagtggctaaagtgctttggatgcagggatcccagcagtgcaaacagacttcggagtacctgcgctatgaagacacgcttcttctggaagaccagccaacagggtaagcggcccaattcattgttggagggtgaaagctgattagagaagagaattgaatacacaaaacctgtacgaaatgttttaagttgctcagtttgagtggtttgaattacgtgttgttgcttccttttttctgttttaatttgcagacattctcctccccccccaaaaaaaagggtgatttgtacaattttttatggtgctgtgtcctaaaggggatcctgaggggcgttgcctcgggtagttaaagtcttatgtgtgcataagttgcttattctttgtctacttcctatttgagatgttagtagagaactgtcctgggtgaatctttcagtattgcagggcttggcaacttgctgcccgacaaaatacatcagaatttctctttaagaacaatatgggatggattaaaaaatatatatatgggatgaaattgggggtacttcaataccttgcatgccacccaagcattccttatcacacagatgcattttaagtgtaacagcaagcctaatggctactcgattttctttcccttcaggtgagaatgagatggtgatcatgagacctggaaacaaatatgagtacaagttcggctttgagcttcctcaggggcctctgggaacatccttcaaaggaaaatatgggtgtgtagactactgggtgaaggcttttcttgaccgcccgagccagccaactcaagagacaaagaaaaactttgaagtagtggatctggtggatgtcaatacccctgatttaatggcacctgtgtctgctaaaaaagaaaagaaagtttcctgcatgttcattcctgatgggcgggtgtctgtctctgctcgaattgacagaaaaggattctgtgaaggaaggtaaaatcctagtgcttatggcagttaaaacaggaactgggtttaggggcaagggcatgggactggggtagaggaagtgtcattaactatactgagtatcagtaagttttcatctttctcattgctaggtgatgagatttccatccatgctgactttgagaatacatgttcccgaattgtggtccccaaagctgccattgtggcccgccacacttaccttgccaatggccagaccaaggtgctgactcagaagttgtcatcagtcagaggcaatcatattatctcagggacatgcgcatcatggcgtggcaagagccttcgggttcagaagatcaggccttctatcctgggctgcaacatccttcgagttgaatattccttactgatctatgttagcgttcctggatccaagaaggtcatccttgacctgcccctggtaattggcagcagatcaggtctaagcagcagaacatccagcatggccagccgaaccagctctgagatgagttgggtagatctgaacatccctgataccccagaagctcctccctgctatatggatgtcattcctgaagatcaccgattggagagcccaaccactcctctgctagatgacatggatggctctcaagacagccctatctttatgtatgcccctgagttcaagttcatgccaccaccgacttatactgaggtggatccctgcatcctcaacaacaatgtgcagtgagcatgtggaagaaaagaagcagctttacctacttgtttctttttgtctctcttcctggacactcactttttcagagactcaacagtctctgcaatggagtgtgggtccaccttagcctctgacttcctaatgtaggaggtggtcagcaggcaatctcctgggccttaaaggatgcggactcatcctcagccagcgcccatgttgtgatacaggggtgtttgttggatgggtttaaaaataactagaaaaactcaggcccatccattttctcagatctccttgaaaattgaggccttttcgatagtttcgggtcaggtaaaaatggcctcctggcgtaagcttttcaaggttttttggaggctttttgtaaattgtgataggaactttggaccttgaacttacgtatcatgtggagaagagccaatttaacaaactaggaagatgaaaagggaaattgtggccaaaactttgggaaaaggaggttcttaaaatcagtgtttcccctttgtgcacttgtagaaaaaaaagaaaaaccttctagagctgatttgatggacaatggagagagctttccctgtgattataaaaaaggaagctagctgctctacggtcatctttgcttagagtatactttaacctggcttttaaagcagtagtaactgccccaccaaaggtcttaaaagccatttttggagcctattgcactgtgttctcctactgcaaatattttcatatgggaggatggttttctcttcatgtaagtccttggaattgattctaaggtgatgttcttagcactttaattcctgtcaaattttttgttctccccttctgccatcttaaatgtaagctgaaactggtctactgtgtctctagggttaagccaaaagacaaaaaaaattttactacttttgagattgccccaatgtacagaattatataattctaacgcttaaatcatgtgaaagggttgctgctgtcagccttgcccactgtgacttcaaacccaaggaggaactcttgatcaagatgcccaaccctgtgatcagaacctccaaatactgccatgagaaactagagggcaggtcttcataaaagccctttgaacccccttcctgccctgtgttaggagatagggatattggcccctcactgcagctgccagcacttggtcagtcactctcagccatagcactttgttcactgtcctgtgtcagagcactgagctccacccttttctgagagttattacagccagaaagtgtgggctgaagatggttggtttcatgtttttgtattatgtatctttttgtatggtaaagactatattttgtacttaaccagatatatttttaccccagatggggatattctttgtaaaaaatgaaaataaagtttttttaatggaaaaaaa

SEQ ID NO: 53367 - DNA, 2342 bp, Homo sapiens
gttcaggatgctaataaaccctgggggtagcggcaatcatctgcatttttaccacatacacttgaataatccaaaatactgagagttgcttccctatgctcaacatccataggaccaaatttggaaaggtgaactgtagttggcttatatgctggccttaggtgctcttatgacctgtgcatagccatattagctcactggctaagaggctgaaaagattctaccaccttcaggcgtgtggggaacatgaacaggaggctgacaaacaaggagggaagtttctattgtacctggtgagcgaattgacagaaaaggattctgtgaaggtgatgagatttccatccatgctgactttgagaatacatgttcccgaattgtggtccccaaagctgccattgtggcccgccacacttaccttgccaatggccagaccaaggtgctgactcagaagttgtcatcagtcagaggcaatcatattatctcagggacatgcgcatcatggcgtggcaagagccttcgggttcagaagatcaggccttctatcctgggctgcaacatccttcgagttgaatattccttactgatctatgttagcgttcctggatccaagaaggtcatccttgacctgcccctggtaattggcagcagatcaggtctaagcagcagaacatccagcatggccagccgaaccagctctgagatgagttgggtagatctgaacatccctgataccccagaagctcctccctgctatatggatgtcattcctgaagatcaccgattggagagcccaaccactcctctgctagatgacatggatggctctcaagacagccctatctttatgtatgcccctgagttcaagttcatgccaccaccgacttatactgaggtggatccctgcatcctcaacaacaatgtgcagtgagcatgtggaagaaaagaagcagctttacctacttgtttctttttgtctctcttcctggacactcactttttcagagactcaacagtctctgcaatggagtgtgggtccaccttagcctctgacttcctaatgtaggaggtggtcagcaggcaatctcctgggccttaaaggatgcggactcatcctcagccagcgcccatgttgtgatacaggggtgtttgttggatgggtttaaaaataactagaaaaactcaggcccatccattttctcagatctccttgaaaattgaggccttttcgatagtttcgggtcaggtaaaaatggcctcctggcgtaagcttttcaaggttttttggaggctttttgtaaattgtgataggaactttggaccttgaacttacgtatcatgtggagaagagccaatttaacaaactaggaagatgaaaagggaaattgtggccaaaactttgggaaaaggaggttcttaaaatcagtgtttcccctttgtgcacttgtagaaaaaaaagaaaaaccttctagagctgatttgatggacaatggagagagctttccctgtgattataaaaaaggaagctagctgctctacggtcatctttgcttagagtatactttaacctggcttttaaagcagtagtaactgccccaccaaaggtcttaaaagccatttttggagcctattgcactgtgttctcctactgcaaatattttcatatgggaggatggttttctcttcatgtaagtccttggaattgattctaaggtgatgttcttagcactttaattcctgtcaaattttttgttctccccttctgccatcttaaatgtaagctgaaactggtctactgtgtctctagggttaagccaaaagacaaaaaaaattttactacttttgagattgccccaatgtacagaattatataattctaacgcttaaatcatgtgaaagggttgctgctgtcagccttgcccactgtgacttcaaacccaaggaggaactcttgatcaagatgcccaaccctgtgatcagaacctccaaatactgccatgagaaactagagggcaggtcttcataaaagccctttgaacccccttcctgccctgtgttaggagatagggatattggcccctcactgcagctgccagcacttggtcagtcactctcagccatagcactttgttcactgtcctgtgtcagagcactgagctccacccttttctgagagttattacagccagaaagtgtgggctgaagatggttggtttcatgtttttgtattatgtatctttttgtatggtaaagactatattttgtacttaaccagatatatttttaccccagatggggatattctttgtaaaaaatgaaaataaagtttttttaatggaaaaaaa

SEQ ID NO: 53368 - DNA, 3702 bp, Homo sapiens
acgtttccgccttccagcggaaactaacccctctttttctccaaaggagtgcttgtggagatcggatcttttctccagcaattgggggaaagaaggctttttctctgaattcgcttagtgtaaccagcggcgtatattttttaggcgccttttcgaaaacctagtagttaatattcatttgtttaaatcttattttatttttaagctcaaactgcttaagaataccttaattccttaaagtgaaataattttttgcaaaggggtttcctcgatttggagctttttttttcttccaccgtcatttctaactcttaaaaccaactcagttccatcatggtgatgttcaagaagatcaagtcttttgaggtggtctttaacgaccctgaaaaggtgtacggcagtggcgagaaggtggctggccgggtgatagtggaggtgtgtgaagttactcgtgtcaaagccgttaggatcctggcttgcggagtggctaaagtgctttggatgcagggatcccagcagtgcaaacagacttcggagtacctgcgctatgaagacacgcttcttctggaagaccagccaacagggtaagcggcccaattcattgttggagggtgaaagctgattagagaagagaattgaatacacaaaacctgtacgaaatgttttaagttgctcagtttgagtggtttgaattacgtgttgttgcttccttttttctgttttaatttgcagacattctcctccccccccaaaaaaaagggtgatttgtacaattttttatggtgctgtgtcctaaaggggatcctgaggggcgttgcctcgggtagttaaagtcttatgtgtgcataagttgcttattctttgtctacttcctatttgagatgttagtagagaactgtcctgggtgaatctttcagtattgcagggcttggcaacttgctgcccgacaaaatacatcagaatttctctttaagaacaatatgggatggattaaaaaatatatatatgggatgaaattgggggtacttcaataccttgcatgccacccaagcattccttatcacacagatgcattttaagtgtaacagcaagcctaatggctactcgattttctttcccttcaggtgagaatgagatggtgatcatgagacctggaaacaaatatgagtacaagttcggctttgagcttcctcaggggcctctgggaacatccttcaaaggaaaatatgggtgtgtagactactgggtgaaggcttttcttgaccgcccgagccagccaactcaagagacaaagaaaaactttgaagtagtggatctggtggatgtcaatacccctgatttaatggcacctgtgtctgctaaaaaagaaaagaaagtttcctgcatgttcattcctgatgggcgggtgtctgtctctgctcgaattgacagaaaaggattctgtgaaggaaggtaaaatcctagtgcttatggcagttaaaacaggaactgggtttaggggcaagggcatgggactggggtagaggaagtgtcattaactatactgagtatcagtaagttttcatctttctcattgctaggtgatgagatttccatccatgctgactttgagaatacatgttcccgaattgtggtccccaaagctgccattgtggcccgccacacttaccttgccaatggccagaccaaggtgctgactcagaagttgtcatcagtcagaggcaatcatattatctcagggacatgcgcatcatggcgtggcaagagccttcgggttcagaagatcaggccttctatcctgggctgcaacatccttcgagttgaatattccttactggtgggtagatgcagggtggcttcagcagagaaattgttcatctgttaccacagctgtcttgtttctccagacctctggtgtaataaactgccatcttcctttctagatctatgttagcgttcctggatccaagaaggtcatccttgacctgcccctggtaattggcagcagatcaggtctaagcagcagaacatccagcatggccagccgaaccagctctgagatgagttgggtagatctgaacatccctgataccccagaagctcctccctgctatatggatgtcattcctgaagatcaccgattggagagcccaaccactcctctgctagatgacatggatggctctcaagacagccctatctttatgtatgcccctgagttcaagttcatgccaccaccgacttatactgaggtggatccctgcatcctcaacaacaatgtgcagtgagcatgtggaagaaaagaagcagctttacctacttgtttctttttgtctctcttcctggacactcactttttcagagactcaacagtctctgcaatggagtgtgggtccaccttagcctctgacttcctaatgtaggaggtggtcagcaggcaatctcctgggccttaaaggatgcggactcatcctcagccagcgcccatgttgtgatacaggggtgtttgttggatgggtttaaaaataactagaaaaactcaggcccatccattttctcagatctccttgaaaattgaggccttttcgatagtttcgggtcaggtaaaaatggcctcctggcgtaagcttttcaaggttttttggaggctttttgtaaattgtgataggaactttggaccttgaacttacgtatcatgtggagaagagccaatttaacaaactaggaagatgaaaagggaaattgtggccaaaactttgggaaaaggaggttcttaaaatcagtgtttcccctttgtgcacttgtagaaaaaaaagaaaaaccttctagagctgatttgatggacaatggagagagctttccctgtgattataaaaaaggaagctagctgctctacggtcatctttgcttagagtatactttaacctggcttttaaagcagtagtaactgccccaccaaaggtcttaaaagccatttttggagcctattgcactgtgttctcctactgcaaatattttcatatgggaggatggttttctcttcatgtaagtccttggaattgattctaaggtgatgttcttagcactttaattcctgtcaaattttttgttctccccttctgccatcttaaatgtaagctgaaactggtctactgtgtctctagggttaagccaaaagacaaaaaaaattttactacttttgagattgccccaatgtacagaattatataattctaacgcttaaatcatgtgaaagggttgctgctgtcagccttgcccactgtgacttcaaacccaaggaggaactcttgatcaagatgcccaaccctgtgatcagaacctccaaatactgccatgagaaactagagggcaggtcttcataaaagccctttgaacccccttcctgccctgtgttaggagatagggatattggcccctcactgcagctgccagcacttggtcagtcactctcagccatagcactttgttcactgtcctgtgtcagagcactgagctccacccttttctgagagttattacagccagaaagtgtgggctgaagatggttggtttcatgtttttgtattatgtatctttttgtatggtaaagactatattttgtacttaaccagatatatttttaccccagatggggatattctttgtaaaaaatgaaaataaagtttttttaatggaaaaaaa

SEQ ID NO: 53369 - DNA, 3752 bp, Homo sapiens
acgtttccgccttccagcggaaactaacccctctttttctccaaaggagtgcttgtggagatcggatcttttctccagcaattgggggaaagaaggctttttctctgaattcgcttagtgtaaccagcggcgtatattttttaggcgccttttcgaaaacctagtagttaatattcatttgtttaaatcttattttatttttaagctcaaactgcttaagaataccttaattccttaaagtgaaataattttttgcaaaggggtttcctcgatttggagctttttttttcttccaccgtcatttctaactcttaaaaccaactcagttccatcatggtgatgttcaagaagatcaagtcttttgaggtggtctttaacgaccctgaaaaggtgtacggcagtggcgagaaggtggctggccgggtgatagtggaggtgtgtgaagttactcgtgtcaaagccgttaggatcctggcttgcggagtggctaaagtgctttggatgcagggatcccagcagtgcaaacagacttcggagtacctgcgctatgaagacacgcttcttctggaagaccagccaacagggtaagcggcccaattcattgttggagggtgaaagctgattagagaagagaattgaatacacaaaacctgtacgaaatgttttaagttgctcagtttgagtggtttgaattacgtgttgttgcttccttttttctgttttaatttgcagacattctcctccccccccaaaaaaaagggtgatttgtacaattttttatggtgctgtgtcctaaaggggatcctgaggggcgttgcctcgggtagttaaagtcttatgtgtgcataagttgcttattctttgtctacttcctatttgagatgttagtagagaactgtcctgggtgaatctttcagtattgcagggcttggcaacttgctgcccgacaaaatacatcagaatttctctttaagaacaatatgggatggattaaaaaatatatatatgggatgaaattgggggtacttcaataccttgcatgccacccaagcattccttatcacacagatgcattttaagtgtaacagcaagcctaatggctactcgattttctttcccttcaggtgagaatgagatggtgatcatgagacctggaaacaaatatgagtacaagttcggctttgagcttcctcaggggcctctgggaacatccttcaaaggaaaatatgggtgtgtagactactgggtgaaggcttttcttgaccgcccgagccagccaactcaagagacaaagaaaaactttgaagtagtggatctggtggatgtcaatacccctgatttaatggcacctgtgtctgctaaaaaagaaaagaaagtttcctgcatgttcattcctgatgggcgggtgtctgtctctgctcgaattgacagaaaaggattctgtgaaggaaggtaaaatcctagtgcttatggcagttaaaacaggaactgggtttaggggcaagggcatgggactggggtagaggaagtgtcattaactatactgagtatcagtaagttttcatctttctcattgctaggtgatgagatttccatccatgctgactttgagaatacatgttcccgaattgtggtccccaaagctgccattgtggcccgccacacttaccttgccaatggccagaccaaggtgctgactcagaagttgtcatcagtcagaggcaatcatattatctcagggacatgcgcatcatggcgtggcaagagccttcgggttcagaagatcaggccttctatcctgggctgcaacatccttcgagttgaatattccttactggtgggtagatgcagggtggcttcagcagagaaattgttcatctgttaccacagctgtcttgtttctccagacctctggtgtaataaactgccatcttcctttctagatctatgttagcgttcctggatccaagaaggtcatccttgacctgcccctggtaattggcagcagatcaggtctaagcagcagaacatccagcatggccagccgaaccagctctgagatgagttgggtagatctgaacatccctgataccccagaagaggtgagccagacctaatgtcttttctttgtttctggtctacctgggtttctcctccctgctatatggatgtcattcctgaagatcaccgattggagagcccaaccactcctctgctagatgacatggatggctctcaagacagccctatctttatgtatgcccctgagttcaagttcatgccaccaccgacttatactgaggtggatccctgcatcctcaacaacaatgtgcagtgagcatgtggaagaaaagaagcagctttacctacttgtttctttttgtctctcttcctggacactcactttttcagagactcaacagtctctgcaatggagtgtgggtccaccttagcctctgacttcctaatgtaggaggtggtcagcaggcaatctcctgggccttaaaggatgcggactcatcctcagccagcgcccatgttgtgatacaggggtgtttgttggatgggtttaaaaataactagaaaaactcaggcccatccattttctcagatctccttgaaaattgaggccttttcgatagtttcgggtcaggtaaaaatggcctcctggcgtaagcttttcaaggttttttggaggctttttgtaaattgtgataggaactttggaccttgaacttacgtatcatgtggagaagagccaatttaacaaactaggaagatgaaaagggaaattgtggccaaaactttgggaaaaggaggttcttaaaatcagtgtttcccctttgtgcacttgtagaaaaaaaagaaaaaccttctagagctgatttgatggacaatggagagagctttccctgtgattataaaaaaggaagctagctgctctacggtcatctttgcttagagtatactttaacctggcttttaaagcagtagtaactgccccaccaaaggtcttaaaagccatttttggagcctattgcactgtgttctcctactgcaaatattttcatatgggaggatggttttctcttcatgtaagtccttggaattgattctaaggtgatgttcttagcactttaattcctgtcaaattttttgttctccccttctgccatcttaaatgtaagctgaaactggtctactgtgtctctagggttaagccaaaagacaaaaaaaattttactacttttgagattgccccaatgtacagaattatataattctaacgcttaaatcatgtgaaagggttgctgctgtcagccttgcccactgtgacttcaaacccaaggaggaactcttgatcaagatgcccaaccctgtgatcagaacctccaaatactgccatgagaaactagagggcaggtcttcataaaagccctttgaacccccttcctgccctgtgttaggagatagggatattggcccctcactgcagctgccagcacttggtcagtcactctcagccatagcactttgttcactgtcctgtgtcagagcactgagctccacccttttctgagagttattacagccagaaagtgtgggctgaagatggttggtttcatgtttttgtattatgtatctttttgtatggtaaagactatattttgtacttaaccagatatatttttaccccagatggggatattctttgtaaaaaatgaaaataaagtttttttaatggaaaaaaa

SEQ ID NO: 53370 - DNA, 1807 bp, Homo sapiens
  misc_feature (44)..(44): n is a, c, g, or t
cggtacctcggctctacttgtctccttcgaggttgaatattccnttagatctatgttagcgttcctggatccaagaaggtcatccttgacctgcccctggtaattggcagcagatcaggtctaagcagcagaacatccagcatggccagccgaaccagctctgagatgagttgggtagatctgaacatccctgataccccagaagctcctccctgctatatggatgtcattcctgaagatcaccgattggagagcccaaccactcctctgctagatgacatggatggctctcaagacagccctatctttatgtatgcccctgagttcaagttcatgccaccaccgacttatactgaggtggatccctgcatcctcaacaacaatgtgcagtgagcatgtggaagaaaagaagcagctttacctacttgtttctttttgtctctcttcctggacactcactttttcagagactcaacagtctctgcaatggagtgtgggtccaccttagcctctgacttcctaatgtaggaggtggtcagcaggcaatctcctgggccttaaaggatgcggactcatcctcagccagcgcccatgttgtgatacaggggtgtttgttggatgggtttaaaaataactagaaaaactcaggcccatccattttctcagatctccttgaaaattgaggccttttcgatagtttcgggtcaggtaaaaatggcctcctggcgtaagcttttcaaggttttttggaggctttttgtaaattgtgataggaactttggaccttgaacttacgtatcatgtggagaagagccaatttaacaaactaggaagatgaaaagggaaattgtggccaaaactttgggaaaaggaggttcttaaaatcagtgtttcccctttgtgcacttgtagaaaaaaaagaaaaaccttctagagctgatttgatggacaatggagagagctttccctgtgattataaaaaaggaagctagctgctctacggtcatctttgcttagagtatactttaacctggcttttaaagcagtagtaactgccccaccaaaggtcttaaaagccatttttggagcctattgcactgtgttctcctactgcaaatattttcatatgggaggatggttttctcttcatgtaagtccttggaattgattctaaggtgatgttcttagcactttaattcctgtcaaattttttgttctccccttctgccatcttaaatgtaagctgaaactggtctactgtgtctctagggttaagccaaaagacaaaaaaaattttactacttttgagattgccccaatgtacagaattatataattctaacgcttaaatcatgtgaaagggttgctgctgtcagccttgcccactgtgacttcaaacccaaggaggaactcttgatcaagatgcccaaccctgtgatcagaacctccaaatactgccatgagaaactagagggcaggtcttcataaaagccctttgaacccccttcctgccctgtgttaggagatagggatattggcccctcactgcagctgccagcacttggtcagtcactctcagccatagcactttgttcactgtcctgtgtcagagcactgagctccacccttttctgagagttattacagccagaaagtgtgggctgaagatggttggtttcatgtttttgtattatgtatctttttgtatggtaaagactatattttgtacttaaccagatatatttttaccccagatggggatattctttgtaaaaaatgaaaataaagtttttttaatggaaaaaaa

SEQ ID NO: 53371 - DNA, 3587 bp, Homo sapiens
acgtttccgccttccagcggaaactaacccctctttttctccaaaggagtgcttgtggagatcggatcttttctccagcaattgggggaaagaaggctttttctctgaattcgcttagtgtaaccagcggcgtatattttttaggcgccttttcgaaaacctagtagttaatattcatttgtttaaatcttattttatttttaagctcaaactgcttaagaataccttaattccttaaagtgaaataattttttgcaaaggggtttcctcgatttggagctttttttttcttccaccgtcatttctaactcttaaaaccaactcagttccatcatggtgatgttcaagaagatcaagtcttttgaggtggtctttaacgaccctgaaaaggtgtacggcagtggcgagaaggtggctggccgggtgatagtggaggtgtgtgaagttactcgtgtcaaagccgttaggatcctggcttgcggagtggctaaagtgctttggatgcagggatcccagcagtgcaaacagacttcggagtacctgcgctatgaagacacgcttcttctggaagaccagccaacagggtaagcggcccaattcattgttggagggtgaaagctgattagagaagagaattgaatacacaaaacctgtacgaaatgttttaagttgctcagtttgagtggtttgaattacgtgttgttgcttccttttttctgttttaatttgcagacattctcctccccccccaaaaaaaagggtgatttgtacaattttttatggtgctgtgtcctaaaggggatcctgaggggcgttgcctcgggtagttaaagtcttatgtgtgcataagttgcttattctttgtctacttcctatttgagatgttagtagagaactgtcctgggtgaatctttcagtattgcagggcttggcaacttgctgcccgacaaaatacatcagaatttctctttaagaacaatatgggatggattaaaaaatatatatatgggatgaaattgggggtacttcaataccttgcatgccacccaagcattccttatcacacagatgcattttaagtgtaacagcaagcctaatggctactcgattttctttcccttcaggtgagaatgagatggtgatcatgagacctggaaacaaatatgagtacaagttcggctttgagcttcctcaggggcctctgggaacatccttcaaaggaaaatatgggtgtgtagactactgggtgaaggcttttcttgaccgcccgagccagccaactcaagagacaaagaaaaactttgaagtagtggatctggtggatgtcaatacccctgatttaatggtgagatccattttaaagattctattctcctgggtcatgaggatgataaatcagacgtcttgggcattagattgaagcatctcaaaacacctttttatccccttctatataggcacctgtgtctgctaaaaaagaaaagaaagtttcctgcatgttcattcctgatgggcgggtgtctgtctctgctcgaattgacagaaaaggattctgtgaaggtgatgagatttccatccatgctgactttgagaatacatgttcccgaattgtggtccccaaagctgccattgtggcccgccacacttaccttgccaatggccagaccaaggtgctgactcagaagttgtcatcagtcagaggcaatcatattatctcagggacatgcgcatcatggcgtggcaagagccttcgggttcagaagatcaggccttctatcctgggctgcaacatccttcgagttgaatattccttactgatctatgttagcgttcctggatccaagaaggtcatccttgacctgcccctggtaattggcagcagatcaggtctaagcagcagaacatccagcatggccagccgaaccagctctgagatgagttgggtagatctgaacatccctgataccccagaagctcctccctgctatatggatgtcattcctgaagatcaccgattggagagcccaaccactcctctgctagatgacatggatggctctcaagacagccctatctttatgtatgcccctgagttcaagttcatgccaccaccgacttatactgagcttatactgaggtggatccctgcatcctcaacaacaatgtgcagtgagcatgtggaagaaaagaagcagctttacctacttgtttctttttgtctctcttcctggacactcactttttcagagactcaacagtctctgcaatggagtgtgggtccaccttagcctctgacttcctaatgtaggaggtggtcagcaggcaatctcctgggccttaaaggatgcggactcatcctcagccagcgcccatgttgtgatacaggggtgtttgttggatgggtttaaaaataactagaaaaactcaggcccatccattttctcagatctccttgaaaattgaggccttttcgatagtttcgggtcaggtaaaaatggcctcctggcgtaagcttttcaaggttttttggaggctttttgtaaattgtgataggaactttggaccttgaacttacgtatcatgtggagaagagccaatttaacaaactaggaagatgaaaagggaaattgtggccaaaactttgggaaaaggaggttcttaaaatcagtgtttcccctttgtgcacttgtagaaaaaaaagaaaaaccttctagagctgatttgatggacaatggagagagctttccctgtgattataaaaaaggaagctagctgctctacggtcatctttgcttagagtatactttaacctggcttttaaagcagtagtaactgccccaccaaaggtcttaaaagccatttttggagcctattgcactgtgttctcctactgcaaatattttcatatgggaggatggttttctcttcatgtaagtccttggaattgattctaaggtgatgttcttagcactttaattcctgtcaaattttttgttctccccttctgccatcttaaatgtaagctgaaactggtctactgtgtctctagggttaagccaaaagacaaaaaaaattttactacttttgagattgccccaatgtacagaattatataattctaacgcttaaatcatgtgaaagggttgctgctgtcagccttgcccactgtgacttcaaacccaaggaggaactcttgatcaagatgcccaaccctgtgatcagaacctccaaatactgccatgagaaactagagggcaggtcttcataaaagccctttgaacccccttcctgccctgtgttaggagatagggatattggcccctcactgcagctgccagcacttggtcagtcactctcagccatagcactttgttcactgtcctgtgtcagagcactgagctccacccttttctgagagttattacagccagaaagtgtgggctgaagatggttggtttcatgtttttgtattatgtatctttttgtatggtaaagactatattttgtacttaaccagatatatttttaccccagatggggatattctttgtaaaaaatgaaaataaagtttttttaatggaaaaaaa

SEQ ID NO: 53372 - DNA, 3718 bp, Homo sapiens
acgtttccgccttccagcggaaactaacccctctttttctccaaaggagtgcttgtggagatcggatcttttctccagcaattgggggaaagaaggctttttctctgaattcgcttagtgtaaccagcggcgtatattttttaggcgccttttcgaaaacctagtagttaatattcatttgtttaaatcttattttatttttaagctcaaactgcttaagaataccttaattccttaaagtgaaataattttttgcaaaggggtttcctcgatttggagctttttttttcttccaccgtcatttctaactcttaaaaccaactcagttccatcatggtgatgttcaagaagatcaagtcttttgaggtggtctttaacgaccctgaaaaggtgtacggcagtggcgagaaggtggctggccgggtgatagtggaggtgtgtgaagttactcgtgtcaaagccgttaggatcctggcttgcggagtggctaaagtgctttggatgcagggatcccagcagtgcaaacagacttcggagtacctgcgctatgaagacacgcttcttctggaagaccagccaacagggtaagcggcccaattcattgttggagggtgaaagctgattagagaagagaattgaatacacaaaacctgtacgaaatgttttaagttgctcagtttgagtggtttgaattacgtgttgttgcttccttttttctgttttaatttgcagacattctcctccccccccaaaaaaaagggtgatttgtacaattttttatggtgctgtgtcctaaaggggatcctgaggggcgttgcctcgggtagttaaagtcttatgtgtgcataagttgcttattctttgtctacttcctatttgagatgttagtagagaactgtcctgggtgaatctttcagtattgcagggcttggcaacttgctgcccgacaaaatacatcagaatttctctttaagaacaatatgggatggattaaaaaatatatatatgggatgaaattgggggtacttcaataccttgcatgccacccaagcattccttatcacacagatgcattttaagtgtaacagcaagcctaatggctactcgattttctttcccttcaggtgagaatgagatggtgatcatgagacctggaaacaaatatgagtacaagttcggctttgagcttcctcaggggcctctgggaacatccttcaaaggaaaatatgggtgtgtagactactgggtgaaggcttttcttgaccgcccgagccagccaactcaagagacaaagaaaaactttgaagtagtggatctggtggatgtcaatacccctgatttaatggtgagatccattttaaagattctattctcctgggtcatgaggatgataaatcagacgtcttgggcattagattgaagcatctcaaaacacctttttatccccttctatataggcacctgtgtctgctaaaaaagaaaagaaagtttcctgcatgttcattcctgatgggcgggtgtctgtctctgctcgaattgacagaaaaggattctgtgaaggtgatgagatttccatccatgctgactttgagaatacatgttcccgaattgtggtccccaaagctgccattgtggcccgccacacttaccttgccaatggccagaccaaggtgctgactcagaagttgtcatcagtcagaggcaatcatattatctcagggacatgcgcatcatggcgtggcaagagccttcgggttcagaagatcaggccttctatcctgggctgcaacatccttcgagttgaatattccttactgatctatgttagcgttcctggatccaagaaggtcatccttgacctgcccctggtaattggcagcagatcaggtctaagcagcagaacatccagcatggccagccgaaccagctctgagatgagttgggtagatctgaacatccctgataccccagaagctcctccctgctatatggatgtcattcctgaagatcaccgattggagagcccaaccactcctctgctagatgacatggatggctctcaagacagccctatctttatgtatgcccctgagttcaagttcatgccaccaccgacttatactgagcttatactgaggtgaggattgtcatctttactgttaaatttgtcctaagctttctataagaagttgacttagacggattgctaaactggtttgttctttttgttcttacctgaactgaaatagtctgtttctttctttaggtgtggatccctgcatcctcaacaacaatgtgcagtgagcatgtggaagaaaagaagcagctttacctacttgtttctttttgtctctcttcctggacactcactttttcagagactcaacagtctctgcaatggagtgtgggtccaccttagcctctgacttcctaatgtaggaggtggtcagcaggcaatctcctgggccttaaaggatgcggactcatcctcagccagcgcccatgttgtgatacaggggtgtttgttggatgggtttaaaaataactagaaaaactcaggcccatccattttctcagatctccttgaaaattgaggccttttcgatagtttcgggtcaggtaaaaatggcctcctggcgtaagcttttcaaggttttttggaggctttttgtaaattgtgataggaactttggaccttgaacttacgtatcatgtggagaagagccaatttaacaaactaggaagatgaaaagggaaattgtggccaaaactttgggaaaaggaggttcttaaaatcagtgtttcccctttgtgcacttgtagaaaaaaaagaaaaaccttctagagctgatttgatggacaatggagagagctttccctgtgattataaaaaaggaagctagctgctctacggtcatctttgcttagagtatactttaacctggcttttaaagcagtagtaactgccccaccaaaggtcttaaaagccatttttggagcctattgcactgtgttctcctactgcaaatattttcatatgggaggatggttttctcttcatgtaagtccttggaattgattctaaggtgatgttcttagcactttaattcctgtcaaattttttgttctccccttctgccatcttaaatgtaagctgaaactggtctactgtgtctctagggttaagccaaaagacaaaaaaaattttactacttttgagattgccccaatgtacagaattatataattctaacgcttaaatcatgtgaaagggttgctgctgtcagccttgcccactgtgacttcaaacccaaggaggaactcttgatcaagatgcccaaccctgtgatcagaacctccaaatactgccatgagaaactagagggcaggtcttcataaaagccctttgaacccccttcctgccctgtgttaggagatagggatattggcccctcactgcagctgccagcacttggtcagtcactctcagccatagcactttgttcactgtcctgtgtcagagcactgagctccacccttttctgagagttattacagccagaaagtgtgggctgaagatggttggtttcatgtttttgtattatgtatctttttgtatggtaaagactatattttgtacttaaccagatatatttttaccccagatggggatattctttgtaaaaaatgaaaataaagtttttttaatggaaaaaaa

SEQ ID NO: 53373 - DNA, 3712 bp, Homo sapiens
acgtttccgccttccagcggaaactaacccctctttttctccaaaggagtgcttgtggagatcggatcttttctccagcaattgggggaaagaaggctttttctctgaattcgcttagtgtaaccagcggcgtatattttttaggcgccttttcgaaaacctagtagttaatattcatttgtttaaatcttattttatttttaagctcaaactgcttaagaataccttaattccttaaagtgaaataattttttgcaaaggggtttcctcgatttggagctttttttttcttccaccgtcatttctaactcttaaaaccaactcagttccatcatggtgatgttcaagaagatcaagtcttttgaggtggtctttaacgaccctgaaaaggtgtacggcagtggcgagaaggtggctggccgggtgatagtggaggtgtgtgaagttactcgtgtcaaagccgttaggatcctggcttgcggagtggctaaagtgctttggatgcagggatcccagcagtgcaaacagacttcggagtacctgcgctatgaagacacgcttcttctggaagaccagccaacagggtaagcggcccaattcattgttggagggtgaaagctgattagagaagagaattgaatacacaaaacctgtacgaaatgttttaagttgctcagtttgagtggtttgaattacgtgttgttgcttccttttttctgttttaatttgcagacattctcctccccccccaaaaaaaagggtgatttgtacaattttttatggtgctgtgtcctaaaggggatcctgaggggcgttgcctcgggtagttaaagtcttatgtgtgcataagttgcttattctttgtctacttcctatttgagatgttagtagagaactgtcctgggtgaatctttcagtattgcagggcttggcaacttgctgcccgacaaaatacatcagaatttctctttaagaacaatatgggatggattaaaaaatatatatatgggatgaaattgggggtacttcaataccttgcatgccacccaagcattccttatcacacagatgcattttaagtgtaacagcaagcctaatggctactcgattttctttcccttcaggtgagaatgagatggtgatcatgagacctggaaacaaatatgagtacaagttcggctttgagcttcctcaggggcctctgggaacatccttcaaaggaaaatatgggtgtgtagactactgggtgaaggcttttcttgaccgcccgagccagccaactcaagagacaaagaaaaactttgaagtagtggatctggtggatgtcaatacccctgatttaatggcacctgtgtctgctaaaaaagaaaagaaagtttcctgcatgttcattcctgatgggcgggtgtctgtctctgctcgaattgacagaaaaggattctgtgaaggtgatgagatttccatccatgctgactttgagaatacatgttcccgaattgtggtccccaaagctgccattgtggcccgccacacttaccttgccaatggccagaccaaggtgctgactcagaagttgtcatcagtcagaggcaatcatattatctcagggacatgcgcatcatggcgtggcaagagccttcgggttcagaagatcaggccttctatcctgggctgcaacatccttcgagttgaatattccttactggtgggtagatgcagggtggcttcagcagagaaattgttcatctgttaccacagctgtcttgtttctccagacctctggtgtaataaactgccatcttcctttctagatctatgttagcgttcctggatccaagaaggtcatccttgacctgcccctggtaattggcagcagatcaggtctaagcagcagaacatccagcatggccagccgaaccagctctgagatgagttgggtagatctgaacatccctgataccccagaagctcctccctgctatatggatgtcattcctgaagatcaccgattggagagcccaaccactcctctgctagatgacatggatggctctcaagacagccctatctttatgtatgcccctgagttcaagttcatgccaccaccgacttatactgagcttatactgaggtgaggattgtcatctttactgttaaatttgtcctaagctttctataagaagttgacttagacggattgctaaactggtttgttctttttgttcttacctgaactgaaatagtctgtttctttctttaggtgtggatccctgcatcctcaacaacaatgtgcagtgagcatgtggaagaaaagaagcagctttacctacttgtttctttttgtctctcttcctggacactcactttttcagagactcaacagtctctgcaatggagtgtgggtccaccttagcctctgacttcctaatgtaggaggtggtcagcaggcaatctcctgggccttaaaggatgcggactcatcctcagccagcgcccatgttgtgatacaggggtgtttgttggatgggtttaaaaataactagaaaaactcaggcccatccattttctcagatctccttgaaaattgaggccttttcgatagtttcgggtcaggtaaaaatggcctcctggcgtaagcttttcaaggttttttggaggctttttgtaaattgtgataggaactttggaccttgaacttacgtatcatgtggagaagagccaatttaacaaactaggaagatgaaaagggaaattgtggccaaaactttgggaaaaggaggttcttaaaatcagtgtttcccctttgtgcacttgtagaaaaaaaagaaaaaccttctagagctgatttgatggacaatggagagagctttccctgtgattataaaaaaggaagctagctgctctacggtcatctttgcttagagtatactttaacctggcttttaaagcagtagtaactgccccaccaaaggtcttaaaagccatttttggagcctattgcactgtgttctcctactgcaaatattttcatatgggaggatggttttctcttcatgtaagtccttggaattgattctaaggtgatgttcttagcactttaattcctgtcaaattttttgttctccccttctgccatcttaaatgtaagctgaaactggtctactgtgtctctagggttaagccaaaagacaaaaaaaattttactacttttgagattgccccaatgtacagaattatataattctaacgcttaaatcatgtgaaagggttgctgctgtcagccttgcccactgtgacttcaaacccaaggaggaactcttgatcaagatgcccaaccctgtgatcagaacctccaaatactgccatgagaaactagagggcaggtcttcataaaagccctttgaacccccttcctgccctgtgttaggagatagggatattggcccctcactgcagctgccagcacttggtcagtcactctcagccatagcactttgttcactgtcctgtgtcagagcactgagctccacccttttctgagagttattacagccagaaagtgtgggctgaagatggttggtttcatgtttttgtattatgtatctttttgtatggtaaagactatattttgtacttaaccagatatatttttaccccagatggggatattctttgtaaaaaatgaaaataaagtttttttaatggaaaaaaa

SEQ ID NO: 53374 - DNA, 1686 bp, Homo sapiens
aaaaacttaggctaggtacgaggctgggtgtgaattcggcgaggatgagttgggtagatctgaacatccctgataccccagaagctcctccctgctatatggatgtcattcctgaagatcaccgattggagagcccaaccactcctctgctagatgacatggatggctctcaagacagccctatctttatgtatgcccctgagttcaagttcatgccaccaccgacttatactgaggtggatccctgcatcctcaacaacaatgtgcagtgagcatgtggaagaaaagaagcagctttacctacttgtttctttttgtctctcttcctggacactcactttttcagagactcaacagtctctgcaatggagtgtgggtccaccttagcctctgacttcctaatgtaggaggtggtcagcaggcaatctcctgggccttaaaggatgcggactcatcctcagccagcgcccatgttgtgatacaggggtgtttgttggatgggtttaaaaataactagaaaaactcaggcccatccattttctcagatctccttgaaaattgaggccttttcgatagtttcgggtcaggtaaaaatggcctcctggcgtaagcttttcaaggttttttggaggctttttgtaaattgtgataggaactttggaccttgaacttacgtatcatgtggagaagagccaatttaacaaactaggaagatgaaaagggaaattgtggccaaaactttgggaaaaggaggttcttaaaatcagtgtttcccctttgtgcacttgtagaaaaaaaagaaaaaccttctagagctgatttgatggacaatggagagagctttccctgtgattataaaaaaggaagctagctgctctacggtcatctttgcttagagtatactttaacctggcttttaaagcagtagtaactgccccaccaaaggtcttaaaagccatttttggagcctattgcactgtgttctcctactgcaaatattttcatatgggaggatggttttctcttcatgtaagtccttggaattgattctaaggtgatgttcttagcactttaattcctgtcaaattttttgttctccccttctgccatcttaaatgtaagctgaaactggtctactgtgtctctagggttaagccaaaagacaaaaaaaattttactacttttgagattgccccaatgtacagaattatataattctaacgcttaaatcatgtgaaagggttgctgctgtcagccttgcccactgtgacttcaaacccaaggaggaactcttgatcaagatgcccaaccctgtgatcagaacctccaaatactgccatgagaaactagagggcaggtcttcataaaagccctttgaacccccttcctgccctgtgttaggagatagggatattggcccctcactgcagctgccagcacttggtcagtcactctcagccatagcactttgttcactgtcctgtgtcagagcactgagctccacccttttctgagagttattacagccagaaagtgtgggctgaagatggttggtttcatgtttttgtattatgtatctttttgtatggtaaagactatattttgtacttaaccagatatatttttaccccagatggggatattctttgtaaaaaatgaaaataaagtttttttaatggaaaaaaa

SEQ ID NO: 53375 - DNA, 1649 bp, Homo sapiens
tcgagtcggccttgttgcctactggaacatccctgataccccagaagctcctccctgctatatggatgtcattcctgaagatcaccgattggagagcccaaccactcctctgctagatgacatggatggctctcaagacagccctatctttatgtatgcccctgagttcaagttcatgccaccaccgacttatactgaggtggatccctgcatcctcaacaacaatgtgcagtgagcatgtggaagaaaagaagcagctttacctacttgtttctttttgtctctcttcctggacactcactttttcagagactcaacagtctctgcaatggagtgtgggtccaccttagcctctgacttcctaatgtaggaggtggtcagcaggcaatctcctgggccttaaaggatgcggactcatcctcagccagcgcccatgttgtgatacaggggtgtttgttggatgggtttaaaaataactagaaaaactcaggcccatccattttctcagatctccttgaaaattgaggccttttcgatagtttcgggtcaggtaaaaatggcctcctggcgtaagcttttcaaggttttttggaggctttttgtaaattgtgataggaactttggaccttgaacttacgtatcatgtggagaagagccaatttaacaaactaggaagatgaaaagggaaattgtggccaaaactttgggaaaaggaggttcttaaaatcagtgtttcccctttgtgcacttgtagaaaaaaaagaaaaaccttctagagctgatttgatggacaatggagagagctttccctgtgattataaaaaaggaagctagctgctctacggtcatctttgcttagagtatactttaacctggcttttaaagcagtagtaactgccccaccaaaggtcttaaaagccatttttggagcctattgcactgtgttctcctactgcaaatattttcatatgggaggatggttttctcttcatgtaagtccttggaattgattctaaggtgatgttcttagcactttaattcctgtcaaattttttgttctccccttctgccatcttaaatgtaagctgaaactggtctactgtgtctctagggttaagccaaaagacaaaaaaaattttactacttttgagattgccccaatgtacagaattatataattctaacgcttaaatcatgtgaaagggttgctgctgtcagccttgcccactgtgacttcaaacccaaggaggaactcttgatcaagatgcccaaccctgtgatcagaacctccaaatactgccatgagaaactagagggcaggtcttcataaaagccctttgaacccccttcctgccctgtgttaggagatagggatattggcccctcactgcagctgccagcacttggtcagtcactctcagccatagcactttgttcactgtcctgtgtcagagcactgagctccacccttttctgagagttattacagccagaaagtgtgggctgaagatggttggtttcatgtttttgtattatgtatctttttgtatggtaaagactatattttgtacttaaccagatatatttttaccccagatggggatattctttgtaaaaaatgaaaataaagtttttttaatggaaaaaaa

SEQ ID NO: 53376 - DNA, 3533 bp, Homo sapiens
acgtttccgccttccagcggaaactaacccctctttttctccaaaggagtgcttgtggagatcggatcttttctccagcaattgggggaaagaaggctttttctctgaattcgcttagtgtaaccagcggcgtatattttttaggcgccttttcgaaaacctagtagttaatattcatttgtttaaatcttattttatttttaagctcaaactgcttaagaataccttaattccttaaagtgaaataattttttgcaaaggggtttcctcgatttggagctttttttttcttccaccgtcatttctaactcttaaaaccaactcagttccatcatggtgatgttcaagaagatcaagtcttttgaggtggtctttaacgaccctgaaaaggtgtacggcagtggcgagaaggtggctggccgggtgatagtggaggtgtgtgaagttactcgtgtcaaagccgttaggatcctggcttgcggagtggctaaagtgctttggatgcagggatcccagcagtgcaaacagacttcggagtacctgcgctatgaagacacgcttcttctggaagaccagccaacagggtaagcggcccaattcattgttggagggtgaaagctgattagagaagagaattgaatacacaaaacctgtacgaaatgttttaagttgctcagtttgagtggtttgaattacgtgttgttgcttccttttttctgttttaatttgcagacattctcctccccccccaaaaaaaagggtgatttgtacaattttttatggtgctgtgtcctaaaggggatcctgaggggcgttgcctcgggtagttaaagtcttatgtgtgcataagttgcttattctttgtctacttcctatttgagatgttagtagagaactgtcctgggtgaatctttcagtattgcagggcttggcaacttgctgcccgacaaaatacatcagaatttctctttaagaacaatatgggatggattaaaaaatatatatatgggatgaaattgggggtacttcaataccttgcatgccacccaagcattccttatcacacagatgcattttaagtgtaacagcaagcctaatggctactcgattttctttcccttcaggtgagaatgagatggtgatcatgagacctggaaacaaatatgagtacaagttcggctttgagcttcctcaggggcctctgggaacatccttcaaaggaaaatatgggtgtgtagactactgggtgaaggcttttcttgaccgcccgagccagccaactcaagagacaaagaaaaactttgaagtagtggatctggtggatgtcaatacccctgatttaatggtgagatccattttaaagattctattctcctgggtcatgaggatgataaatcagacgtcttgggcattagattgaagcatctcaaaacacctttttatccccttctatataggcacctgtgtctgctaaaaaagaaaagaaagtttcctgcatgttcattcctgatgggcgggtgtctgtctctgctcgaattgacagaaaaggattctgtgaaggtgatgagatttccatccatgctgactttgagaatacatgttcccgaattgtggtccccaaagctgccattgtggcccgccacacttaccttgccaatggccagaccaaggtgctgactcagaagttgtcatcagtcagaggcaatcatattatctcagggacatgcgcatcatggcgtggcaagagccttcgggttcagaagatcaggccttctatcctgggctgcaacatccttcgagttgaatattccttactgatctatgttagcgttcctggatccaagaaggtcatccttgacctgcccctggtaattggcagcagatcaggtctaagcagcagaacatccagcatggccagccgaaccagctctgagatgagttgggtagatctgaacatccctgataccccagaagctcctccctgctatatggatgtcattcctgaagatcaccgattggagagcccaaccactcctctgctagatgacatggatggctctcaagacagccctatctttatgtatgcccctgagttcaagttcatgccaccaccgacttatactgagcttatactgaggtggatccctgcatcctcaacaacaatgtgcagtgagcatgtggaagatttttcagagactcaacagtctctgcaatggagtgtgggtccaccttagcctctgacttcctaatgtaggaggtggtcagcaggcaatctcctgggccttaaaggatgcggactcatcctcagccagcgcccatgttgtgatacaggggtgtttgttggatgggtttaaaaataactagaaaaactcaggcccatccattttctcagatctccttgaaaattgaggccttttcgatagtttcgggtcaggtaaaaatggcctcctggcgtaagcttttcaaggttttttggaggctttttgtaaattgtgataggaactttggaccttgaacttacgtatcatgtggagaagagccaatttaacaaactaggaagatgaaaagggaaattgtggccaaaactttgggaaaaggaggttcttaaaatcagtgtttcccctttgtgcacttgtagaaaaaaaagaaaaaccttctagagctgatttgatggacaatggagagagctttccctgtgattataaaaaaggaagctagctgctctacggtcatctttgcttagagtatactttaacctggcttttaaagcagtagtaactgccccaccaaaggtcttaaaagccatttttggagcctattgcactgtgttctcctactgcaaatattttcatatgggaggatggttttctcttcatgtaagtccttggaattgattctaaggtgatgttcttagcactttaattcctgtcaaattttttgttctccccttctgccatcttaaatgtaagctgaaactggtctactgtgtctctagggttaagccaaaagacaaaaaaaattttactacttttgagattgccccaatgtacagaattatataattctaacgcttaaatcatgtgaaagggttgctgctgtcagccttgcccactgtgacttcaaacccaaggaggaactcttgatcaagatgcccaaccctgtgatcagaacctccaaatactgccatgagaaactagagggcaggtcttcataaaagccctttgaacccccttcctgccctgtgttaggagatagggatattggcccctcactgcagctgccagcacttggtcagtcactctcagccatagcactttgttcactgtcctgtgtcagagcactgagctccacccttttctgagagttattacagccagaaagtgtgggctgaagatggttggtttcatgtttttgtattatgtatctttttgtatggtaaagactatattttgtacttaaccagatatatttttaccccagatggggatattctttgtaaaaaatgaaaataaagtttttttaatggaaaaaaa

SEQ ID NO: 53377 - DNA, 1741 bp, Homo sapiens
aggttgagcttttggatacaggaacgctaaacatagatcacgtaaggaatattcaactcggaaggtatgttgcagcccaaggatagaaggtcctgaatcttctgaagcatcccgtgataccccagaagctcctccctgctatatggatgtcattcctgaagatcaccgattggagagcccaaccactcctctgctagatgacatggatggctctcaagacagccctatctttatgtatgcccctgagttcaagttcatgccaccaccgacttatactgagcttatactgaggtggatccctgcatcctcaacaacaatgtgcagtgagcatgtggaagaaaagaagcagctttacctacttgtttctttttgtctctcttcctggacactcactttttcagagactcaacagtctctgcaatggagtgtgggtccaccttagcctctgacttcctaatgtaggaggtggtcagcaggcaatctcctgggccttaaaggatgcggactcatcctcagccagcgcccatgttgtgatacaggggtgtttgttggatgggtttaaaaataactagaaaaactcaggcccatccattttctcagatctccttgaaaattgaggccttttcgatagtttcgggtcaggtaaaaatggcctcctggcgtaagcttttcaaggttttttggaggctttttgtaaattgtgataggaactttggaccttgaacttacgtatcatgtggagaagagccaatttaacaaactaggaagatgaaaagggaaattgtggccaaaactttgggaaaaggaggttcttaaaatcagtgtttcccctttgtgcacttgtagaaaaaaaagaaaaaccttctagagctgatttgatggacaatggagagagctttccctgtgattataaaaaaggaagctagctgctctacggtcatctttgcttagagtatactttaacctggcttttaaagcagtagtaactgccccaccaaaggtcttaaaagccatttttggagcctattgcactgtgttctcctactgcaaatattttcatatgggaggatggttttctcttcatgtaagtccttggaattgattctaaggtgatgttcttagcactttaattcctgtcaaattttttgttctccccttctgccatcttaaatgtaagctgaaactggtctactgtgtctctagggttaagccaaaagacaaaaaaaattttactacttttgagattgccccaatgtacagaattatataattctaacgcttaaatcatgtgaaagggttgctgctgtcagccttgcccactgtgacttcaaacccaaggaggaactcttgatcaagatgcccaaccctgtgatcagaacctccaaatactgccatgagaaactagagggcaggtcttcataaaagccctttgaacccccttcctgccctgtgttaggagatagggatattggcccctcactgcagctgccagcacttggtcagtcactctcagccatagcactttgttcactgtcctgtgtcagagcactgagctccacccttttctgagagttattacagccagaaagtgtgggctgaagatggttggtttcatgtttttgtattatgtatctttttgtatggtaaagactatattttgtacttaaccagatatatttttaccccagatggggatattctttgtaaaaaatgaaaataaagtttttttaatggaaaaaaa

SEQ ID NO: 53378 - DNA, 3522 bp, Homo sapiens
acgtttccgccttccagcggaaactaacccctctttttctccaaaggagtgcttgtggagatcggatcttttctccagcaattgggggaaagaaggctttttctctgaattcgcttagtgtaaccagcggcgtatattttttaggcgccttttcgaaaacctagtagttaatattcatttgtttaaatcttattttatttttaagctcaaactgcttaagaataccttaattccttaaagtgaaataattttttgcaaaggggtttcctcgatttggagctttttttttcttccaccgtcatttctaactcttaaaaccaactcagttccatcatggtgatgttcaagaagatcaagtcttttgaggtggtctttaacgaccctgaaaaggtgtacggcagtggcgagaaggtggctggccgggtgatagtggaggtgtgtgaagttactcgtgtcaaagccgttaggatcctggcttgcggagtggctaaagtgctttggatgcagggatcccagcagtgcaaacagacttcggagtacctgcgctatgaagacacgcttcttctggaagaccagccaacagggtaagcggcccaattcattgttggagggtgaaagctgattagagaagagaattgaatacacaaaacctgtacgaaatgttttaagttgctcagtttgagtggtttgaattacgtgttgttgcttccttttttctgttttaatttgcagacattctcctccccccccaaaaaaaagggtgatttgtacaattttttatggtgctgtgtcctaaaggggatcctgaggggcgttgcctcgggtagttaaagtcttatgtgtgcataagttgcttattctttgtctacttcctatttgagatgttagtagagaactgtcctgggtgaatctttcagtattgcagggcttggcaacttgctgcccgacaaaatacatcagaatttctctttaagaacaatatgggatggattaaaaaatatatatatgggatgaaattgggggtacttcaataccttgcatgccacccaagcattccttatcacacagatgcattttaagtgtaacagcaagcctaatggctactcgattttctttcccttcaggtgagaatgagatggtgatcatgagacctggaaacaaatatgagtacaagttcggctttgagcttcctcaggggcctctgggaacatccttcaaaggaaaatatgggtgtgtagactactgggtgaaggcttttcttgaccgcccgagccagccaactcaagagacaaagaaaaactttgaagtagtggatctggtggatgtcaatacccctgatttaatggtgagatccattttaaagattctattctcctgggtcatgaggatgataaatcagacgtcttgggcattagattgaagcatctcaaaacacctttttatccccttctatataggcacctgtgtctgctaaaaaagaaaagaaagtttcctgcatgttcattcctgatgggcgggtgtctgtctctgctcgaattgacagaaaaggattctgtgaaggtgatgagatttccatccatgctgactttgagaatacatgttcccgaattgtggtccccaaagctgccattgtggcccgccacacttaccttgccaatggccagaccaaggtgctgactcagaagttgtcatcagtcagaggcaatcatattatctcagggacatgcgcatcatggcgtggcaagagccttcgggttcagaagatcaggccttctatcctgggctgcaacatccttcgagttgaatattccttactgatctatgttagcgttcctggatccaagaaggtcatccttgacctgcccctggtaattggcagcagatcaggtctaagcagcagaacatccagcatggccagccgaaccagctctgagatgagttgggtagatctgaacatccctgataccccagaagctcctccctgctatatggatgtcattcctgaagatcaccgattggagagcccaaccactcctctgctagatgacatggatggctctcaagacagccctatctttatgtatgcccctgagttcaagttcatgccaccaccgacttatactgaggtggatccctgcatcctcaacaacaatgtgcagtgagcatgtggaagaaaagaagcagctttacctacttgtttctttttgtctctcttcctggacactcactttttcagagactcaacagtctctgcaatggagtgtgggtccaccttagcctctgacttcctaatgtaggaggtggtcagcaggcaatctcctgggccttaaaggatgcggactcatcctcagccagcgcccatgttgtgatacaggggtgtttgttggatgggtttaaaaataactagaaaaactcaggcccatccattttctcagatctccttgaaaattgaggccttttcgatagtttcgggtcaggtaaaaatggcctcctggcgtaagcttttcaaggttttttggaggctttttgtaaattgtgataggaactttggaccttgaacttacgtatcatgtggagaagagccaatttaacaaactaggaagatgaaaagggaaattgtggccaaaactttgggaaaaggaggttcttaaaatcagtgtttcccctttgtgcacttgtagaaaaaaaagaaaaaccttctagagctgatttgatggacaatggagagagctttccctgtgattataaaaaaggaagctagctgctctacggtcatctttgcttagagtatactttaacctggcttttaaagcagtagtaactgccccaccaaaggtcttaaaagccatttttggagcctattgcactgtgttctcctactgcaaatattttcatatgggaggatggttttctcttcatgtaagtccttggaattgattctaaggtgatgttcttagcactttaattcctgtcaaattttttgttctccccttctgccatcttaaatgtaagctgaaactggtctactgtgtctctagggttaagccaaaagacaaaagcttaaatcatgtgaaagggttgctgctgtcagccttgcccactgtgacttcaaacccaaggaggaactcttgatcaagatgcccaaccctgtgatcagaacctccaaatactgccatgagaaactagagggcaggtcttcataaaagccctttgaacccccttcctgccctgtgttaggagatagggatattggcccctcactgcagctgccagcacttggtcagtcactctcagccatagcactttgttcactgtcctgtgtcagagcactgagctccacccttttctgagagttattacagccagaaagtgtgggctgaagatggttggtttcatgtttttgtattatgtatctttttgtatggtaaagactatattttgtacttaaccagatatatttttaccccagatggggatattctttgtaaaaaatgaaaataaagtttttttaatggaaaaaaa

SEQ ID NO: 53379 - DNA, 3618 bp, Homo sapiens
acgtttccgccttccagcggaaactaacccctctttttctccaaaggagtgcttgtggagatcggatcttttctccagcaattgggggaaagaaggctttttctctgaattcgcttagtgtaaccagcggcgtatattttttaggcgccttttcgaaaacctagtagttaatattcatttgtttaaatcttattttatttttaagctcaaactgcttaagaataccttaattccttaaagtgaaataattttttgcaaaggggtttcctcgatttggagctttttttttcttccaccgtcatttctaactcttaaaaccaactcagttccatcatggtgatgttcaagaagatcaagtcttttgaggtggtctttaacgaccctgaaaaggtgtacggcagtggcgagaaggtggctggccgggtgatagtggaggtgtgtgaagttactcgtgtcaaagccgttaggatcctggcttgcggagtggctaaagtgctttggatgcagggatcccagcagtgcaaacagacttcggagtacctgcgctatgaagacacgcttcttctggaagaccagccaacagggtaagcggcccaattcattgttggagggtgaaagctgattagagaagagaattgaatacacaaaacctgtacgaaatgttttaagttgctcagtttgagtggtttgaattacgtgttgttgcttccttttttctgttttaatttgcagacattctcctccccccccaaaaaaaagggtgatttgtacaattttttatggtgctgtgtcctaaaggggatcctgaggggcgttgcctcgggtagttaaagtcttatgtgtgcataagttgcttattctttgtctacttcctatttgagatgttagtagagaactgtcctgggtgaatctttcagtattgcagggcttggcaacttgctgcccgacaaaatacatcagaatttctctttaagaacaatatgggatggattaaaaaatatatatatgggatgaaattgggggtacttcaataccttgcatgccacccaagcattccttatcacacagatgcattttaagtgtaacagcaagcctaatggctactcgattttctttcccttcaggtgagaatgagatggtgatcatgagacctggaaacaaatatgagtacaagttcggctttgagcttcctcaggggcctctgggaacatccttcaaaggaaaatatgggtgtgtagactactgggtgaaggcttttcttgaccgcccgagccagccaactcaagagacaaagaaaaactttgaagtagtggatctggtggatgtcaatacccctgatttaatggtgagatccattttaaagattctattctcctgggtcatgaggatgataaatcagacgtcttgggcattagattgaagcatctcaaaacacctttttatccccttctatataggcacctgtgtctgctaaaaaagaaaagaaagtttcctgcatgttcattcctgatgggcgggtgtctgtctctgctcgaattgacagaaaaggattctgtgaaggtgatgagatttccatccatgctgactttgagaatacatgttcccgaattgtggtccccaaagctgccattgtggcccgccacacttaccttgccaatggccagaccaaggtgctgactcagaagttgtcatcagtcagaggcaatcatattatctcagggacatgcgcatcatggcgtggcaagagccttcgggttcagaagatcaggccttctatcctgggctgcaacatccttcgagttgaatattccttactgatctatgttagcgttcctggatccaagaaggtcatccttgacctgcccctggtaattggcagcagatcaggtctaagcagcagaacatccagcatggccagccgaaccagctctgagatgagttgggtagatctgaacatccctgataccccagaagctcctccctgctatatggatgtcattcctgaagatcaccgattggagagcccaaccactcctctgctagatgacatggatggctctcaagacagccctatctttatgtatgcccctgagttcaagttcatgccaccaccgacttatactgaggtggatccctgcatcctcaacaacaatgtgcagtgagcatgtggaagaaaagaagcagctttacctacttgtttctttttgtctctcttcctggacactcactttttcagagactcaacagtctctgcaatggagtgtgggtccaccttagcctctgacttcctaatgtaggaggtggtcagcaggcaatctcctgggccttaaaggatgcggactcatcctcagccagcgcccatgttgtgatacaggggtgtttgttggatgggtttaaaaataactagaaaaactcaggcccatccattttctcagatctccttgaaaattgaggccttttcgatagtttcgggtcaggtaaaaatggcctcctggcgtaagcttttcaaggttttttggaggctttttgtaaattgtgataggaactttggaccttgaacttacgtatcatgtggagaagagccaatttaacaaactaggaagatgaaaagggaaattgtggccaaaactttgggaaaaggaggttcttaaaatcagtgtttcccctttgtgcacttgtagaaaaaaaagaaaaaccttctagagctgatttgatggacaatggagagagctttccctgtgattataaaaaaggaagctagctgctctacggtcatctttgcttagagtatactttaacctggcttttaaagcagtagtaactgccccaccaaaggtcttaaaagccatttttggagcctattgcactgtgttctcctactgcaaatattttcatatgggaggatggttttctcttcatgtaagtccttggaattgattctaaggtgatgttcttagcactttaattcctgtcaaattttttgttctccccttctgccatcttaaatgtaagctgaaactggtctactgtgtctctagggttaagccaaaagacaaaaaaaattttactacttttgagattgccccaatgtacagaattatataattctaacgcttaaatcatgtgaaagggttgctgctgtcagccttgcccactgtgacttcaaacccaaggaggaactcttgatcaagatgcccaaccctgtgatcagaacctccaaatactgccatgagaaactagagggcaggtcttcataaaagccctttgaacccccttcctgccctgtgttaggagatagggatattggcccctcactgcagctgccagcacttggtcagtcactctcagccatagcactttgttcactgtcctgtgtcagagcactgagctccacccttttctgagagttattacagccagaaagtgtgggctgaagatggttggtttcatgtttttgtattatgtatctttttgtatggtaaagactatattttgtacttaaccagatatatttttaccccagatggggatattctttgtaaaaaatgaaaataaagtttttttaatggaaaaaaacaacgccaccacaacaccaacacccggctccacaaaaaaaag

SEQ ID NO: 53380 - DNA, 4121 bp, Homo sapiens
  misc_feature (3602)..(3602): n is a, c, g, or t
acgtttccgccttccagcggaaactaacccctctttttctccaaaggagtgcttgtggagatcggatcttttctccagcaattgggggaaagaaggctttttctctgaattcgcttagtgtaaccagcggcgtatattttttaggcgccttttcgaaaacctagtagttaatattcatttgtttaaatcttattttatttttaagctcaaactgcttaagaataccttaattccttaaagtgaaataattttttgcaaaggggtttcctcgatttggagctttttttttcttccaccgtcatttctaactcttaaaaccaactcagttccatcatggtgatgttcaagaagatcaagtcttttgaggtggtctttaacgaccctgaaaaggtgtacggcagtggcgagaaggtggctggccgggtgatagtggaggtgtgtgaagttactcgtgtcaaagccgttaggatcctggcttgcggagtggctaaagtgctttggatgcagggatcccagcagtgcaaacagacttcggagtacctgcgctatgaagacacgcttcttctggaagaccagccaacagggtaagcggcccaattcattgttggagggtgaaagctgattagagaagagaattgaatacacaaaacctgtacgaaatgttttaagttgctcagtttgagtggtttgaattacgtgttgttgcttccttttttctgttttaatttgcagacattctcctccccccccaaaaaaaagggtgatttgtacaattttttatggtgctgtgtcctaaaggggatcctgaggggcgttgcctcgggtagttaaagtcttatgtgtgcataagttgcttattctttgtctacttcctatttgagatgttagtagagaactgtcctgggtgaatctttcagtattgcagggcttggcaacttgctgcccgacaaaatacatcagaatttctctttaagaacaatatgggatggattaaaaaatatatatatgggatgaaattgggggtacttcaataccttgcatgccacccaagcattccttatcacacagatgcattttaagtgtaacagcaagcctaatggctactcgattttctttcccttcaggtgagaatgagatggtgatcatgagacctggaaacaaatatgagtacaagttcggctttgagcttcctcaggggcctctgggaacatccttcaaaggaaaatatgggtgtgtagactactgggtgaaggcttttcttgaccgcccgagccagccaactcaagagacaaagaaaaactttgaagtagtggatctggtggatgtcaatacccctgatttaatggtgagatccattttaaagattctattctcctgggtcatgaggatgataaatcagacgtcttgggcattagattgaagcatctcaaaacacctttttatccccttctatataggcacctgtgtctgctaaaaaagaaaagaaagtttcctgcatgttcattcctgatgggcgggtgtctgtctctgctcgaattgacagaaaaggattctgtgaaggtgatgagatttccatccatgctgactttgagaatacatgttcccgaattgtggtccccaaagctgccattgtggcccgccacacttaccttgccaatggccagaccaaggtgctgactcagaagttgtcatcagtcagaggcaatcatattatctcagggacatgcgcatcatggcgtggcaagagccttcgggttcagaagatcaggccttctatcctgggctgcaacatccttcgagttgaatattccttactgatctatgttagcgttcctggatccaagaaggtcatccttgacctgcccctggtaattggcagcagatcaggtctaagcagcagaacatccagcatggccagccgaaccagctctgagatgagttgggtagatctgaacatccctgataccccagaagctcctccctgctatatggatgtcattcctgaagatcaccgattggagagcccaaccactcctctgctagatgacatggatggctctcaagacagccctatctttatgtatgcccctgagttcaagttcatgccaccaccgacttatactgaggtggatccctgcatcctcaacaacaatgtgcagtgagcatgtggaagaaaagaagcagctttacctacttgtttctttttgtctctcttcctggacactcactttttcagagactcaacagtctctgcaatggagtgtgggtccaccttagcctctgacttcctaatgtaggaggtggtcagcaggcaatctcctgggccttaaaggatgcggactcatcctcagccagcgcccatgttgtgatacaggggtgtttgttggatgggtttaaaaataactagaaaaactcaggcccatccattttctcagatctccttgaaaattgaggccttttcgatagtttcgggtcaggtaaaaatggcctcctggcgtaagcttttcaaggttttttggaggctttttgtaaattgtgataggaactttggaccttgaacttacgtatcatgtggagaagagccaatttaacaaactaggaagatgaaaagggaaattgtggccaaaactttgggaaaaggaggttcttaaaatcagtgtttcccctttgtgcacttgtagaaaaaaaagaaaaaccttctagagctgatttgatggacaatggagagagctttccctgtgattataaaaaaggaagctagctgctctacggtcatctttgcttagagtatactttaacctggcttttaaagcagtagtaactgccccaccaaaggtcttaaaagccatttttggagcctattgcactgtgttctcctactgcaaatattttcatatgggaggatggttttctcttcatgtaagtccttggaattgattctaaggtgatgttcttagcactttaattcctgtcaaattttttgttctccccttctgccatcttaaatgtaagctgaaactggtctactgtgtctctagggttaagccaaaagacaaaaaaaattttactacttttgagattgccccaatgtacagaattatataattctaacgcttaaatcatgtgaaagggttgctgctgtcagccttgcccactgtgacttcaaacccaaggaggaactcttgatcaagatgcccaaccctgtgatcagaacctccaaatactgccatgagaaactagagggcaggtcttcataaaagccctttgaacccccttcctgccctgtgttaggagatagggatattggcccctcactgcagctgccagcacttggtcagtcactctcagccatagcactttgttcactgtcctgtgtcagagcactgagctccacccttttctgagagttattacagccagaaagtgtgggctgaagatggttggtttcatgtttttgtattatgtatctttttgtatggtaaagactatattttgtacttaaccagatatatttttaccccagatggggatattctttgtaaaaaatgaaaataaagtttttttaatggaaaaaaaaaaaaaaaaaaaaaaaaaaaaaaaanaaaaaaaaaaaaaaaaaaaaaaccacaaaaaaaaaaaaaaaagaaaacaaaaaaggggggacgtaataaagagtcttctcctcgcgggggagccctactttataaaccgccacattttttttacaaaagggggcccctttactaggggcctctatatttatgctgcgtcatgcgcgccgtctgattacacactttgttgatgagagaagacaaatagaaagagagctaatttctgcagagacgcccccaccattatttcgcgtggtggtggaacaacaattatatgtggcagcgcaaccccaccgcccctagaagtaatctattatcaccctgtgggcgggtacatatacaagatcactcaccaggtcgcaggtgtcatctagtctgttgcccaaacctagtcagtcgattattatatcgcgtggcgcagcagacagcatattcttatgccgcagcacagcaacagcagttgaccgacgacaattttatcccaccacgggcgacatgtaaaagaacact

SEQ ID NO: 53381 - DNA, 4070 bp, Homo sapiens
acgtttccgccttccagcggaaactaacccctctttttctccaaaggagtgcttgtggagatcggatcttttctccagcaattgggggaaagaaggctttttctctgaattcgcttagtgtaaccagcggcgtatattttttaggcgccttttcgaaaacctagtagttaatattcatttgtttaaatcttattttatttttaagctcaaactgcttaagaataccttaattccttaaagtgaaataattttttgcaaaggggtttcctcgatttggagctttttttttcttccaccgtcatttctaactcttaaaaccaactcagttccatcatggtgatgttcaagaagatcaagtcttttgaggtggtctttaacgaccctgaaaaggtgtacggcagtggcgagaaggtggctggccgggtgatagtggaggtgtgtgaagttactcgtgtcaaagccgttaggatcctggcttgcggagtggctaaagtgctttggatgcagggatcccagcagtgcaaacagacttcggagtacctgcgctatgaagacacgcttcttctggaagaccagccaacagggtaagcggcccaattcattgttggagggtgaaagctgattagagaagagaattgaatacacaaaacctgtacgaaatgttttaagttgctcagtttgagtggtttgaattacgtgttgttgcttccttttttctgttttaatttgcagacattctcctccccccccaaaaaaaagggtgatttgtacaattttttatggtgctgtgtcctaaaggggatcctgaggggcgttgcctcgggtagttaaagtcttatgtgtgcataagttgcttattctttgtctacttcctatttgagatgttagtagagaactgtcctgggtgaatctttcagtattgcagggcttggcaacttgctgcccgacaaaatacatcagaatttctctttaagaacaatatgggatggattaaaaaatatatatatgggatgaaattgggggtacttcaataccttgcatgccacccaagcattccttatcacacagatgcattttaagtgtaacagcaagcctaatggctactcgattttctttcccttcaggtgagaatgagatggtgatcatgagacctggaaacaaatatgagtacaagttcggctttgagcttcctcaggggcctctgggaacatccttcaaaggaaaatatgggtgtgtagactactgggtgaaggcttttcttgaccgcccgagccagccaactcaagagacaaagaaaaactttgaagtagtggatctggtggatgtcaatacccctgatttaatggtgagatccattttaaagattctattctcctgggtcatgaggatgataaatcagacgtcttgggcattagattgaagcatctcaaaacacctttttatccccttctatataggcacctgtgtctgctaaaaaagaaaagaaagtttcctgcatgttcattcctgatgggcgggtgtctgtctctgctcgaattgacagaaaaggattctgtgaaggtgatgagatttccatccatgctgactttgagaatacatgttcccgaattgtggtccccaaagctgccattgtggcccgccacacttaccttgccaatggccagaccaaggtgctgactcagaagttgtcatcagtcagaggcaatcatattatctcagggacatgcgcatcatggcgtggcaagagccttcgggttcagaagatcaggccttctatcctgggctgcaacatccttcgagttgaatattccttactgatctatgttagcgttcctggatccaagaaggtcatccttgacctgcccctggtaattggcagcagatcaggtctaagcagcagaacatccagcatggccagccgaaccagctctgagatgagttgggtagatctgaacatccctgataccccagaagctcctccctgctatatggatgtcattcctgaagatcaccgattggagagcccaaccactcctctgctagatgacatggatggctctcaagacagccctatctttatgtatgcccctgagttcaagttcatgccaccaccgacttatactgaggtggatccctgcatcctcaacaacaatgtgcagtgagcatgtggaagaaaagaagcagctttacctacttgtttctttttgtctctcttcctggacactcactttttcagagactcaacagtctctgcaatggagtgtgggtccaccttagcctctgacttcctaatgtaggaggtggtcagcaggcaatctcctgggccttaaaggatgcggactcatcctcagccagcgcccatgttgtgatacaggggtgtttgttggatgggtttaaaaataactagaaaaactcaggcccatccattttctcagatctccttgaaaattgaggccttttcgatagtttcgggtcaggtaaaaatggcctcctggcgtaagcttttcaaggttttttggaggctttttgtaaattgtgataggaactttggaccttgaacttacgtatcatgtggagaagagccaatttaacaaactaggaagatgaaaagggaaattgtggccaaaactttgggaaaaggaggttcttaaaatcagtgtttcccctttgtgcacttgtagaaaaaaaagaaaaaccttctagagctgatttgatggacaatggagagagctttccctgtgattataaaaaaggaagctagctgctctacggtcatctttgcttagagtatactttaacctggcttttaaagcagtagtaactgccccaccaaaggtcttaaaagccatttttggagcctattgcactgtgttctcctactgcaaatattttcatatgggaggatggttttctcttcatgtaagtccttggaattgattctaaggtgatgttcttagcactttaattcctgtcaaattttttgttctccccttctgccatcttaaatgtaagctgaaactggtctactgtgtctctagggttaagccaaaagacaaaaaaaattttactacttttgagattgccccaatgtacagaattatataattctaacgcttaaatcatgtgaaagggttgctgctgtcagccttgcccactgtgacttcaaacccaaggaggaactcttgatcaagatgcccaaccctgtgatcagaacctccaaatactgccatgagaaactagagggcaggtcttcataaaagccctttgaacccccttcctgccctgtgttaggagatagggatattggcccctcactgcagctgccagcacttggtcagtcactctcagccatagcactttgttcactgtcctgtgtcagagcactgagctccacccttttctgagagttattacagccagaaagtgtgggctgaagatggttggtttcatgtttttgtattatgtatctttttgtatggtaaagactatattttgtacttaaccagatatatttttaccccagatggggatattctttgtaaaaaatgaaaataaagtttttttaatggaaaaaaacaaaaaaaaaaaaaaaagaaaacaaaaaaggggggacgtaataaagagtcttctcctcgcgggggagccctactttataaaccgccacattttttttacaaaagggggcccctttactaggggcctctatatttatgctgcgtcatgcgcgccgtctgattacacactttgttgatgagagaagacaaatagaaagagagctaatttctgcagagacgcccccaccattatttcgcgtggtggtggaacaacaattatatgtggcagcgcaaccccaccgcccctagaagtaatctattatcaccctgtgggcgggtacatatacaagatcactcaccaggtcgcaggtgtcatctagtctgttgcccaaacctagtcagtcgattattatatcgcgtggcgcagcagacagcatattcttatgccgcagcacagcaacagcagttgaccgacgacaattttatcccaccacgggcgacatgtaaaagaacact

SEQ ID NO: 53382 - DNA, 3276 bp, Homo sapiens
acgtttccgccttccagcggaaactaacccctctttttctccaaaggagtgcttgtggagatcggatcttttctccagcaattgggggaaagaaggctttttctctgaattcgcttagtgtaaccagcggcgtatattttttaggcgccttttcgaaaacctagtagttaatattcatttgtttaaatcttattttatttttaagctcaaactgcttaagaataccttaattccttaaagtgaaataattttttgcaaaggggtttcctcgatttggagctttttttttcttccaccgtcatttctaactcttaaaaccaactcagttccatcatggtgatgttcaagaagatcaagtcttttgaggtggtctttaacgaccctgaaaaggtgtacggcagtggcgagaaggtggctggccgggtgatagtggaggtgtgtgaagttactcgtgtcaaagccgttaggatcctggcttgcggagtggctaaagtgctttggatgcagggatcccagcagtgcaaacagacttcggagtacctgcgctatgaagacacgcttcttctggaagaccagccaacagggtaagcggcccaattcattgttggagggtgaaagctgattagagaagagaattgaatacacaaaacctgtacgaaatgttttaagttgctcagtttgagtggtttgaattacgtgttgttgcttccttttttctgttttaatttgcagacattctcctccccccccaaaaaaaagggtgatttgtacaattttttatggtgctgtgtcctaaaggggatcctgaggggcgttgcctcgggtagttaaagtcttatgtgtgcataagttgcttattctttgtctacttcctatttgagatgttagtagagaactgtcctgggtgaatctttcagtattgcagggcttggcaacttgctgcccgacaaaatacatcagaatttctctttaagaacaatatgggatggattaaaaaatatatatatgggatgaaattgggggtacttcaataccttgcatgccacccaagcattccttatcacacagatgcattttaagtgtaacagcaagcctaatggctactcgattttctttcccttcaggtgagaatgagatggtgatcatgagacctggaaacaaatatgagtacaagttcggctttgagcttcctcaggggcctctgggaacatccttcaaaggaaaatatgggtgtgtagactactgggtgaaggcttttcttgaccgcccgagccagccaactcaagagacaaagaaaaactttgaagtagtggatctggtggatgtcaatacccctgatttaatggtgagatccattttaaagattctattctcctgggtcatgaggatgataaatcagacgtcttgggcattagattgaagcatctcaaaacacctttttatccccttctatataggcacctgtgtctgctaaaaaagaaaagaaagtttcctgcatgttcattcctgatgggcgggtgtctgtctctgctcgaattgacagaaaaggattctgtgaaggtgatgagatttccatccatgctgactttgagaatacatgttcccgaattgtggtccccaaagctgccattgtggcccgccacacttaccttgccaatggccagaccaaggtgctgactcagaagttgtcatcagtcagaggcaatcatattatctcagggacatgcgcatcatggcgtggcaagagccttcgggttcagaagatcaggccttctatcctgggctgcaacatccttcgagttgaatattccttactgatctatgttagcgttcctggatccaagaaggtcatccttgacctgcccctggtaattggcagcagatcaggtctaagcagcagaacatccagcatggccagccgaaccagctctgagatgagttgggtagatctgaacatccctgataccccagaagctcctccctgctatatggatgtcattcctgaagatcaccgattggagagcccaaccactcctctgctagatgacatggatggctctcaagacagccctatctttatgtatgcccctgagttcaagttcatgccaccaccgacttatactgagcttatactgaggtgaggattgtcatctttactgttaaatttgtcctaagctttctataagaagttgacttagacggattgctaaactggtttgttgctttttgtaaattgtgataggaactttggaccttgaacttacgtatcatgtggagaagagccaatttaacaaactaggaagatgaaaagggaaattgtggccaaaactttgggaaaaggaggttcttaaaatcagtgtttcccctttgtgcacttgtagaaaaaaaagaaaaaccttctagagctgatttgatggacaatggagagagctttccctgtgattataaaaaaggaagctagctgctctacggtcatctttgcttagagtatactttaacctggcttttaaagcagtagtaactgccccaccaaaggtcttaaaagccatttttggagcctattgcactgtgttctcctactgcaaatattttcatatgggaggatggttttctcttcatgtaagtccttggaattgattctaaggtgatgttcttagcactttaattcctgtcaaattttttgttctccccttctgccatcttaaatgtaagctgaaactggtctactgtgtctctagggttaagccaaaagacaaaaaaaattttactacttttgagattgccccaatgtacagaattatataattctaacgcttaaatcatgtgaaagggttgctgctgtcagccttgcccactgtgacttcaaacccaaggaggaactcttgatcaagatgcccaaccctgtgatcagaacctccaaatactgccatgagaaactagagggcaggtcttcataaaagccctttgaacccccttcctgccctgtgttaggagatagggatattggcccctcactgcagctgccagcacttggtcagtcactctcagccatagcactttgttcactgtcctgtgtcagagcactgagctccacccttttctgagagttattacagccagaaagtgtgggctgaagatggttggtttcatgtttttgtattatgtatctttttgtatggtaaagactatattttgtacttaaccagatatatttttaccccagatggggatattctttgtaaaaaatgaaaataaagtttttttaatggaaaaaaa

SEQ ID NO: 53383 - DNA, 3505 bp, Homo sapiens
  misc_feature (3462)..(3462): n is a, c, g, or t
acgtttccgccttccagcggaaactaacccctctttttctccaaaggagtgcttgtggagatcggatcttttctccagcaattgggggaaagaaggctttttctctgaattcgcttagtgtaaccagcggcgtatattttttaggcgccttttcgaaaacctagtagttaatattcatttgtttaaatcttattttatttttaagctcaaactgcttaagaataccttaattccttaaagtgaaataattttttgcaaaggggtttcctcgatttggagctttttttttcttccaccgtcatttctaactcttaaaaccaactcagttccatcatggtgatgttcaagaagatcaagtcttttgaggtggtctttaacgaccctgaaaaggtgtacggcagtggcgagaaggtggctggccgggtgatagtggaggtgtgtgaagttactcgtgtcaaagccgttaggatcctggcttgcggagtggctaaagtgctttggatgcagggatcccagcagtgcaaacagacttcggagtacctgcgctatgaagacacgcttcttctggaagaccagccaacagggtaagcggcccaattcattgttggagggtgaaagctgattagagaagagaattgaatacacaaaacctgtacgaaatgttttaagttgctcagtttgagtggtttgaattacgtgttgttgcttccttttttctgttttaatttgcagacattctcctccccccccaaaaaaaagggtgatttgtacaattttttatggtgctgtgtcctaaaggggatcctgaggggcgttgcctcgggtagttaaagtcttatgtgtgcataagttgcttattctttgtctacttcctatttgagatgttagtagagaactgtcctgggtgaatctttcagtattgcagggcttggcaacttgctgcccgacaaaatacatcagaatttctctttaagaacaatatgggatggattaaaaaatatatatatgggatgaaattgggggtacttcaataccttgcatgccacccaagcattccttatcacacagatgcattttaagtgtaacagcaagcctaatggctactcgattttctttcccttcaggtgagaatgagatggtgatcatgagacctggaaacaaatatgagtacaagttcggctttgagcttcctcaggggcctctgggaacatccttcaaaggaaaatatgggtgtgtagactactgggtgaaggcttttcttgaccgcccgagccagccaactcaagagacaaagaaaaactttgaagtagtggatctggtggatgtcaatacccctgatttaatggtgagatccattttaaagattctattctcctgggtcatgaggatgataaatcagacgtcttgggcattagattgaagcatctcaaaacacctttttatccccttctatataggcacctgtgtctgctaaaaaagaaaagaaagtttcctgcatgttcattcctgatgggcgggtgtctgtctctgctcgaattgacagaaaaggattctgtgaaggtgatgagatttccatccatgctgactttgagaatacatgttcccgaattgtggtccccaaagctgccattgtggcccgccacacttaccttgccaatggccagaccaaggtgctgactcagaagttgtcatcagtcagaggcaatcatattatctcagggacatgcgcatcatggcgtggcaagagccttcgggttcagaagatcaggccttctatcctgggctgcaacatccttcgagttgaatattccttactgatctatgttagcgttcctggatccaagaaggtcatccttgacctgcccctggtaattggcagcagatcaggtctaagcagcagaacatccagcatggccagccgaaccagctctgagatgagttgggtagatctgaacatccctgataccccagaagctcctccctgctatatggatgtcattcctgaagatcaccgattggagagcccaaccactcctctgctagatgacatggatggctctcaagacagccctatctttatgtatgcccctgagttcaagttcatgccaccaccgacttatactgaggtggatccctgcatcctcaacaacaatgtgcagtgagcatgtggaagaaaagaagcagctttacctacttgtttctttttgtctctcttcctggacactcactttttcagagactcaacagtctctgcaatggagtgtgggtccaccttagcctctgacttcctaatgtaggaggtggtcagcaggcaatctcctgggccttaaaggatgcggactcatcctcagccagcgcccatgttgtgatacaggggtgtttgttggatgggtttaaaaataactagaaaaactcaggcccatccattttctcagatctccttgaaaattgaggccttttcgatagtttcgggtcaggtaaaaatggcctcctggcgtaagcttttcaaggttttttggaggctttttgtaaattgtgataggaactttggaccttgaacttacgtatcatgtggagaagagccaatttaacaaactaggaagatgaaaagggaaattgtggccaaaactttgggaaaaggaggttcttaaaatcagtgtttcccctttgtgcacttgtagaaaaaaaagaaaaaccttctagagctgatttgatggacaatggagagagctttccctgtgattataaaaaaggaagctagctgctctacggtcatctttgcttagagtatactttaacctggcttttaaagcagtagtaactgccccaccaaaggtcttaaaagccatttttggagcctattgcactgtgttctcctactgcaaatattttcatatgggaggatggttttctcttcatgtaagtccttggaattgattctaaggtgatgttcttagcactttaattcctgtcaaattttttgttctccccttctgccatcttaaatgtaagctgaaactggtctactgtgtctctagggttaagccaaaagacaaaaaaaattttactacttttgagattgccccaatgtacagaattatataattctaacgcttaaatcatgtgaaagggttgctgctgtcagccttgcccactgtgacttcaaacccaaggaggaactcttgatcaagatgcccaaccctgtgatcagaacctccaaatactgccatgagaaactagagggcaggtcttcataaaagccctttgaacccccttcctgccctgtgttaggagatagggatattggcccctcactgcagctgccagcacttggtcagtcactctcagccatagcactttgttcactgtcctgtgtcagagcactgagctccacccttttctgagagttattacagccagaaagtgtgggaaatctaccgtgggcaaatctaccgtgggcanatctaccgtgggcaaatctaccgtgggcaaatctaccgtgggc

SEQ ID NO: 53384 - DNA, 3496 bp, Homo sapiens
acgtttccgccttccagcggaaactaacccctctttttctccaaaggagtgcttgtggagatcggatcttttctccagcaattgggggaaagaaggctttttctctgaattcgcttagtgtaaccagcggcgtatattttttaggcgccttttcgaaaacctagtagttaatattcatttgtttaaatcttattttatttttaagctcaaactgcttaagaataccttaattccttaaagtgaaataattttttgcaaaggggtttcctcgatttggagctttttttttcttccaccgtcatttctaactcttaaaaccaactcagttccatcatggtgatgttcaagaagatcaagtcttttgaggtggtctttaacgaccctgaaaaggtgtacggcagtggcgagaaggtggctggccgggtgatagtggaggtgtgtgaagttactcgtgtcaaagccgttaggatcctggcttgcggagtggctaaagtgctttggatgcagggatcccagcagtgcaaacagacttcggagtacctgcgctatgaagacacgcttcttctggaagaccagccaacagggtaagcggcccaattcattgttggagggtgaaagctgattagagaagagaattgaatacacaaaacctgtacgaaatgttttaagttgctcagtttgagtggtttgaattacgtgttgttgcttccttttttctgttttaatttgcagacattctcctccccccccaaaaaaaagggtgatttgtacaattttttatggtgctgtgtcctaaaggggatcctgaggggcgttgcctcgggtagttaaagtcttatgtgtgcataagttgcttattctttgtctacttcctatttgagatgttagtagagaactgtcctgggtgaatctttcagtattgcagggcttggcaacttgctgcccgacaaaatacatcagaatttctctttaagaacaatatgggatggattaaaaaatatatatatgggatgaaattgggggtacttcaataccttgcatgccacccaagcattccttatcacacagatgcattttaagtgtaacagcaagcctaatggctactcgattttctttcccttcaggtgagaatgagatggtgatcatgagacctggaaacaaatatgagtacaagttcggctttgagcttcctcaggggcctctgggaacatccttcaaaggaaaatatgggtgtgtagactactgggtgaaggcttttcttgaccgcccgagccagccaactcaagagacaaagaaaaactttgaagtagtggatctggtggatgtcaatacccctgatttaatggtgagatccattttaaagattctattctcctgggtcatgaggatgataaatcagacgtcttgggcattagattgaagcatctcaaaacacctttttatccccttctatataggcacctgtgtctgctaaaaaagaaaagaaagtttcctgcatgttcattcctgatgggcgggtgtctgtctctgctcgaattgacagaaaaggattctgtgaaggtgatgagatttccatccatgctgactttgagaatacatgttcccgaattgtggtccccaaagctgccattgtggcccgccacacttaccttgccaatggccagaccaaggtgctgactcagaagttgtcatcagtcagaggcaatcatattatctcagggacatgcgcatcatggcgtggcaagagccttcgggttcagaagatcaggccttctatcctgggctgcaacatccttcgagttgaatattccttactgatctatgttagcgttcctggatccaagaaggtcatccttgacctgcccctggtaattggcagcagatcaggtctaagcagcagaacatccagcatggccagccgaaccagctctgagatgagttgggtagatctgaacatccctgataccccagaagctcctccctgctatatggatgtcattcctgaagatcaccgattggagagcccaaccactcctctgctagatgacatggatggctctcaagacagccctatctttatgtatgcccctgagttcaagttcatgccaccaccgacttatactgaggtggatccctgcatcctcaacaacaatgtgcagtgagcatgtggaagaaaagaagcagctttacctacttgtttctttttgtctctcttcctggacactcactttttcagagactcaacagtctctgcaatggagtgtgggtccaccttagcctctgacttcctaatgtaggaggtggtcagcaggcaatctcctgggccttaaaggatgcggactcatcctcagccagcgcccatgttgtgatacaggggtgtttgttggatgggtttaaaaataactagaaaaactcaggcccatccattttctcagatctccttgaaaattgaggccttttcgatagtttcgggtcaggtaaaaatggcctcctggcgtaagcttttcaaggttttttggaggctttttgtaaattgtgataggaactttggaccttgaacttacgtatcatgtggagaagagccaatttaacaaactaggaagatgaaaagggaaattgtggccaaaactttgggaaaaggaggttcttaaaatcagtgtttcccctttgtgcacttgtagaaaaaaaagaaaaaccttctagagctgatttgatggacaatggagagagctttccctgtgattataaaaaaggaagctagctgctctacggtcatctttgcttagagtatactttaacctggcttttaaagcagtagtaactgccccaccaaaggtcttaaaagccatttttggagcctattgcactgtgttctcctactgcaaatattttcatatgggaggatggttttctcttcatgtaagtccttggaattgattctaaggtgatgttcttagcactttaattcctgtcaaattttttgttctccccttctgccatcttaaatgtaagctgaaactggtctactgtgtctctagggttaagccaaaagacaaaaaaaattttactacttttgagattgccccaatgtacagaattatataattctaacgcttaaatcatgtgaaagggttgctgctgtcagccttgcccactgtgacttcaaacccaaggaggaactcttgatcaagatgcccaaccctgtgatcagaacctccaaatactgccatgagaaactagagggcaggtcttcataaaagccctttgaacccccttcctgccctgtgttaggagatagggatattggcccctcactgcagctgccagcacttggtcagtcactctcagccatagcactttgttcactgtcctgtgtcagagcactgagctccacccttttctgagagttattacagccagaaagtgtgggcatatctacgtggcaatctacgtggcaattacgtggcaattacgtggcaattacgtggcaattact

SEQ ID NO: 53385 - DNA, 1160 bp, Homo sapiens
acaagtgcacaaaggggaaacactgattttaagaaccgccttttcgatagtttcgggtcaggtaaaaatggcctcctggcgtaagcttttcaaggttttttggaggctttttgtaaattgtgataggaactttggaccttgaacttacgtatcatgtggagaagagccaatttaacaaactaggaagatgaaaagggaaattgtggccaaaactttgggaaaaggaggttcttaaaatcagtgtttcccctttgtgcacttgtagaaaaaaaagaaaaaccttctagagctgatttgatggacaatggagagagctttccctgtgattataaaaaaggaagctagctgctctacggtcatctttgcttagagtatactttaacctggcttttaaagcagtagtaactgccccaccaaaggtcttaaaagccatttttggagcctattgcactgtgttctcctactgcaaatattttcatatgggaggatggttttctcttcatgtaagtccttggaattgattctaaggtgatgttcttagcactttaattcctgtcaaattttttgttctccccttctgccatcttaaatgtaagctgaaactggtctactgtgtctctagggttaagccaaaagacaaaaaaaattttactacttttgagattgccccaatgtacagaattatataattctaacgcttaaatcatgtgaaagggttgctgctgtcagccttgcccactgtgacttcaaacccaaggaggaactcttgatcaagatgcccaaccctgtgatcagaacctccaaatactgccatgagaaactagagggcaggtcttcataaaagccctttgaacccccttcctgccctgtgttaggagatagggatattggcccctcactgcagctgccagcacttggtcagtcactctcagccatagcactttgttcactgtcctgtgtcagagcactgagctccacccttttctgagagttattacagccagaaagtgtgggctgaagatggttggtttcatgtttttgtattatgtatctttttgtatggtaaagactatattttgtacttaaccagatatatttttaccccagatggggatattctttgtaaaaaatgaaaataaagtttttttaatggaaaaaaa

SEQ ID NO: 53386 - DNA, 1076 bp, Homo sapiens
  misc_feature (1)..(1): n is a, c, g, or t
ncggcacgaggcggcacgagggctttttgtaaattgtgataggaactttggaccttgaacttacgtatcatgtggagaagagccaatttaacaaactaggaagatgaaaagggaaattgtggccaaaactttgggaaaaggaggttcttaaaatcagtgtttcccctttgtgcacttgtagaaaaaaaagaaaaaccttctagagctgatttgatggacaatggagagagctttccctgtgattataaaaaaggaagctagctgctctacggtcatctttgcttagagtatactttaacctggcttttaaagcagtagtaactgccccaccaaaggtcttaaaagccatttttggagcctattgcactgtgttctcctactgcaaatattttcatatgggaggatggttttctcttcatgtaagtccttggaattgattctaaggtgatgttcttagcactttaattcctgtcaaattttttgttctccccttctgccatcttaaatgtaagctgaaactggtctactgtgtctctagggttaagccaaaagacaaaaaaaattttactacttttgagattgccccaatgtacagaattatataattctaacgcttaaatcatgtgaaagggttgctgctgtcagccttgcccactgtgacttcaaacccaaggaggaactcttgatcaagatgcccaaccctgtgatcagaacctccaaatactgccatgagaaactagagggcaggtcttcataaaagccctttgaacccccttcctgccctgtgttaggagatagggatattggcccctcactgcagctgccagcacttggtcagtcactctcagccatagcactttgttcactgtcctgtgtcagagcactgagctccacccttttctgagagttattacagccagaaagtgtgggctgaagatggttggtttcatgtttttgtattatgtatctttttgtatggtaaagactatattttgtacttaaccagatatatttttaccccagatggggatattctttgtaaaaaatgaaaataaagtttttttaatggaaaaaaa

SEQ ID NO: 53387 - DNA, 3515 bp, Homo sapiens
acgtttccgccttccagcggaaactaacccctctttttctccaaaggagtgcttgtggagatcggatcttttctccagcaattgggggaaagaaggctttttctctgaattcgcttagtgtaaccagcggcgtatattttttaggcgccttttcgaaaacctagtagttaatattcatttgtttaaatcttattttatttttaagctcaaactgcttaagaataccttaattccttaaagtgaaataattttttgcaaaggggtttcctcgatttggagctttttttttcttccaccgtcatttctaactcttaaaaccaactcagttccatcatggtgatgttcaagaagatcaagtcttttgaggtggtctttaacgaccctgaaaaggtgtacggcagtggcgagaaggtggctggccgggtgatagtggaggtgtgtgaagttactcgtgtcaaagccgttaggatcctggcttgcggagtggctaaagtgctttggatgcagggatcccagcagtgcaaacagacttcggagtacctgcgctatgaagacacgcttcttctggaagaccagccaacagggtaagcggcccaattcattgttggagggtgaaagctgattagagaagagaattgaatacacaaaacctgtacgaaatgttttaagttgctcagtttgagtggtttgaattacgtgttgttgcttccttttttctgttttaatttgcagacattctcctccccccccaaaaaaaagggtgatttgtacaattttttatggtgctgtgtcctaaaggggatcctgaggggcgttgcctcgggtagttaaagtcttatgtgtgcataagttgcttattctttgtctacttcctatttgagatgttagtagagaactgtcctgggtgaatctttcagtattgcagggcttggcaacttgctgcccgacaaaatacatcagaatttctctttaagaacaatatgggatggattaaaaaatatatatatgggatgaaattgggggtacttcaataccttgcatgccacccaagcattccttatcacacagatgcattttaagtgtaacagcaagcctaatggctactcgattttctttcccttcaggtgagaatgagatggtgatcatgagacctggaaacaaatatgagtacaagttcggctttgagcttcctcaggggcctctgggaacatccttcaaaggaaaatatgggtgtgtagactactgggtgaaggcttttcttgaccgcccgagccagccaactcaagagacaaagaaaaactttgaagtagtggatctggtggatgtcaatacccctgatttaatggtgagatccattttaaagattctattctcctgggtcatgaggatgataaatcagacgtcttgggcattagattgaagcatctcaaaacacctttttatccccttctatataggcacctgtgtctgctaaaaaagaaaagaaagtttcctgcatgttcattcctgatgggcgggtgtctgtctctgctcgaattgacagaaaaggattctgtgaaggtgatgagatttccatccatgctgactttgagaatacatgttcccgaattgtggtccccaaagctgccattgtggcccgccacacttaccttgccaatggccagaccaaggtgctgactcagaagttgtcatcagtcagaggcaatcatattatctcagggacatgcgcatcatggcgtggcaagagccttcgggttcagaagatcaggccttctatcctgggctgcaacatccttcgagttgaatattccttactgatctatgttagcgttcctggatccaagaaggtcatccttgacctgcccctggtaattggcagcagatcaggtctaagcagcagaacatccagcatggccagccgaaccagctctgagatgagttgggtagatctgaacatccctgataccccagaagctcctccctgctatatggatgtcattcctgaagatcaccgattggagagcccaaccactcctctgctagatgacatggatggctctcaagacagccctatctttatgtatgcccctgagttcaagttcatgccaccaccgacttatactgaggtggatccctgcatcctcaacaacaatgtgcagtgagcatgtggaagaaaagaagcagctttacctacttgtttctttttgtctctcttcctggacactcactttttcagagactcaacagtctctgcaatggagtgtgggtccaccttagcctctgacttcctaatgtaggaggtggtcagcaggcaatctcctgggccttaaaggatgcggactcatcctcagccagcgcccatgttgtgatacaggggtgtttgttggatgggtttaaaaataactagaaaaactcaggcccatccattttctcagatctccttgaaaattgaggccttttcgatagtttcgggtcaggtaaaaatggcctcctggcgtaagcttttcaaggttttttggaggctttttgtaaattgtgataggaactttggaccttgaacttacgtatcatgtggagaagagccaatttaacaaactaggaagatgaaaagggaaattgtggccaaaactttgggaaaaggaggttcttaaaatcagtgtttcccctttgtgcacttgtagaaaaaaaagaaaaaccttctagagctgatttgatggacaatggagagagctttccctgtgattataaaaaaggaagctagctgctctacggtcatctttgcttagagtatactttaacctggcttttaaagcagtagtaactgccccaccaaaggtcttaaaagccatttttggagcctattgcactgtgttctcctactgcaaatattttcatatgggaggatggttttctcttcatgtaagtccttggaattgattctaaggtgatgttcttagcactttaattcctgtcaaattttttgttctccccttctgccatcttaaatgtaagctgaaactggtctactgtgtctctagggttaagccaaaagacaaaaaaaattttactacttttgagattgccccaatgtacagaattatataattctaacgcttaaatcatgtgaaagggttgctgctgtcagccttgcccactgtgacttcaaacccaaggaggaactcttgatcaagatgcccaaccctgtgatcagaacctccaaatactgccatgagaaactagagggcaggcctcactgcagctgccagcacttggtcagtcactctcagccatagcactttgttcactgtcctgtgtcagagcactgagctccacccttttctgagagttattacagccagaaagtgtgggctgaagatggttggtttcatgtttttgtattatgtatctttttgtatggtaaagactatattttgtacttaaccagatatatttttaccccagatggggatattctttgtaaaaaatgaaaataaagtttttttaatggaaaaaaa

SEQ ID NO: 53388 - DNA, 1035 bp, Homo sapiens
cggtgctccagaggatcccacacttcgatcgcggagaagagccaatttaacaaactaggaagatgaaaagggaaattgtggccaaaactttgggaaaaggaggttcttaaaatcagtgtttcccctttgtgcacttgtagaaaaaaaagaaaaaccttctagagctgatttgatggacaatggagagagctttccctgtgattataaaaaaggaagctagctgctctacggtcatctttgcttagagtatactttaacctggcttttaaagcagtagtaactgccccaccaaaggtcttaaaagccatttttggagcctattgcactgtgttctcctactgcaaatattttcatatgggaggatggttttctcttcatgtaagtccttggaattgattctaaggtgatgttcttagcactttaattcctgtcaaattttttgttctccccttctgccatcttaaatgtaagctgaaactggtctactgtgtctctagggttaagccaaaagacaaaaaaaattttactacttttgagattgccccaatgtacagaattatataattctaacgcttaaatcatgtgaaagggttgctgctgtcagccttgcccactgtgacttcaaacccaaggaggaactcttgatcaagatgcccaaccctgtgatcagaacctccaaatactgccatgagaaactagagggcaggtcttcataaaagccctttgaacccccttcctgccctgtgttaggagatagggatattggcccctcactgcagctgccagcacttggtcagtcactctcagccatagcactttgttcactgtcctgtgtcagagcactgagctccacccttttctgagagttattacagccagaaagtgtgggctgaagatggttggtttcatgtttttgtattatgtatctttttgtatggtaaagactatattttgtacttaaccagatatatttttaccccagatggggatattctttgtaaaaaatgaaaataaagtttttttaatggaaaaaaa

SEQ ID NO: 53389 - DNA, 1011 bp, Homo sapiens
gagaagagaaaagaaaagaggaagaacagagagaaaagatgaaaagggaaattgtggccaaaactttgggaaaaggaggttcttaaaatcagtgtttcccctttgtgcacttgtagaaaaaaaagaaaaaccttctagagctgatttgatggacaatggagagagctttccctgtgattataaaaaaggaagctagctgctctacggtcatctttgcttagagtatactttaacctggcttttaaagcagtagtaactgccccaccaaaggtcttaaaagccatttttggagcctattgcactgtgttctcctactgcaaatattttcatatgggaggatggttttctcttcatgtaagtccttggaattgattctaaggtgatgttcttagcactttaattcctgtcaaattttttgttctccccttctgccatcttaaatgtaagctgaaactggtctactgtgtctctagggttaagccaaaagacaaaaaaaattttactacttttgagattgccccaatgtacagaattatataattctaacgcttaaatcatgtgaaagggttgctgctgtcagccttgcccactgtgacttcaaacccaaggaggaactcttgatcaagatgcccaaccctgtgatcagaacctccaaatactgccatgagaaactagagggcaggtcttcataaaagccctttgaacccccttcctgccctgtgttaggagatagggatattggcccctcactgcagctgccagcacttggtcagtcactctcagccatagcactttgttcactgtcctgtgtcagagcactgagctccacccttttctgagagttattacagccagaaagtgtgggctgaagatggttggtttcatgtttttgtattatgtatctttttgtatggtaaagactatattttgtacttaaccagatatatttttaccccagatggggatattctttgtaaaaaatgaaaataaagtttttttaatggaaaaaaa

SEQ ID NO: 53390 - DNA, 3122 bp, Homo sapiens
  misc_feature (3000)..(3000): n is a, c, g, or t
acgtttccgccttccagcggaaactaacccctctttttctccaaaggagtgcttgtggagatcggatcttttctccagcaattgggggaaagaaggctttttctctgaattcgcttagtgtaaccagcggcgtatattttttaggcgccttttcgaaaacctagtagttaatattcatttgtttaaatcttattttatttttaagctcaaactgcttaagaataccttaattccttaaagtgaaataattttttgcaaaggggtttcctcgatttggagctttttttttcttccaccgtcatttctaactcttaaaaccaactcagttccatcatggtgatgttcaagaagatcaagtcttttgaggtggtctttaacgaccctgaaaaggtgtacggcagtggcgagaaggtggctggccgggtgatagtggaggtgtgtgaagttactcgtgtcaaagccgttaggatcctggcttgcggagtggctaaagtgctttggatgcagggatcccagcagtgcaaacagacttcggagtacctgcgctatgaagacacgcttcttctggaagaccagccaacagggtaagcggcccaattcattgttggagggtgaaagctgattagagaagagaattgaatacacaaaacctgtacgaaatgttttaagttgctcagtttgagtggtttgaattacgtgttgttgcttccttttttctgttttaatttgcagacattctcctccccccccaaaaaaaagggtgatttgtacaattttttatggtgctgtgtcctaaaggggatcctgaggggcgttgcctcgggtagttaaagtcttatgtgtgcataagttgcttattctttgtctacttcctatttgagatgttagtagagaactgtcctgggtgaatctttcagtattgcagggcttggcaacttgctgcccgacaaaatacatcagaatttctctttaagaacaatatgggatggattaaaaaatatatatatgggatgaaattgggggtacttcaataccttgcatgccacccaagcattccttatcacacagatgcattttaagtgtaacagcaagcctaatggctactcgattttctttcccttcaggtgagaatgagatggtgatcatgagacctggaaacaaatatgagtacaagttcggctttgagcttcctcaggggcctctgggaacatccttcaaaggaaaatatgggtgtgtagactactgggtgaaggcttttcttgaccgcccgagccagccaactcaagagacaaagaaaaactttgaagtagtggatctggtggatgtcaatacccctgatttaatggtgagatccattttaaagattctattctcctgggtcatgaggatgataaatcagacgtcttgggcattagattgaagcatctcaaaacacctttttatccccttctatataggcacctgtgtctgctaaaaaagaaaagaaagtttcctgcatgttcattcctgatgggcgggtgtctgtctctgctcgaattgacagaaaaggattctgtgaaggtgatgagatttccatccatgctgactttgagaatacatgttcccgaattgtggtccccaaagctgccattgtggcccgccacacttaccttgccaatggccagaccaaggtgctgactcagaagttgtcatcagtcagaggcaatcatattatctcagggacatgcgcatcatggcgtggcaagagccttcgggttcagaagatcaggccttctatcctgggctgcaacatccttcgagttgaatattccttactgatctatgttagcgttcctggatccaagaaggtcatccttgacctgcccctggtaattggcagcagatcaggtctaagcagcagaacatccagcatggccagccgaaccagctctgagatgagttgggtagatctgaacatccctgataccccagaagctcctccctgctatatggatgtcattcctgaagatcaccgattggagagcccaaccactcctctgctagatgacatggatggctctcaagacagccctatctttatgtatgcccctgagttcaagttcatgccaccaccgacttatactgaggtggatccctgcatcctcaacaacaatgtgcagtgagcatgtggaagaaaagaagcagctttacctacttgtttctttttgtctctcttcctggacactcactttttcagagactcaacagtctctgcaatggagtgtgggtccaccttagcctctgacttcctaatgtaggaggtggtcagcaggcaatctcctgggccttaaaggatgcggactcatcctcagccagcgcccatgttgtgatacaggggtgtttgttggatgggtttaaaaataactagaaaaactcaggcccatccattttctcagatctccttgaaaattgaggccttttcgatagtttcgggtcaggtaaaaatggcctcctggcgtaagcttttcaaggttttttggaggctttttgtaaattgtgataggaactttggaccttgaacttacgtatcatgtggagaagagccaatttaacaaactaggaagatgaaaagggaaattgtggccaaaactttgggaaaaggaggttcttaaaatcagtgtttcccctttgtgcacttgtagaaaaaaaagaaaaaccttctagagctgatttgatggacaatggagagagctttccctgtgattataaaaaaggaagctagctgctctacggtcatctttgcttagagtatactttaacctggcttttaaagcagtagtaactgccccaccaaaggtcttaaaagccatttttggagcctattgcactgtgttctcctactgcaaatattttcatatgggaggatggttttctcttcatgtaagtccttggaattgattctaaggtgatgttcttagcactttaattcctgtcaaattttttgttctccccttctcctcnggagatgtggagaaccaaatgatggtctccagactctttcccagagtcagcacaagccctggggtgacccccaggactctaggagccactccttttccctccagcccaacacagaggtgaaa

SEQ ID NO: 53391 - DNA, 2906 bp, Homo sapiens
acgtttccgccttccagcggaaactaacccctctttttctccaaaggagtgcttgtggagatcggatcttttctccagcaattgggggaaagaaggctttttctctgaattcgcttagtgtaaccagcggcgtatattttttaggcgccttttcgaaaacctagtagttaatattcatttgtttaaatcttattttatttttaagctcaaactgcttaagaataccttaattccttaaagtgaaataattttttgcaaaggggtttcctcgatttggagctttttttttcttccaccgtcatttctaactcttaaaaccaactcagttccatcatggtgatgttcaagaagatcaagtcttttgaggtggtctttaacgaccctgaaaaggtgtacggcagtggcgagaaggtggctggccgggtgatagtggaggtgtgtgaagttactcgtgtcaaagccgttaggatcctggcttgcggagtggctaaagtgctttggatgcagggatcccagcagtgcaaacagacttcggagtacctgcgctatgaagacacgcttcttctggaagaccagccaacagggtaagcggcccaattcattgttggagggtgaaagctgattagagaagagaattgaatacacaaaacctgtacgaaatgttttaagttgctcagtttgagtggtttgaattacgtgttgttgcttccttttttctgttttaatttgcagacattctcctccccccccaaaaaaaagggtgatttgtacaattttttatggtgctgtgtcctaaaggggatcctgaggggcgttgcctcgggtagttaaagtcttatgtgtgcataagttgcttattctttgtctacttcctatttgagatgttagtagagaactgtcctgggtgaatctttcagtattgcagggcttggcaacttgctgcccgacaaaatacatcagaatttctctttaagaacaatatgggatggattaaaaaatatatatatgggatgaaattgggggtacttcaataccttgcatgccacccaagcattccttatcacacagatgcattttaagtgtaacagcaagcctaatggctactcgattttctttcccttcaggtgagaatgagatggtgatcatgagacctggaaacaaatatgagtacaagttcggctttgagcttcctcaggggcctctgggaacatccttcaaaggaaaatatgggtgtgtagactactgggtgaaggcttttcttgaccgcccgagccagccaactcaagagacaaagaaaaactttgaagtagtggatctggtggatgtcaatacccctgatttaatggtgagatccattttaaagattctattctcctgggtcatgaggatgataaatcagacgtcttgggcattagattgaagcatctcaaaacacctttttatccccttctatataggcacctgtgtctgctaaaaaagaaaagaaagtttcctgcatgttcattcctgatgggcgggtgtctgtctctgctcgaattgacagaaaaggattctgtgaaggtgatgagatttccatccatgctgactttgagaatacatgttcccgaattgtggtccccaaagctgccattgtggcccgccacacttaccttgccaatggccagaccaaggtgctgactcagaagttgtcatcagtcagaggcaatcatattatctcagggacatgcgcatcatggcgtggcaagagccttcgggttcagaagatcaggccttctatcctgggctgcaacatccttcgagttgaatattccttactgatctatgttagcgttcctggatccaagaaggtcatccttgacctgcccctggtaattggcagcagatcaggtctaagcagcagaacatccagcatggccagccgaaccagctctgagatgagttgggtagatctgaacatccctgataccccagaagctcctccctgctatatggatgtcattcctgaagatcaccgattggagagcccaaccactcctctgctagatgacatggatggctctcaagacagccctatctttatgtatgcccctgagttcaagttcatgccaccaccgacttatactgaggtggatccctgcatcctcaacaacaatgtgcagtgagcatgtggaagaaaagaagcagctttacctacttgtttctttttgtctctcttcctggacactcactttttcagagactcaacagtctctgcaatggagtgtgggtccaccttagcctctgacttcctaatgtaggaggtggtcagcaggcaatctcctgggccttaaaggatgcggactcatcctcagccagcgcccatgttgtgatacaggggtgtttgttggatgggtttaaaaataactagaaaaactcaggcccatccattttctcagatctccttgaaaattgaggccttttcgatagtttcgggtcaggtaaaaatggcctcctggcgtaagcttttcaaggttttttggaggctttttgtaaattgtgataggaactttggaccttgaacttacgtatcatgtggagaagagccaatttaacaaactaggaagatgaaaagggaaattgtggccaaaactttgggaaaaggaggttcttaaaatcagtgtttcccctttgtgcacttgtagaaaaaaaagaaaaaccttctagagctgatttgatggacaatggagagagctttccctgtgattataaaaaaggaagctagctgctctacggtcatctttgcttagagtatactttaacctggcttttaaagcagtagtaactgccccaccaaaggtcttaaaagccatttttggagcctattgcactgtgttctccgcgatcgaagtgtgtaatcctcggatcgc

SEQ ID NO: 53392 - DNA, 2824 bp, Homo sapiens
acgtttccgccttccagcggaaactaacccctctttttctccaaaggagtgcttgtggagatcggatcttttctccagcaattgggggaaagaaggctttttctctgaattcgcttagtgtaaccagcggcgtatattttttaggcgccttttcgaaaacctagtagttaatattcatttgtttaaatcttattttatttttaagctcaaactgcttaagaataccttaattccttaaagtgaaataattttttgcaaaggggtttcctcgatttggagctttttttttcttccaccgtcatttctaactcttaaaaccaactcagttccatcatggtgatgttcaagaagatcaagtcttttgaggtggtctttaacgaccctgaaaaggtgtacggcagtggcgagaaggtggctggccgggtgatagtggaggtgtgtgaagttactcgtgtcaaagccgttaggatcctggcttgcggagtggctaaagtgctttggatgcagggatcccagcagtgcaaacagacttcggagtacctgcgctatgaagacacgcttcttctggaagaccagccaacagggtaagcggcccaattcattgttggagggtgaaagctgattagagaagagaattgaatacacaaaacctgtacgaaatgttttaagttgctcagtttgagtggtttgaattacgtgttgttgcttccttttttctgttttaatttgcagacattctcctccccccccaaaaaaaagggtgatttgtacaattttttatggtgctgtgtcctaaaggggatcctgaggggcgttgcctcgggtagttaaagtcttatgtgtgcataagttgcttattctttgtctacttcctatttgagatgttagtagagaactgtcctgggtgaatctttcagtattgcagggcttggcaacttgctgcccgacaaaatacatcagaatttctctttaagaacaatatgggatggattaaaaaatatatatatgggatgaaattgggggtacttcaataccttgcatgccacccaagcattccttatcacacagatgcattttaagtgtaacagcaagcctaatggctactcgattttctttcccttcaggtgagaatgagatggtgatcatgagacctggaaacaaatatgagtacaagttcggctttgagcttcctcaggggcctctgggaacatccttcaaaggaaaatatgggtgtgtagactactgggtgaaggcttttcttgaccgcccgagccagccaactcaagagacaaagaaaaactttgaagtagtggatctggtggatgtcaatacccctgatttaatggtgagatccattttaaagattctattctcctgggtcatgaggatgataaatcagacgtcttgggcattagattgaagcatctcaaaacacctttttatccccttctatataggcacctgtgtctgctaaaaaagaaaagaaagtttcctgcatgttcattcctgatgggcgggtgtctgtctctgctcgaattgacagaaaaggattctgtgaaggtgatgagatttccatccatgctgactttgagaatacatgttcccgaattgtggtccccaaagctgccattgtggcccgccacacttaccttgccaatggccagaccaaggtgctgactcagaagttgtcatcagtcagaggcaatcatattatctcagggacatgcgcatcatggcgtggcaagagccttcgggttcagaagatcaggccttctatcctgggctgcaacatccttcgagttgaatattccttactgatctatgttagcgttcctggatccaagaaggtcatccttgacctgcccctggtaattggcagcagatcaggtctaagcagcagaacatccagcatggccagccgaaccagctctgagatgagttgggtagatctgaacatccctgataccccagaagctcctccctgctatatggatgtcattcctgaagatcaccgattggagagcccaaccactcctctgctagatgacatggatggctctcaagacagccctatctttatgtatgcccctgagttcaagttcatgccaccaccgacttatactgaggtggatccctgcatcctcaacaacaatgtgcagtgagcatgtggaagaaaagaagcagctttacctacttgtttctttttgtctctcttcctggacactcactttttcagagactcaacagtctctgcaatggagtgtgggtccaccttagcctctgacttcctaatgtaggaggtggtcagcaggcaatctcctgggccttaaaggatgcggactcatcctcagccagcgcccatgttgtgatacaggggtgtttgttggatgggtttaaaaataactagaaaaactcaggcccatccattttctcagatctccttgaaaattgaggccttttcgatagtttcgggtcaggtaaaaatggcctcctggcgtaagcttttcaaggttttttggaggctttttgtaaattgtgataggaactttggaccttgaacttacgtatcatgtggagaagagccaatttaacaaactaggaagatgaaaagggaaattgtggccaaaactttgggaaaaggaggttcttaaaatcagtgtttcccctttgtgcacttgtagaaaaaaaattaaacatctgctaaccaaggtgctgcatttaatgataaccaccttaagacagaacaacgagacatgacgacaacctactgagtaaccaagccacccgtgagctcagctttctgggggtacccgacctcgaaatt

SEQ ID NO: 53393 - DNA, 569 bp, Homo sapiens
aaaaaaaaaaaaaaaaaaaaaaaaaaaaaaaaaaaaaaaaaaaaaaaaaaaaaaattttactacttttgagattgccccaatgtacagaattatataattctaacgcttaaatcatgtgaaagggttgctgctgtcagccttgcccactgtgacttcaaacccaaggaggaactcttgatcaagatgcccaaccctgtgatcagaacctccaaatactgccatgagaaactagagggcaggtcttcataaaagccctttgaacccccttcctgccctgtgttaggagatagggatattggcccctcactgcagctgccagcacttggtcagtcactctcagccatagcactttgttcactgtcctgtgtcagagcactgagctccacccttttctgagagttattacagccagaaagtgtgggctgaagatggttggtttcatgtttttgtattatgtatctttttgtatggtaaagactatattttgtacttaaccagatatatttttaccccagatggggatattctttgtaaaaaatgaaaataaagtttttttaatggaaaaaaa

SEQ ID NO: 53394 - DNA, 513 bp, Homo sapiens
tgccaaagcgtagtacccaacccaatgtacagaattatataattctaacgcttaaatcatgtgaaagggttgctgctgtcagccttgcccactgtgacttcaaacccaaggaggaactcttgatcaagatgcccaaccctgtgatcagaacctccaaatactgccatgagaaactagagggcaggtcttcataaaagccctttgaacccccttcctgccctgtgttaggagatagggatattggcccctcactgcagctgccagcacttggtcagtcactctcagccatagcactttgttcactgtcctgtgtcagagcactgagctccacccttttctgagagttattacagccagaaagtgtgggctgaagatggttggtttcatgtttttgtattatgtatctttttgtatggtaaagactatattttgtacttaaccagatatatttttaccccagatggggatattctttgtaaaaaatgaaaataaagtttttttaatggaaaaaaa

SEQ ID NO: 53395 - DNA, 3589 bp, Homo sapiens
acgtttccgccttccagcggaaactaacccctctttttctccaaaggagtgcttgtggagatcggatcttttctccagcaattgggggaaagaaggctttttctctgaattcgcttagtgtaaccagcggcgtatattttttaggcgccttttcgaaaacctagtagttaatattcatttgtttaaatcttattttatttttaagctcaaactgcttaagaataccttaattccttaaagtgaaataattttttgcaaaggggtttcctcgatttggagctttttttttcttccaccgtcatttctaactcttaaaaccaactcagttccatcatggtgatgttcaagaagatcaagtcttttgaggtggtctttaacgaccctgaaaaggtgtacggcagtggcgagaaggtggctggccgggtgatagtggaggtgtgtgaagttactcgtgtcaaagccgttaggatcctggcttgcggagtggctaaagtgctttggatgcagggatcccagcagtgcaaacagacttcggagtacctgcgctatgaagacacgcttcttctggaagaccagccaacagggtaagcggcccaattcattgttggagggtgaaagctgattagagaagagaattgaatacacaaaacctgtacgaaatgttttaagttgctcagtttgagtggtttgaattacgtgttgttgcttccttttttctgttttaatttgcagacattctcctccccccccaaaaaaaagggtgatttgtacaattttttatggtgctgtgtcctaaaggggatcctgaggggcgttgcctcgggtagttaaagtcttatgtgtgcataagttgcttattctttgtctacttcctatttgagatgttagtagagaactgtcctgggtgaatctttcagtattgcagggcttggcaacttgctgcccgacaaaatacatcagaatttctctttaagaacaatatgggatggattaaaaaatatatatatgggatgaaattgggggtacttcaataccttgcatgccacccaagcattccttatcacacagatgcattttaagtgtaacagcaagcctaatggctactcgattttctttcccttcaggtgagaatgagatggtgatcatgagacctggaaacaaatatgagtacaagttcggctttgagcttcctcaggggcctctgggaacatccttcaaaggaaaatatgggtgtgtagactactgggtgaaggcttttcttgaccgcccgagccagccaactcaagagacaaagaaaaactttgaagtagtggatctggtggatgtcaatacccctgatttaatggtgagatccattttaaagattctattctcctgggtcatgaggatgataaatcagacgtcttgggcattagattgaagcatctcaaaacacctttttatccccttctatataggcacctgtgtctgctaaaaaagaaaagaaagtttcctgcatgttcattcctgatgggcgggtgtctgtctctgctcgaattgacagaaaaggattctgtgaaggtgatgagatttccatccatgctgactttgagaatacatgttcccgaattgtggtccccaaagctgccattgtggcccgccacacttaccttgccaatggccagaccaaggtgctgactcagaagttgtcatcagtcagaggcaatcatattatctcagggacatgcgcatcatggcgtggcaagagccttcgggttcagaagatcaggccttctatcctgggctgcaacatccttcgagttgaatattccttactgatctatgttagcgttcctggatccaagaaggtcatccttgacctgcccctggtaattggcagcagatcaggtctaagcagcagaacatccagcatggccagccgaaccagctctgagatgagttgggtagatctgaacatccctgataccccagaagctcctccctgctatatggatgtcattcctgaagatcaccgattggagagcccaaccactcctctgctagatgacatggatggctctcaagacagccctatctttatgtatgcccctgagttcaagttcatgccaccaccgacttatactgaggtggatccctgcatcctcaacaacaatgtgcagtgagcatgtggaagaaaagaagcagctttacctacttgtttctttttgtctctcttcctggacactcactttttcagagactcaacagtctctgcaatggagtgtgggtccaccttagcctctgacttcctaatgtaggaggtggtcagcaggcaatctcctgggccttaaaggatgcggactcatcctcagccagcgcccatgttgtgatacaggggtgtttgttggatgggtttaaaaataactagaaaaactcaggcccatccattttctcagatctccttgaaaattgaggccttttcgatagtttcgggtcaggtaaaaatggcctcctggcgtaagcttttcaaggttttttggaggctttttgtaaattgtgataggaactttggaccttgaacttacgtatcatgtggagaagagccaatttaacaaactaggtcggagtacctgcgctatgaagacacgctttcttctggaagacagccaacaggtgagaaatgagatggtgatcatgagacctggacacgaacatatgagctaccaagttcggacttttgagctcctcatgggccctctgggacctccttcaaaggaaaatatgggtgtgtagactactgggtgaaggcttttcttgaccgcccgagccagccaactcaagagacaaagaaaaactttgaagtagtggatctggtggatgtcaatacccctgatttaatggcacctgtgtctgctaaaaaggaaaggaaagtttcctgcatgttcattcctgatgggcgggtgtctgtctctgctcgaattgacagaaaaggattctgtgaaggtgatgagatttccatccatgctgactttgagaatacatgttcccgaattgtgtccccaaagctgccattgtgcccgccacacttaccttgcaatggccagaccaaggtgctgactcagaagttgtcatcagtcagaggcaatcatattatctcagggacatgcgcatcatggcgtggcaagagccttcgggttcagaagatcaggccttctatcctgggctgcaacatccttcgagttgaatattccttactgatctatgttagcgttcctggatccatcttcataaaagccctttgaacccccttcctgccctgtgttaggagatagggatattggcccctcactgcagctgccagcacttggtcagtcactctcagccatagcactttgttcactgtcctgtgtcagagcactgagctccacccttttctgagagttattacagccagaaagtgtgggctgaagatggttggtttcatgtttttgtattatgtatctttttgtatggtaaagactatattttgtacttaaccagatatatttttaccccagatggggatattctttgtaaaaaatgaaaataaagtttttttaatggaaaaaaa

SEQ ID NO: 53396 - DNA, 2816 bp, Homo sapiens
acgtttccgccttccagcggaaactaacccctctttttctccaaaggagtgcttgtggagatcggatcttttctccagcaattgggggaaagaaggctttttctctgaattcgcttagtgtaaccagcggcgtatattttttaggcgccttttcgaaaacctagtagttaatattcatttgtttaaatcttattttatttttaagctcaaactgcttaagaataccttaattccttaaagtgaaataattttttgcaaaggggtttcctcgatttggagctttttttttcttccaccgtcatttctaactcttaaaaccaactcagttccatcatggtgatgttcaagaagatcaagtcttttgaggtggtctttaacgaccctgaaaaggtgtacggcagtggcgagaaggtggctggccgggtgatagtggaggtgtgtgaagttactcgtgtcaaagccgttaggatcctggcttgcggagtggctaaagtgctttggatgcagggatcccagcagtgcaaacagacttcggagtacctgcgctatgaagacacgcttcttctggaagaccagccaacagggtaagcggcccaattcattgttggagggtgaaagctgattagagaagagaattgaatacacaaaacctgtacgaaatgttttaagttgctcagtttgagtggtttgaattacgtgttgttgcttccttttttctgttttaatttgcagacattctcctccccccccaaaaaaaagggtgatttgtacaattttttatggtgctgtgtcctaaaggggatcctgaggggcgttgcctcgggtagttaaagtcttatgtgtgcataagttgcttattctttgtctacttcctatttgagatgttagtagagaactgtcctgggtgaatctttcagtattgcagggcttggcaacttgctgcccgacaaaatacatcagaatttctctttaagaacaatatgggatggattaaaaaatatatatatgggatgaaattgggggtacttcaataccttgcatgccacccaagcattccttatcacacagatgcattttaagtgtaacagcaagcctaatggctactcgattttctttcccttcaggtgagaatgagatggtgatcatgagacctggaaacaaatatgagtacaagttcggctttgagcttcctcaggggcctctgggaacatccttcaaaggaaaatatgggtgtgtagactactgggtgaaggcttttcttgaccgcccgagccagccaactcaagagacaaagaaaaactttgaagtagtggatctggtggatgtcaatacccctgatttaatggtgagatccattttaaagattctattctcctgggtcatgaggatgataaatcagacgtcttgggcattagattgaagcatctcaaaacacctttttatccccttctatataggcacctgtgtctgctaaaaaagaaaagaaagtttcctgcatgttcattcctgatgggcgggtgtctgtctctgctcgaattgacagaaaaggattctgtgaaggtgatgagatttccatccatgctgactttgagaatacatgttcccgaattgtggtccccaaagctgccattgtggcccgccacacttaccttgccaatggccagaccaaggtgctgactcagaagttgtcatcagtcagaggcaatcatattatctcagggacatgcgcatcatggcgtggcaagagccttcgggttcagaagatcaggccttctatcctgggctgcaacatccttcgagttgaatattccttactgatctatgttagcgttcctggatccaagaaggtcatccttgacctgcccctggtaattggcagcagatcaggtctaagcagcagaacatccagcatggccagccgaaccagctctgagatgagttgggtagatctgaacatccctgataccccagaagttcaaaggaaaatatgggtgtgtagactactgggtgaaggcttttcttgaccgcccgagccagccaactcaagagacaaagaaaaactttgaagtagtggatctggtggatgtcaatacccctgatttaatggcacctgtgtctgctaaaaaggaaaggaaagtttcctgcatgttcattcctgatgggcgggtgtctgtctctgctcgaattgacagaaaaggattctgtgaaggtgatgagatttccatccatgctgactttgagaatacatgttcccgaattgtgtccccaaagctgccattgtgcccgccacacttaccttgcaatggccagaccaaggtgctgactcagaagttgtcatcagtcagaggcaatcatattatctcagggacatgcgcatcatggcgtggcaagagccttcgggttcagaagatcaggccttctatcctgggctgcaacatccttcgagttgaatattccttactgatctatgttagcgttcctggatccatcttcataaaagccctttgaacccccttcctgccctgtgttaggagatagggatattggcccctcactgcagctgccagcacttggtcagtcactctcagccatagcactttgttcactgtcctgtgtcagagcactgagctccacccttttctgagagttattacagccagaaagtgtgggctgaagatggttggtttcatgtttttgtattatgtatctttttgtatggtaaagactatattttgtacttaaccagatatatttttaccccagatggggatattctttgtaaaaaatgaaaataaagtttttttaatggaaaaaaa

SEQ ID NO: 53397 - DNA, 2716 bp, Homo sapiens
acgtttccgccttccagcggaaactaacccctctttttctccaaaggagtgcttgtggagatcggatcttttctccagcaattgggggaaagaaggctttttctctgaattcgcttagtgtaaccagcggcgtatattttttaggcgccttttcgaaaacctagtagttaatattcatttgtttaaatcttattttatttttaagctcaaactgcttaagaataccttaattccttaaagtgaaataattttttgcaaaggggtttcctcgatttggagctttttttttcttccaccgtcatttctaactcttaaaaccaactcagttccatcatggtgatgttcaagaagatcaagtcttttgaggtggtctttaacgaccctgaaaaggtgtacggcagtggcgagaaggtggctggccgggtgatagtggaggtgtgtgaagttactcgtgtcaaagccgttaggatcctggcttgcggagtggctaaagtgctttggatgcagggatcccagcagtgcaaacagacttcggagtacctgcgctatgaagacacgcttcttctggaagaccagccaacagggtaagcggcccaattcattgttggagggtgaaagctgattagagaagagaattgaatacacaaaacctgtacgaaatgttttaagttgctcagtttgagtggtttgaattacgtgttgttgcttccttttttctgttttaatttgcagacattctcctccccccccaaaaaaaagggtgatttgtacaattttttatggtgctgtgtcctaaaggggatcctgaggggcgttgcctcgggtagttaaagtcttatgtgtgcataagttgcttattctttgtctacttcctatttgagatgttagtagagaactgtcctgggtgaatctttcagtattgcagggcttggcaacttgctgcccgacaaaatacatcagaatttctctttaagaacaatatgggatggattaaaaaatatatatatgggatgaaattgggggtacttcaataccttgcatgccacccaagcattccttatcacacagatgcattttaagtgtaacagcaagcctaatggctactcgattttctttcccttcaggtgagaatgagatggtgatcatgagacctggaaacaaatatgagtacaagttcggctttgagcttcctcaggggcctctgggaacatccttcaaaggaaaatatgggtgtgtagactactgggtgaaggcttttcttgaccgcccgagccagccaactcaagagacaaagaaaaactttgaagtagtggatctggtggatgtcaatacccctgatttaatggtgagatccattttaaagattctattctcctgggtcatgaggatgataaatcagacgtcttgggcattagattgaagcatctcaaaacacctttttatccccttctatataggcacctgtgtctgctaaaaaagaaaagaaagtttcctgcatgttcattcctgatgggcgggtgtctgtctctgctcgaattgacagaaaaggattctgtgaaggtgatgagatttccatccatgctgactttgagaatacatgttcccgaattgtggtccccaaagctgccattgtggcccgccacacttaccttgccaatggccagaccaaggtgctgactcagaagttgtcatcagtcagaggcaatcatattatctcagggacatgcgcatcatggcgtggcaagagccttcgggttcagaagatcaggccttctatcctgggctgcaacatccttcgagttgaatattccttactgatctatgttagcgttcctggatccaagaaggtcatccttgacctgcccctggtaattggcagcagatcaggtctaagcagcagaacatccagcatggccagccgaaccagctctgagatgagttgggtagatctgaacatccctgataccccagaagctcctccctgctatatggatgtcattcctgaagatcaccgattggagagcccaaccactcctctgctagatgacatggatggctctcaagacagccctatctttatgtatgcccctgagttcaagttcatgccaccaccgacttatactgagcttatactgaggtggatccctgcatcctcaacaacaatgtgcagtgagcatgtggaagaaaagaagcagctttacctacttgtttctttttgtctctcttcctggacactcactttttcagagactcaacagtctctgcaatggagtgtgggtccaccttagcctctgacttcctaatgtaggaggtggtcagcaggcaatctcctgggccttgccatatgcaacatatggcaaggccaagaaggacgcagaaacgtgtgtcatggaggatgccagatgcacacacacactgtgggagaaaggcatttaaatcagacagcaccaaagagaataaagagtattcttattctttatttaaatcagacagccccaaagagaataaagagtatttgtaaggagaagaggcccagagtacccacttttgaaagcagctttagtccctttctgatgtacatgtgatgatttttcaacccaagctgctctttgctttccccattgttcatgaagctcttgggggctcttaccagcctttgtcttccttcttcacaaactctggacacactccatttgcttggcctgccatatgacac

SEQ ID NO: 53398 - DNA, 2243 bp, Homo sapiens
acgtttccgccttccagcggaaactaacccctctttttctccaaaggagtgcttgtggagatcggatcttttctccagcaattgggggaaagaaggctttttctctgaattcgcttagtgtaaccagcggcgtatattttttaggcgccttttcgaaaacctagtagttaatattcatttgtttaaatcttattttatttttaagctcaaactgcttaagaataccttaattccttaaagtgaaataattttttgcaaaggggtttcctcgatttggagctttttttttcttccaccgtcatttctaactcttaaaaccaactcagttccatcatggtgatgttcaagaagatcaagtcttttgaggtggtctttaacgaccctgaaaaggtgtacggcagtggcgagaaggtggctggccgggtgatagtggaggtgtgtgaagttactcgtgtcaaagccgttaggatcctggcttgcggagtggctaaagtgctttggatgcagggatcccagcagtgcaaacagacttcggagtacctgcgctatgaagacacgcttcttctggaagaccagccaacagggtaagcggcccaattcattgttggagggtgaaagctgattagagaagagaattgaatacacaaaacctgtacgaaatgttttaagttgctcagtttgagtggtttgaattacgtgttgttgcttccttttttctgttttaatttgcagacattctcctccccccccaaaaaaaagggtgatttgtacaattttttatggtgctgtgtcctaaaggggatcctgaggggcgttgcctcgggtagttaaagtcttatgtgtgcataagttgcttattctttgtctacttcctatttgagatgttagtagagaactgtcctgggtgaatctttcagtattgcagggcttggcaacttgctgcccgacaaaatacatcagaatttctctttaagaacaatatgggatggattaaaaaatatatatatgggatgaaattgggggtacttcaataccttgcatgccacccaagcattccttatcacacagatgcattttaagtgtaacagcaagcctaatggctactcgattttctttcccttcaggtgagaatgagatggtgatcatgagacctggaaacaaatatgagtacaagttcggctttgagcttcctcaggggcctctgggaacatccttcaaaggaaaatatgggtgtgtagactactgggtgaaggcttttcttgaccgcccgagccagccaactcaagagacaaagaaaaactttgaagtagtggatctggtggatgtcaatacccctgatttaatggtgagatccattttaaagattctattctcctgggtcatgaggatgataaatcagacgtcttgggcattagattgaagcatctcaaaacacctttttatccccttctatataggcacctgtgtctgctaaaaaagaaaagaaagtttcctgcatgttcattcctgatgggcgggtgtctgtctctgctcgaattgacagaaaaggattctgtgaaggtgatgagatttccatccatgctgactttgagaatacatgttcccgaattgtggtccccaaagctgccattgtggcccgccacacttaccttgccaatggccagaccaaggtgctgactcagaagttgtcatcagtcagaggcaatcatattatctcagggacatgcgcatcatggcgtggcaagagccttcgggttcagaagatcaggccttctatcctgggctgcaacatccttcgagttgaatattccttactgatctatgttagcgttcctggatccaagaaggtcatccttgacctgcccctggtaattggcagcagatcaggtctaagcagcagaacatccagcatggccagccgaaccagctctgagatgagttgggtagatctgaacatccctgataccccagaagctcctccctgctatatggatgtcattcctgaagatcaccgattggagagcccaaccactcctctgctagatgacatggatggctctcaagacagccctatctttatgtatgcccctgagttcaagttcatgccaccaccgacttatactgagtcctacattaggaagtcagaggctaagctggacccacactccattgcagagactgttgagtctctgaaaaagtgagtgtccaggaagagagacaaaagaacaagtagtaagctgctc

SEQ ID NO: 53399 - DNA, 1875 bp, Homo sapiens
acgtttccgccttccagcggaaactaacccctctttttctccaaaggagtgcttgtggagatcggatcttttctccagcaattgggggaaagaaggctttttctctgaattcgcttagtgtaaccagcggcgtatattttttaggcgccttttcgaaaacctagtagttaatattcatttgtttaaatcttattttatttttaagctcaaactgcttaagaataccttaattccttaaagtgaaataattttttgcaaaggggtttcctcgatttggagctttttttttcttccaccgtcatttctaactcttaaaaccaactcagttccatcatggtgatgttcaagaagatcaagtcttttgaggtggtctttaacgaccctgaaaaggtgtacggcagtggcgagaaggtggctggccgggtgatagtggaggtgtgtgaagttactcgtgtcaaagccgttaggatcctggcttgcggagtggctaaagtgctttggatgcagggatcccagcagtgcaaacagacttcggagtacctgcgctatgaagacacgcttcttctggaagaccagccaacagggtaagcggcccaattcattgttggagggtgaaagctgattagagaagagaattgaatacacaaaacctgtacgaaatgttttaagttgctcagtttgagtggtttgaattacgtgttgttgcttccttttttctgttttaatttgcagacattctcctccccccccaaaaaaaagggtgatttgtacaattttttatggtgctgtgtcctaaaggggatcctgaggggcgttgcctcgggtagttaaagtcttatgtgtgcataagttgcttattctttgtctacttcctatttgagatgttagtagagaactgtcctgggtgaatctttcagtattgcagggcttggcaacttgctgcccgacaaaatacatcagaatttctctttaagaacaatatgggatggattaaaaaatatatatatgggatgaaattgggggtacttcaataccttgcatgccacccaagcattccttatcacacagatgcattttaagtgtaacagcaagcctaatggctactcgattttctttcccttcaggtgagaatgagatggtgatcatgagacctggaaacaaatatgagtacaagttcggctttgagcttcctcaggggcctctgggaacatccttcaaaggaaaatatgggtgtgtagactactgggtgaaggcttttcttgaccgcccgagccagccaactcaagagacaaagaaaaactttgaagtagtggatctggtggatgtcaatacccctgatttaatggtgagatccattttaaagattctattctcctgggtcatgaggatgataaatcagacgtcttgggcattagattgaagcatctcaaaacacctttttatccccttctatataggcacctgtgtctgctaaaaaagaaaagaaagtttcctgcatgttcattcctgatgggcgggtgtctgtctctgctcgaattgacagaaaaggattctgtgaaggtgatgagatttccatccatgctgactttgagaatacatgttcccgaattgtggtccccaaagctgccattgtggcccgccacacagccatagcactttgttcactgtcctgtgtcagagcactgagctccacccttttctgagagttattacagccagaaagtgtgggctgaagatggttggtttcatgtttttgtattatgtatctttttgtatggtaaagactatattttgtacttaaccagatatatttttaccccagatggggatattctttgtaaaaaatgaaaataaagtttttttaatggaaaaaaa

SEQ ID NO: 53400 - DNA, 1876 bp, Homo sapiens
acgtttccgccttccagcggaaactaacccctctttttctccaaaggagtgcttgtggagatcggatcttttctccagcaattgggggaaagaaggctttttctctgaattcgcttagtgtaaccagcggcgtatattttttaggcgccttttcgaaaacctagtagttaatattcatttgtttaaatcttattttatttttaagctcaaactgcttaagaataccttaattccttaaagtgaaataattttttgcaaaggggtttcctcgatttggagctttttttttcttccaccgtcatttctaactcttaaaaccaactcagttccatcatggtgatgttcaagaagatcaagtcttttgaggtggtctttaacgaccctgaaaaggtgtacggcagtggcgagaaggtggctggccgggtgatagtggaggtgtgtgaagttactcgtgtcaaagccgttaggatcctggcttgcggagtggctaaagtgctttggatgcagggatcccagcagtgcaaacagacttcggagtacctgcgctatgaagacacgcttcttctggaagaccagccaacagggtaagcggcccaattcattgttggagggtgaaagctgattagagaagagaattgaatacacaaaacctgtacgaaatgttttaagttgctcagtttgagtggtttgaattacgtgttgttgcttccttttttctgttttaatttgcagacattctcctccccccccaaaaaaaagggtgatttgtacaattttttatggtgctgtgtcctaaaggggatcctgaggggcgttgcctcgggtagttaaagtcttatgtgtgcataagttgcttattctttgtctacttcctatttgagatgttagtagagaactgtcctgggtgaatctttcagtattgcagggcttggcaacttgctgcccgacaaaatacatcagaatttctctttaagaacaatatgggatggattaaaaaatatatatatgggatgaaattgggggtacttcaataccttgcatgccacccaagcattccttatcacacagatgcattttaagtgtaacagcaagcctaatggctactcgattttctttcccttcaggtgagaatgagatggtgatcatgagacctggaaacaaatatgagtacaagttcggctttgagcttcctcaggggcctctgggaacatccttcaaaggaaaatatgggtgtgtagactactgggtgaaggcttttcttgaccgcccgagccagccaactcaagagacaaagaaaaactttgaagtagtggatctggtggatgtcaatacccctgatttaatggcacctgtgtctgctaaaaaagaaaagaaagtttcctgcatgttcattcctgatgggcgggtgtctgtctctgctcgaattgacagaaaaggattctgtgaaggaaggtaaaatcctagtgcttatggcagttaaaacaggaactgggtttaggggcaagggcatgggactggggtagaggaagtgtcattaactatactgagtatcagtaagttttcatctttctcattgctaggtgatgagatttccatccatgctgactttgagaatacatgttcccgaattgtggtccccaaagctgccattgtggcccgccacacttaccttgccaatggccagaccaaggtgctgactcagaagttgtcatcagtcagaggcaatcatattatctcagggacatgcgcatcatggcgtggcaagagccttcgggttcagaagatcaggccttctatcctgggctgcaacatccttcgagttgaatattccttactgatctactgatctataggagtggtggtaccgagctcgatc

SEQ ID NO: 53401 - DNA, 375 bp, Homo sapiens
aaattgttcatctgttaccacagctgtcttgtttctccagacctctggtgtaataaactgccatcttcctttctagatctatgttagcgttcctggatccaagaaggtcatccttgacctgcccctggtaattggcagcagatcaggtctaagcagcagaacatccagcatggccagccgaaccagctctgagatgagttgggtagatctgaacatccctgataccccagaagaggtgagccagacctaatgtcttttctttgtttctggtctacctgggtttgtaaaattgtgatggtccagcatttcttgggcaggattcttatgtggccatattttcttttctactcctccctgctatatggatgtcattcc

SEQ ID NO: 53402 - DNA, 814 bp, Homo sapiens
acgtttccgccttccagcggaaactaacccctctttttctccaaaggagtgcttgtggagatcggatcttttctccagcaattgggggaaagaaggctttttctctgaattcgcttagtgtaaccagcggcgtatattttttaggcgccttttcgaaaacctagtagttaatattcatttgtttaaatcttattttatttttaagctcaaactgcttaagaataccttaattccttaaagtgaaataattttttgcaaaggggtttcctcgatttggagctttttttttcttccaccgtcatttctaactcttaaaaccaactcagttccatcatggtgatgttcaagaagatcaagtcttttgaggtggtctttaacgaccctgaaaaggtgtacggcagtggcgagaaggtggctggccgggtgatagtggaggtgtgtgaagttactcgtgtcaaagccgttaggatcctggcttgcggagtggctaaagtgctttggatgcagggatcccagcagtgcaaacagacttcggagtacctgcgctatgaagacacgcttcttctggaagaccagccaacagcagccatagcactttgttcactgtcctgtgtcagagcactgagctccacccttttctgagagttattacagccagaaagtgtgggctgaagatggttggtttcatgtttttgtattatgtatctttttgtatggtaaagactatattttgtacttaaccagatatatttttaccccagatggggatattctttgtaaaaaatgaaaataaagtttttttaatggaaaaaaa

SEQ ID NO: 53403 - DNA, 3576 bp, Homo sapiens
acgtttccgccttccagcggaaactaacccctctttttctccaaaggagtgcttgtggagatcggatcttttctccagcaattgggggaaagaaggctttttctctgaattcgcttagtgtaaccagcggcgtatattttttaggcgccttttcgaaaacctagtagttaatattcatttgtttaaatcttattttatttttaagctcaaactgcttaagaataccttaattccttaaagtgaaataattttttgcaaaggggtttcctcgatttggagctttttttttcttccaccgtcatttctaactcttaaaaccaactcagttccatcatggtgatgttcaagaagatcaagtcttttgaggtggtctttaacgaccctgaaaaggtgtacggcagtggcgagaaggtggctggccgggtgatagtggaggtgtgtgaagttactcgtgtcaaagccgttaggatcctggcttgcggagtggctaaagtgctttggatgcagggatcccagcagtgcaaacagacttcggagtacctgcgctatgaagacacgcttcttctggaagaccagccaacagggtaagcggcccaattcattgttggagggtgaaagctgattagagaagagaattgaatacacaaaacctgtacgaaatgttttaagttgctcagtttgagtggtttgaattacgtgttgttgcttccttttttctgttttaatttgcagacattctcctccccccccaaaaaaaagggtgatttgtacaattttttatggtgctgtgtcctaaaggggatcctgaggggcgttgcctcgggtagttaaagtcttatgtgtgcataagttgcttattctttgtctacttcctatttgagatgttagtagagaactgtcctgggtgaatctttcagtattgcagggcttggcaacttgctgcccgacaaaatacatcagaatttctctttaagaacaatatgggatggattaaaaaatatatatatgggatgaaattgggggtacttcaataccttgcatgccacccaagcattccttatcacacagatgcattttaagtgtaacagcaagcctaatggctactcgattttctttcccttcaggtgagaatgagatggtgatcatgagacctggaaacaaatatgagtacaagttcggctttgagcttcctcaggggcctctgggaacatccttcaaaggaaaatatgggtgtgtagactactgggtgaaggcttttcttgaccgcccgagccagccaactcaagagacaaagaaaaactttgaagtagtggatctggtggatgtcaatacccctgatttaatggtgagatccattttaaagattctattctcctgggtcatgaggatgataaatcagacgtcttgggcattagattgaagcatctcaaaacacctttttatccccttctatataggcacctgtgtctgctaaaaaagaaaagaaagtttcctgcatgttcattcctgatgggcgggtgtctgtctctgctcgaattgacagaaaaggattctgtgaaggtgatgagatttccatccatgctgactttgagaatacatgttcccgaattgtggtccccaaagctgccattgtggcccgccacacttaccttgccaatggccagaccaaggtgctgactcagaagttgtcatcagtcagaggcaatcatattatctcagggacatgcgcatcatggcgtggcaagagccttcgggttcagaagatcaggccttctatcctgggctgcaacatccttcgagttgaatattccttactgatctatgttagcgttcctggatccaagaaggtcatccttgacctgcccctggtaattggcagcagatcaggtctaagcagcagaacatccagcatggccagccgaaccagctctgagatgagttgggtagatctgaacatccctgataccccagaagctcctccctgctatatggatgtcattcctgaagatcaccgattggagagcccaaccactcctctgctagatgacatggatggctctcaagacagccctatctttatgtatgcccctgagttcaagttcatgccaccaccgacttatactgaggtggatccctgcatcctcaacaacaatgtgcagtgagcatgtggaagaaaagaagcagctttacctacttgtttctttttgtctctcttcctggacactcactttttcagagactcaacagtctctgcaatggagtgtgggtccaccttagcctctgacttcctaatgtaggaggtggtcagcaggcaatctcctgggccttaaaggatgcggactcatcctcagccagcgcccatgttgtgatacaggggtgtttgttggatgggtttaaaaataactagaaaaactcaggcccatccattttctcagatctccttgaaaattgaggccttttcgatagtttcgggtcaggtaaaaatggcctcctggcgtaagcttttcaaggttttttggaggctttttgtaaattgtgataggaactttggaccttgaacttacgtatcatgtggagaagagccaatttaacaaactaggaagatgaaaagggaaattgtggccaaaactttgggaaaaggaggttcttaaaatcagtgtttcccctttgtgcacttgtagaaaaaaaagaaaaaccttctagagctgatttgatggacaatggagagagctttccctgtgattataaaaaaggaagctagctgctctacggtcatctttgcttagagtatactttaacctggcttttaaagcagtagtaactgccccaccaaaggtcttaaaagccatttttggagcctattgcactgtgttctcctactgcaaatattttcatatgggaggatggttttctcttcatgtaagtccttggaattgattctaaggtgatgttcttagcactttaattcctgtcaaattttttgttctccccttctgccatcttaaatgtaagctgaaactggtctactgtgtctctagggttaagccaaaagacaaaaaaaattttactacttttgagattgccccaatgtacagaattatataattctaacgcttaaatcatgtgaaagggttgctgctgtcagccttgcccactgtgacttcaaacccaaggaggaactcttgatcaagatgcccaaccctgtgatcagaacctccaaatactgccatgagaaactagagggcaggtcttcataaaagccctttgaacccccttcctgccctgtgttaggagatagggatattggcccctcactgcagctgccagcacttggtcagtcactctcagccatagcactttgttcactgtcctgtgtcagagcactgagctccacccttttctgagagttattacagccagaaagtgtgggctgaagatggttggtttcatgtttttgtattatgtatctttttgtatggtaaagactatattttgtacttaaccagatatatttttaccccagatggggatattctttgtaaaaaatgaaaataaagtttttttaatggaaaaaaa

SEQ ID NO: 53404 - DNA, 3539 bp, Homo sapiens
acgtttccgccttccagcggaaactaacccctctttttctccaaaggagtgcttgtggagatcggatcttttctccagcaattgggggaaagaaggctttttctctgaattcgcttagtgtaaccagcggcgtatattttttaggcgccttttcgaaaacctagtagttaatattcatttgtttaaatcttattttatttttaagctcaaactgcttaagaataccttaattccttaaagtgaaataattttttgcaaaggggtttcctcgatttggagctttttttttcttccaccgtcatttctaactcttaaaaccaactcagttccatcatggtgatgttcaagaagatcaagtcttttgaggtggtctttaacgaccctgaaaaggtgtacggcagtggcgagaaggtggctggccgggtgatagtggaggtgtgtgaagttactcgtgtcaaagccgttaggatcctggcttgcggagtggctaaagtgctttggatgcagggatcccagcagtgcaaacagacttcggagtacctgcgctatgaagacacgcttcttctggaagaccagccaacagggtaagcggcccaattcattgttggagggtgaaagctgattagagaagagaattgaatacacaaaacctgtacgaaatgttttaagttgctcagtttgagtggtttgaattacgtgttgttgcttccttttttctgttttaatttgcagacattctcctccccccccaaaaaaaagggtgatttgtacaattttttatggtgctgtgtcctaaaggggatcctgaggggcgttgcctcgggtagttaaagtcttatgtgtgcataagttgcttattctttgtctacttcctatttgagatgttagtagagaactgtcctgggtgaatctttcagtattgcagggcttggcaacttgctgcccgacaaaatacatcagaatttctctttaagaacaatatgggatggattaaaaaatatatatatgggatgaaattgggggtacttcaataccttgcatgccacccaagcattccttatcacacagatgcattttaagtgtaacagcaagcctaatggctactcgattttctttcccttcaggtgagaatgagatggtgatcatgagacctggaaacaaatatgagtacaagttcggctttgagcttcctcaggggcctctgggaacatccttcaaaggaaaatatgggtgtgtagactactgggtgaaggcttttcttgaccgcccgagccagccaactcaagagacaaagaaaaactttgaagtagtggatctggtggatgtcaatacccctgatttaatggtgagatccattttaaagattctattctcctgggtcatgaggatgataaatcagacgtcttgggcattagattgaagcatctcaaaacacctttttatccccttctatataggcacctgtgtctgctaaaaaagaaaagaaagtttcctgcatgttcattcctgatgggcgggtgtctgtctctgctcgaattgacagaaaaggattctgtgaagatgttcccgaattgtggtccccaaagctgccattgtggcccgccacacttaccttgccaatggccagaccaaggtgctgactcagaagttgtcatcagtcagaggcaatcatattatctcagggacatgcgcatcatggcgtggcaagagccttcgggttcagaagatcaggccttctatcctgggctgcaacatccttcgagttgaatattccttactgatctatgttagcgttcctggatccaagaaggtcatccttgacctgcccctggtaattggcagcagatcaggtctaagcagcagaacatccagcatggccagccgaaccagctctgagatgagttgggtagatctgaacatccctgataccccagaagctcctccctgctatatggatgtcattcctgaagatcaccgattggagagcccaaccactcctctgctagatgacatggatggctctcaagacagccctatctttatgtatgcccctgagttcaagttcatgccaccaccgacttatactgaggtggatccctgcatcctcaacaacaatgtgcagtgagcatgtggaagaaaagaagcagctttacctacttgtttctttttgtctctcttcctggacactcactttttcagagactcaacagtctctgcaatggagtgtgggtccaccttagcctctgacttcctaatgtaggaggtggtcagcaggcaatctcctgggccttaaaggatgcggactcatcctcagccagcgcccatgttgtgatacaggggtgtttgttggatgggtttaaaaataactagaaaaactcaggcccatccattttctcagatctccttgaaaattgaggccttttcgatagtttcgggtcaggtaaaaatggcctcctggcgtaagcttttcaaggttttttggaggctttttgtaaattgtgataggaactttggaccttgaacttacgtatcatgtggagaagagccaatttaacaaactaggaagatgaaaagggaaattgtggccaaaactttgggaaaaggaggttcttaaaatcagtgtttcccctttgtgcacttgtagaaaaaaaagaaaaaccttctagagctgatttgatggacaatggagagagctttccctgtgattataaaaaaggaagctagctgctctacggtcatctttgcttagagtatactttaacctggcttttaaagcagtagtaactgccccaccaaaggtcttaaaagccatttttggagcctattgcactgtgttctcctactgcaaatattttcatatgggaggatggttttctcttcatgtaagtccttggaattgattctaaggtgatgttcttagcactttaattcctgtcaaattttttgttctccccttctgccatcttaaatgtaagctgaaactggtctactgtgtctctagggttaagccaaaagacaaaaaaaattttactacttttgagattgccccaatgtacagaattatataattctaacgcttaaatcatgtgaaagggttgctgctgtcagccttgcccactgtgacttcaaacccaaggaggaactcttgatcaagatgcccaaccctgtgatcagaacctccaaatactgccatgagaaactagagggcaggtcttcataaaagccctttgaacccccttcctgccctgtgttaggagatagggatattggcccctcactgcagctgccagcacttggtcagtcactctcagccatagcactttgttcactgtcctgtgtcagagcactgagctccacccttttctgagagttattacagccagaaagtgtgggctgaagatggttggtttcatgtttttgtattatgtatctttttgtatggtaaagactatattttgtacttaaccagatatatttttaccccagatggggatattctttgtaaaaaatgaaaataaagtttttttaatggaaaaaaa

SEQ ID NO: 53405 - DNA, 3570 bp, Homo sapiens
acgtttccgccttccagcggaaactaacccctctttttctccaaaggagtgcttgtggagatcggatcttttctccagcaattgggggaaagaaggctttttctctgaattcgcttagtgtaaccagcggcgtatattttttaggcgccttttcgaaaacctagtagttaatattcatttgtttaaatcttattttatttttaagctcaaactgcttaagaataccttaattccttaaagtgaaataattttttgcaaaggggtttcctcgatttggagctttttttttcttccaccgtcatttctaactcttaaaaccaactcagttccatcatggtgatgttcaagaagatcaagtcttttgaggtggtctttaacgaccctgaaaaggtgtacggcagtggcgagaaggtggctggccgggtgatagtggaggtgtgtgaagttactcgtgtcaaagccgttaggatcctggcttgcggagtggctaaagtgctttggatgcagggatcccagcagtgcaaacagacttcggagtacctgcgctatgaagacacgcttcttctggaagaccagccaacagggtaagcggcccaattcattgttggagggtgaaagctgattagagaagagaattgaatacacaaaacctgtacgaaatgttttaagttgctcagtttgagtggtttgaattacgtgttgttgcttccttttttctgttttaatttgcagacattctcctccccccccaaaaaaaagggtgatttgtacaattttttatggtgctgtgtcctaaaggggatcctgaggggcgttgcctcgggtagttaaagtcttatgtgtgcataagttgcttattctttgtctacttcctatttgagatgttagtagagaactgtcctgggtgaatctttcagtattgcagggcttggcaacttgctgcccgacaaaatacatcagaatttctctttaagaacaatatgggatggattaaaaaatatatatatgggatgaaattgggggtacttcaataccttgcatgccacccaagcattccttatcacacagatgcattttaagtgtaacagcaagcctaatggctactcgattttctttcccttcaggtgagaatgagatggtgatcatgagacctggaaacaaatatgagtacaagttcggctttgagcttcctcaggggcctctgggaacatccttcaaaggaaaatatgggtgtgtagactactgggtgaaggcttttcttgaccgcccgagccagccaactcaagagacaaagaaaaactttgaagtagtggatctggtggatgtcaatacccctgatttaatggcacctgtgtctgctaaaaaagaaaagaaagtttcctgcatgttcattcctgatgggcgggtgtctgtctctgctcgaattgacagaaaaggattctgtgaaggtgatgagatttccatccatgctgactttgagaatacatgttcccgaattgtggtccccaaagctgccattgtggcccgccacacttaccttgccaatggccagaccaaggtgctgactcagaagttgtcatcagtcagaggcaatcatattatctcagggacatgcgcatcatggcgtggcaagagccttcgggttcagaagatcaggccttctatcctgggctgcaacatccttcgagttgaatattccttactggtgggtagatgcagggtggcttcagcagagaaattgttcatctgttaccacagctgtcttgtttctccagacctctggtgtaataaactgccatcttcctttctagatctatgttagcgttcctggatccaagaaggtcatccttgacctgcccctggtaattggcagcagatcaggtctaagcagcagaacatccagcatggccagccgaaccagctctgagatgagttgggtagatctgaacatccctgataccccagaagctcctccctgctatatggatgtcattcctgaagatcaccgattggagagcccaaccactcctctgctagatgacatggatggctctcaagacagccctatctttatgtatgcccctgagttcaagttcatgccaccaccgacttatactgaggtggatccctgcatcctcaacaacaatgtgcagtgagcatgtggaagaaaagaagcagctttacctacttgtttctttttgtctctcttcctggacactcactttttcagagactcaacagtctctgcaatggagtgtgggtccaccttagcctctgacttcctaatgtaggaggtggtcagcaggcaatctcctgggccttaaaggatgcggactcatcctcagccagcgcccatgttgtgatacaggggtgtttgttggatgggtttaaaaataactagaaaaactcaggcccatccattttctcagatctccttgaaaattgaggccttttcgatagtttcgggtcaggtaaaaatggcctcctggcgtaagcttttcaaggttttttggaggctttttgtaaattgtgataggaactttggaccttgaacttacgtatcatgtggagaagagccaatttaacaaactaggaagatgaaaagggaaattgtggccaaaactttgggaaaaggaggttcttaaaatcagtgtttcccctttgtgcacttgtagaaaaaaaagaaaaaccttctagagctgatttgatggacaatggagagagctttccctgtgattataaaaaaggaagctagctgctctacggtcatctttgcttagagtatactttaacctggcttttaaagcagtagtaactgccccaccaaaggtcttaaaagccatttttggagcctattgcactgtgttctcctactgcaaatattttcatatgggaggatggttttctcttcatgtaagtccttggaattgattctaaggtgatgttcttagcactttaattcctgtcaaattttttgttctccccttctgccatcttaaatgtaagctgaaactggtctactgtgtctctagggttaagccaaaagacaaaaaaaattttactacttttgagattgccccaatgtacagaattatataattctaacgcttaaatcatgtgaaagggttgctgctgtcagccttgcccactgtgacttcaaacccaaggaggaactcttgatcaagatgcccaaccctgtgatcagaacctccaaatactgccatgagaaactagagggcaggtcttcataaaagccctttgaacccccttcctgccctgtgttaggagatagggatattggcccctcactgcagctgccagcacttggtcagtcactctcagccatagcactttgttcactgtcctgtgtcagagcactgagctccacccttttctgagagttattacagccagaaagtgtgggctgaagatggttggtttcatgtttttgtattatgtatctttttgtatggtaaagactatattttgtacttaaccagatatatttttaccccagatggggatattctttgtaaaaaatgaaaataaagtttttttaatggaaaaaaa

SEQ ID NO: 53406 - DNA, 281 bp, Homo sapiens
tttttttttgagaaagtttaatgttaaagcattaactggttgagattgcagatagctggggcagtgaggctccttttaagtgctttgaagcacctagggtgaggcactagatcttggaccctgcagtgtctgtagggtgaagctgatccagaacttcattgtgagaacaatcaataggaaagaccatctgacattagagagatctgggatatggtcagttggagctacatggacaagggcaagtgtgtggcaggcagactgagcaacaacagtgggcatag

SEQ ID NO: 53407 - DNA, 244 bp, Homo sapiens
ctgtgaggaagaggtgttacgaaaatgagttacatgtgtgtgttcatatatagagtataacctacatgctgagcaatacattttgaaaacattccattctttttgattcaattgatattttaactttgcaaagttggatgagggttttacttactctctctttttttttaaagctctctctctcttttttctttttaacggagtgaaggtcttattgtcagctgctcagggcatccccaagctt

SEQ ID NO: 53408 - DNA, 393 bp, Homo sapiens
tctgattttccatggcaatttcagatgttttattgttcttaattattaactactcattttgattagtagtttgcctttcatgacagtacaaatttagtattgaaaccttgtttattcagttgatctcatgtatataaatatacatatgtatgttatttgactacggtgccttgtcaaagtatgagagcgttttatgtaaatgaacctgtactgtatatgtaattatgtctgtactgttcagtaattaatgtcatagatctggagttgggacatcctaccttctgtctgctctgttctctactgtaggaggccgatcctggcaaataacatttctcaggctcctttgccagcaggcttttggctcggtttggcaaatgggaagcacacgtggaa

SEQ ID NO: 53409 - DNA, 155 bp, Homo sapiens
accacagaagagacagggcagaaagctggtggaaaaccatctccaacatctgtttctttttctgttaaaatctatccactgtgtgaattgccaaggaaagttaagattcctgttctgaaacgagaagggttctcttttcacatgacacctgcaga

SEQ ID NO: 53410 - DNA, 359 bp, Homo sapiens
tggctgtgtgctattgttttttttttttaagtgaaatatttctctccacccatgtttttaacaaatattgtattgggaaacaagactgtgagagatgaatgcgcttttctcttgctgttctcaggtatttgaaattgttgactcctagtatgttatcatactttagtctttgctaaaccagatcaacgtaaaatgccatttcagtgttttaatctatattttaaattaatgggtaaagtttgtcattctttcatatgtttttcacttataattcttttggggaacgcataccattatcttattttttttctaaactccaatagcagtttaaggttcattgcacttactttagctattaa

SEQ ID NO: 53411 - DNA, 439 bp, Homo sapiens
ttaatttaattatatacctgctatggtttgaatgtgtcccccaaagtttatgtgttggaaacctaattctcaatgtaatggtgttgggagttagggcctaataagaggtgattaaattatgagagttctgccctcatgaatggactaatatcattttccttggagtgggttagttaattatgagaatgggtttgttataaagacaagtttggcccattcttgctcgcttgcttttgcctactcttgaccttctgctttctgccatgggatgacagagaatgtaggcactcaccagatgccgttgctatgcatttgaatttccagtctccagaaccacgaaccatggttcattataaattaacaagtctgtgagagtctgttatgagtataaaatgaactaagtccctaatgtgcaatatgaaaaaatgaatacaagatt

SEQ ID NO: 53412 - DNA, 469 bp, Homo sapiens
gggccagtggaggctcccaagaggctgtccacggggaccatgttaggtctcttcaggctccaagggcaagtctaaggggggaagacccccatgatggtgtgcccttttgttctgaagcagctgcctccctctgctttggtgccaggcactgaaaacatttttcttgatttaggggccccacttatacttaacatagacaagagataccaggatgtgctcacatcatagtgagcatacacagcaagaacacgtagtgtgtccatcagtgtcctcatcacattgctctccttgtgtttgttgcaaggctgctggtctcccttccagactgagctcctcatgggccagggctgtgcttgagctgtccttgaattcctagtgttagaaaagggcacagctgtgggagccccggatgaatgtgctggaccaaatggcagagctagagtccaaaccctgctctcactctgtccac

SEQ ID NO: 53413 - DNA, 447 bp, Homo sapiens
attaaaagattataggtatttgtgctatatcttgaatttatccacagacaaagcacatttaaatttgatcttatagccacttgaagacatatgatggaaattctgactagaaaatgctgccaaagtcattaaattttatttagaaaatacataaaatacataaggtatactagatataagatgtaccagctacctgaaacaacagatgatgcctcacatatagagcaaaatgtggtctttggtggaaaaggaaatcaattttggatttgtgctatccacaattctttgatatgaactattgcttgttattaataatgtaaacaaaataggtaggaggtcctgaaagggagtcctccttaaaaggtttctggcttagtttcctttcttttgaggatttttaacatataagccaaacgaaatccaaggattaaactgaaaaaaaaagta

SEQ ID NO: 53414 - DNA, 726 bp, Homo sapiens
ctctggcaggggtgggggcggtcagaagcattaatatgcttcagcttatcaaatatatataaactcttgagccacttgagtagcacactgccatgtgttagtttcttaggaaaagatataatcaattttagaaatgatatcttaatttactttagctaggacaaaatgatttgattataccccctcacctctttgactattttgttactctgctggaagtctggcaagtatgattacatgaggctaagcagatgatttcccatccattgctgaaacccagggctgccccattgtacaacctcagggaataccattttcacgtgactttcctggagcacagcagtgtgactggtgctccctggagctgggcagcacactggcctggctatcccagtattactccccgtactttgctgcatctgctcaatgctgcatttcattccctatcttggttaatggtcccatcaaaaccagaaacctgggagccatccttgattccctccttttcctcactttcctttccaagtctggttagttttctctgccgaaagtggacaacttaccttctctttttcctcatatctaccaccctgatcccttcttgcccactgaaacaattgcaccagcctcctaattgatctcttagctatcgtcttccacatcactgctagagggactgatcagaagggcaattctgaccatgtcagtcgtcattaaaaaaaaaaa

SEQ ID NO: 53415 - DNA, 509 bp, Homo sapiens
gccacttttggagccttgaatccaaggttgggactacggctgtggaatattatgtgtcctaggcacttgctaagtgcgttctgcaggaaaacagcttcaccgttgcccaagaactcatcaggttctcaggctccagcctgatctactaaatcagcatctgcagtttaacaagatccccaggtgattgatagtcacctgaattttggagaagcactgttgtggtatcacagctagaaactcatgatggcgtaagaggaataggagacagtgagttgaaacaggaactttgggccaagatttgtaatagcaaatcttgtgaataccatttcctgtccttcacagtacctgcaatgacagtacattttttctggcttttgccaccttgccaccttctgccttggatctttagaacaccacaggatccaatgctagtcttctaggatgggggtccataaataaaatccttggtctttcctaagagatggatactggtgtcaggcagatgtaga

SEQ ID NO: 53416 - DNA, 5330 bp, Homo sapiens
ataaaaggctcacacacacacacaagcacacacgcgctcacacacagagagaaaatccttctgcctgttgatttatggaaacaattatgattctgctggagaacttttcagctgagaaatagtttgtagctacagtagaaaggctcaagttgcaccaggcagacaacagacatggaattcttatatatccagctgttagcaacaaaacaaaagtcaaatagcaaacagcgtcacagcaactgaacttactacgaactgtttttatgaggatttatcaacagagttatttaaggaggaatcctgtgttgttatcaggaactaaaaggataaggctaacaatttggaaagagcaactactctttcttaaatcaatctacaattcacagataggaagaggtcaatgacctaggagtaacaatcaactcaagattcattttcattatgttattcatgaacacccggagcactacactataatgcacaaatggatactgacatggatcctgccaactttgctctacagatcatgctttcacattatctgtctagtgggtactatatctttagcttgcaatgacatgactccagagcaaatggctacaaatgtgaactgttccagccctgagcgacacacaagaagttatgattacatggaaggaggggatataagagtgagaagactcttctgtcgaacacagtggtacctgaggatcgataaaagaggcaaagtaaaagggacccaagagatgaagaataattacaatatcatggaaatcaggacagtggcagttggaattgtggcaatcaaaggggtggaaagtgaattctatcttgcaatgaacaaggaaggaaaactctatgcaaagaaagaatgcaatgaagattgtaacttcaaagaactaattctggaaaaccattacaacacatatgcatcagctaaatggacacacaacggaggggaaatgtttgttgccttaaatcaaaaggggattcctgtaagaggaaaaaaaacgaagaaagaacaaaaaacagcccactttcttcctatggcaataacttaattgcatatggtatataaagaaccagttccagcagggagatttctttaagtggactgttttctttcttctcaaaattttctttccttttattttttagtaatcaagaaaggctggaaaactactgaaaaactgatcaagctggacttgtgcatttatgtttgttttaagacactgcattaaagaaagatttgaaaagtatacacaaaaatcagatttagtaactaaaggttgtaaaaaattgtaaaactggttgtacaatcatgatgttagtaacagtaatttttttcttaaattaatttacccttaagagtatgttagatttgattatctgataatgattatttaaatattcctatctgcttataaaatggctgctataataataataatacagatgttgttatataaggtatatcagacctacaggcttctggcaggatttgtcagataatcaagccacactaactatggaaaatgagcagcattttaaatgctttctagtgaaaaattataatctacttaaactctaatcagaaaaaaaattctcaaaaaaactattatgaaagtcaataaaatagataatttaacaaaagtacaggattagaacatgcttatacctataaataagaacaaaatttctaatgctgctcaagtggaaagggtattgctaaaaggatgtttccaaaaatcttgtatataagatagcaacagtgattgatgataatactgtacttcatcttacttgccacaaaataacattttataaatcctcaaagtaaaattgagaaatctttaagtttttttcaagtaacataatctatctttgtataattcatatttgggaatatggcttttaataatgttcttcccacaaataatcatgcttttttcctatggttacagcattaaactctattttaagttgtttttgaactttattgttttgttatttaagtttatgttatttataaaaaaaaaaccttaataagctgtatctgtttcatatgcttttaattttaaaggaataacaaaactgtctggctcaacggcaagtttccctcccttttctgactgacactaagtctagcacacagcacttgggccagcaaatcctggaagcagacaaaaataagagcctgaagcaatgcttacaatagatgtctcacacagaacaatacaaatatgtaaaaactctttcaccacatattcttgccaattaattggatcatataagtaaaatcattacaaatataagtatttacaggattttaaagttagaatatatttgaatgcatgggtagaaaatatcatattttaaaactatgtatatttaaatttagtaattttctaatctctagaaatctctgctgttcaaaaggtggcagcactgaaagttgttttcctgttagatggcaagagcacaatgcccaaaatagaagatgcagttaagaataaggggccctgaatgtcatgaaggcttgaggtcagcctacagataacaggattattacaaggatgaatttccacttcaaaagtctttcattggcagatcttggtagcactttatatgttcaccaatgggaggtcaatatttatctaatttaaaaggtatgctaaccactgtggttttaatttcaaaatatttgtcattcaagtccctttacataaatagtatttggtaatacatttatagatgagagttatatgaaaaggctaggtcaacaaaaacaatagattcatttaattttcctgtggttgacctatacgaccaggatgtagaaaactagaaagaactgcccttcctcagatatactcttgggagagagcatgaatggtattctgaactatcacctgattcaaggactttgctagctaggttttgaggtcaggcttcagtaactgtagtcttgtgagcatattgagggcagaggaggacttagtttttcatatgtgtttccttagtgcctagcagactatctgttcataatcagttttcagtgtgaattcactgaatgtttatagacaaaagaaaatacacactaaaactaatcttcattttaaaagggtaaaacatgactatacagaaatttaaatagaaatagtgtatatacatataaaatacaagctatgttaggaccaaatgctctttgtctatggagttatacttccatcaaattacatagcaatgctgaattaggcaaaaccaacatttagtggtaaatccattcctggtagtataagtcacctaaaaaagacttctagaaatatgtactttaattatttgtttttctcctatttttaaatttattatgcaaattttagaaaataaaatttgctctagttacacacctttagaattctagaatattaaaactgtaaggggcctccatccctcttactcatttgtagtctaggaaattgagattttgatacacctaaggtcacgcagctgggtagatatacagctgtcacaagagtctagatcagttagcacatgctttctactcttcgattattagtattattagctaatggtctttggcatgtttttgttttttatttctgttgagatatagcctttacatttgtacacaaatgtgactatgtcttggcaatgcacttcatacacaatgactaatctatactgtgatgatttgactcaaaaggagaaaagaaattatgtagttttcaattctgattcctattcaccttttgtttatgaatggaaagctttgtgcaaaatatacatataagcagagtaagccttttaaaaatgttctttgaaagataaaattaaatacatgagtttctaacaattagaaaagaaaaaattaaaacatgaaatgataacaaaagtaaacaaaagatactttcaaagcagtgaacaaaacattttgacataagccataatataaattataatataaaaaataaaaaccatagtataaattgtcagcctttgagttggctacaaattcaatttaatgacagaagagaagggatgctggaggtaaattcttagggtttctatctcatagagtttgctcttctggttctctagactgccaaagaacataaagatgtgcgaggggacctagctgtagtaaaagcaatcctataacaagaaaaactctaaaacagtgccccttacgattttctactgaaatttctctaatagtagaggtgtaaaataagaagttagagaataatgcaaagggggcccaccacagacggaacatttcttttctcttaagactcatgtgatttttgcatcttactccataatatatttcgtggttgcgttaatatgacaatgtctgcaattaaacaccagtaagcaaaattgatacatcagaatgacttgcagggcttatcatgcagtttggtttacatccctactccactgccatttacttgagcgtgaatgagacacaaaagattatttgcctcccataatccaactttacacataaataacacaaggctaaagaaaaccagaactcaaattcaccacgcataggagtgataacaaaaatatttaacagtcagtatgggtgattactggccaatcagaatacatcactgatacatcgaaatggatgcaggccactatgactaacttgtgggtatcatttctatgatcaccctaaaacagagttgggaaaatatctattaactggtctctctggtttgaattctcaatatgtatcttaatatgaaatagctcattaaaacttcatgtgtaactatttcagcattgttgtcagctactctttattccacttctgtacagtatttattcaaccaagctgctgctttcaatgaaggtcacttgttccttcagggacacatatactcccacctatcctttaattttgaatggtttgtcaggaaaatttactttctcttgagttgaaaaacttgacaggaagcaagaaataatacagtcctagcctctttccaataacatctgatttctccattctcaaactacacttctcaaggaaccagatatttactctcatctgggaagatgcctcttatgttttccttttacttcctggttatcatgtggttgcattttccaagttcttatcattgaatttatgagagcctatcaaaatttattttctttcatttatattctaataattgaaatgtgagatgaaaataacatttcacttatgaaaaacccttctcttgatgaatccttccatgtgttagttatctattgctgtgtaacaaattaaaacttaatggcttgaaaca

SEQ ID NO: 53417 - DNA, 4860 bp, Homo sapiens
ccgcgcacagtggtggccaccgcgactggtgctgaagtgtcggcgcgtgccgggcgctccgctgggacccgggttgctcgccctgagtctcagctttctcatctgtacggttgggacaagtacagtaaccctcgcccgtcaagacgggccaggctgtggcgagggtccacgccttagagcaggcacctatcttgtgcagggccctgagacggggtctgactcagttcctgcggggaacttcaccagtgacccagtcagtgcccttcagttaaagaccaccaggagcacacttatatcatggaaatcaggacagtggcagttggaattgtggcaatcaaaggggtggaaagtgaattctatcttgcaatgaacaaggaaggaaaactctatgcaaagaaagaatgcaatgaagattgtaacttcaaagaactaattctggaaaaccattacaacacatatgcatcagctaaatggacacacaacggaggggaaatgtttgttgccttaaatcaaaaggggattcctgtaagaggaaaaaaaacgaagaaagaacaaaaaacagcccactttcttcctatggcaataacttaattgcatatggtatataaagaaccagttccagcagggagatttctttaagtggactgttttctttcttctcaaaattttctttccttttattttttagtaatcaagaaaggctggaaaactactgaaaaactgatcaagctggacttgtgcatttatgtttgttttaagacactgcattaaagaaagatttgaaaagtatacacaaaaatcagatttagtaactaaaggttgtaaaaaattgtaaaactggttgtacaatcatgatgttagtaacagtaatttttttcttaaattaatttacccttaagagtatgttagatttgattatctgataatgattatttaaatattcctatctgcttataaaatggctgctataataataataatacagatgttgttatataaggtatatcagacctacaggcttctggcaggatttgtcagataatcaagccacactaactatggaaaatgagcagcattttaaatgctttctagtgaaaaattataatctacttaaactctaatcagaaaaaaaattctcaaaaaaactattatgaaagtcaataaaatagataatttaacaaaagtacaggattagaacatgcttatacctataaataagaacaaaatttctaatgctgctcaagtggaaagggtattgctaaaaggatgtttccaaaaatcttgtatataagatagcaacagtgattgatgataatactgtacttcatcttacttgccacaaaataacattttataaatcctcaaagtaaaattgagaaatctttaagtttttttcaagtaacataatctatctttgtataattcatatttgggaatatggcttttaataatgttcttcccacaaataatcatgcttttttcctatggttacagcattaaactctattttaagttgtttttgaactttattgttttgttatttaagtttatgttatttataaaaaaaaaaccttaataagctgtatctgtttcatatgcttttaattttaaaggaataacaaaactgtctggctcaacggcaagtttccctcccttttctgactgacactaagtctagcacacagcacttgggccagcaaatcctggaagcagacaaaaataagagcctgaagcaatgcttacaatagatgtctcacacagaacaatacaaatatgtaaaaactctttcaccacatattcttgccaattaattggatcatataagtaaaatcattacaaatataagtatttacaggattttaaagttagaatatatttgaatgcatgggtagaaaatatcatattttaaaactatgtatatttaaatttagtaattttctaatctctagaaatctctgctgttcaaaaggtggcagcactgaaagttgttttcctgttagatggcaagagcacaatgcccaaaatagaagatgcagttaagaataaggggccctgaatgtcatgaaggcttgaggtcagcctacagataacaggattattacaaggatgaatttccacttcaaaagtctttcattggcagatcttggtagcactttatatgttcaccaatgggaggtcaatatttatctaatttaaaaggtatgctaaccactgtggttttaatttcaaaatatttgtcattcaagtccctttacataaatagtatttggtaatacatttatagatgagagttatatgaaaaggctaggtcaacaaaaacaatagattcatttaattttcctgtggttgacctatacgaccaggatgtagaaaactagaaagaactgcccttcctcagatatactcttgggagagagcatgaatggtattctgaactatcacctgattcaaggactttgctagctaggttttgaggtcaggcttcagtaactgtagtcttgtgagcatattgagggcagaggaggacttagtttttcatatgtgtttccttagtgcctagcagactatctgttcataatcagttttcagtgtgaattcactgaatgtttatagacaaaagaaaatacacactaaaactaatcttcattttaaaagggtaaaacatgactatacagaaatttaaatagaaatagtgtatatacatataaaatacaagctatgttaggaccaaatgctctttgtctatggagttatacttccatcaaattacatagcaatgctgaattaggcaaaaccaacatttagtggtaaatccattcctggtagtataagtcacctaaaaaagacttctagaaatatgtactttaattatttgtttttctcctatttttaaatttattatgcaaattttagaaaataaaatttgctctagttacacacctttagaattctagaatattaaaactgtaaggggcctccatccctcttactcatttgtagtctaggaaattgagattttgatacacctaaggtcacgcagctgggtagatatacagctgtcacaagagtctagatcagttagcacatgctttctactcttcgattattagtattattagctaatggtctttggcatgtttttgttttttatttctgttgagatatagcctttacatttgtacacaaatgtgactatgtcttggcaatgcacttcatacacaatgactaatctatactgtgatgatttgactcaaaaggagaaaagaaattatgtagttttcaattctgattcctattcaccttttgtttatgaatggaaagctttgtgcaaaatatacatataagcagagtaagccttttaaaaatgttctttgaaagataaaattaaatacatgagtttctaacaattagaaaagaaaaaattaaaacatgaaatgataacaaaagtaaacaaaagatactttcaaagcagtgaacaaaacattttgacataagccataatataaattataatataaaaaataaaaaccatagtataaattgtcagcctttgagttggctacaaattcaatttaatgacagaagagaagggatgctggaggtaaattcttagggtttctatctcatagagtttgctcttctggttctctagactgccaaagaacataaagatgtgcgaggggacctagctgtagtaaaagcaatcctataacaagaaaaactctaaaacagtgccccttacgattttctactgaaatttctctaatagtagaggtgtaaaataagaagttagagaataatgcaaagggggcccaccacagacggaacatttcttttctcttaagactcatgtgatttttgcatcttactccataatatatttcgtggttgcgttaatatgacaatgtctgcaattaaacaccagtaagcaaaattgatacatcagaatgacttgcagggcttatcatgcagtttggtttacatccctactccactgccatttacttgagcgtgaatgagacacaaaagattatttgcctcccataatccaactttacacataaataacacaaggctaaagaaaaccagaactcaaattcaccacgcataggagtgataacaaaaatatttaacagtcagtatgggtgattactggccaatcagaatacatcactgatacatcgaaatggatgcaggccactatgactaacttgtgggtatcatttctatgatcaccctaaaacagagttgggaaaatatctattaactggtctctctggtttgaattctcaatatgtatcttaatatgaaatagctcattaaaacttcatgtgtaactatttcagcattgttgtcagctactctttattccacttctgtacagtatttattcaaccaagctgctgctttcaatgaaggtcacttgttccttcagggacacatatactcccacctatcctttaattttgaatggtttgtcaggaaaatttactttctcttgagttgaaaaacttgacaggaagcaagaaataatacagtcctagcctctttccaataacatctgatttctccattctcaaactacacttctcaaggaaccagatatttactctcatctgggaagatgcctcttatgttttccttttacttcctggttatcatgtggttgcattttccaagttcttatcattgaatttatgagagcctatcaaaatttattttctttcatttatattctaataattgaaatgtgagatgaaaataacatttcacttatgaaaaacccttctcttgatgaatccttccatgtgttagttatctattgctgtgtaacaaattaaaacttaatggcttgaaaca

SEQ ID NO: 53418 - DNA, 1690 bp, Homo sapiens
  misc_feature (827)..(827): n is a, c, g, or t
ataaaaggctcacacacacacacaagcacacacgcgctcacacacagagagaaaatccttctgcctgttgatttatggaaacaattatgattctgctggagaacttttcagctgagaaatagtttgtagctacagtagaaaggctcaagttgcaccaggcagacaacagacatggaattcttatatatccagctgttagcaacaaaacaaaagtcaaatagcaaacagcgtcacagcaactgaacttactacgaactgtttttatgaggatttatcaacagagttatttaaggaggaatcctgtgttgttatcaggaactaaaaggataaggctaacaatttggaaagagcaactactctttcttaaatcaatctacaattcacagataggaagaggtcaatgacctaggagtaacaatcaactcaagattcattttcattatgttattcatgaacacccggagcactacactataatgcacaaatggatactgacatggatcctgccaactttgctctacagatcatgctttcacattatctgtctagtgggtactatatctttagcttgcaatgacatgactccagagcaaatggctacaaatgtgaactgttccagccctgagcgacacacaagaagttatgattacatggaaggaggggatataagagtgagaagactcttctgtcgaacacagtggtacctgaggatcgataaaagaggcaaagtaaaagggacccaagagatgaagaataattacagtaagtaattttaagtactgctcatgaaccttagcaatctgttaatggatcaattttcaggtganatgttttctcatcttccttttgcttcttggaaaaaaaattaaataaaatgtcacctaatttctctaaattgaactatgttgaactatgcccctaaaaatatctcttttaacagggcaaatctacttacattatagttggacctgataatccaagccaatttgaaaatatatactccttgtcctgaaaatgctcataagttaagcaaaatgtaaataatattattcacaccaaaatgtgacttaatattgtctaagcaaaactcattaagatatctaatttagaacttcataaattatcactaaaagctatttatcactagtttaaagagtagggaaattatttttattaatttgattttctttgaaataatattttcatgatgtaaattaaaatacttaatctgtgctaagatatgcattcctttgcaattgtgtataatgataaaatagaagggaatctgtggtatccttattcatttgagtcataatgagcttgtattaagttgatgacttatcaacttaggcagaaaaacagatctctcctaacgttttccttaactaaatcttttatgtcataaaagttctgtgctatcttaagaaaaatgtaaaggtgaggggaaaaaagtgggctggaagagatggtaattccatgtttttcaatttaaagccttacatttttcccaagaatcagttattcttcttatgttaaaatatcagggttgtgttttgcatttaatggttatgatgaataaccaacttcaatagtattaaatgtaatggaataagatacacacctcaacatgtacattaaggatttaaaatacttagtaaaaataaattttgtttacattactagcactcag

SEQ ID NO: 53419 - DNA, 767 bp, Homo sapiens
  misc_feature (408)..(408): n is a, c, g, or t
taactagtacacagaagccctgctcttgagggtgctgctgtactttagcctcttcatcaagcagatgccttacctttgatctttctctggctccttacatctgttctcagttggtaaagaacccggaggggggagaagcagggaggggtgttattagcactcccggatcaccctcactggcctgttggtcagaagactcttgataaattaacacaaggaaccaaatgggggcaagggcactgctggctggggaaagaggccatttgctgctttcctttctccctatccccagaaggagagtcttccttctgtgctccttaaggatcccctaagcagtgtctactccgttgctcgggctaggtgttttacccctctccttcgttatctgcagacctttccccaaacttnctgagtctgctcaaagctagagttttcgtgaacagctctttcaagggtgccacttggagccttgggtggtacgaaatggatgtcttcacggtgagccttgtgtctgctccaagtgcgaaccctccatgcactgcagagaacaccagaaggagaggagcactacctgagctttctcttccgggtctaaaggtggaaacttctttgcagcacccagcatttcactgtactgattcctttttttggatcaccacctcctgcgtttagcagccatatgctgggctcactcagctatacactgcttgttcataactactgtgggttcacagggctgaaacactgcctcatttttcttaatcaga

SEQ ID NO: 53420 - DNA, 174 bp, Homo sapiens
ccaaaatgtaagaaatttgattccttaatctctctttctaaaagttactttaagcaaaattccttcaaatattttagcagtgtctatactgtcacgtagaaatgacaagaataaaaattctgcttcttgtttagaaaatggaaagttgtgattatgtgtttctaaaaaatataa

SEQ ID NO: 53421 - DNA, 746 bp, Homo sapiens
ttgattcaggctgagagctcaggtgttccctcagaatctctgaatccttcaggaaacgagaaatgtttgctcttcctcctaagaggaagtgactcaccaaatttgtactaaccttagttaggctgggtagtacttcttcccctcaattgtggagagtcattctttccgtgtttatatcctttacttagtaaaatgtgggcatggctcttgtggccgagagagactgatggcctcctctgaggttaacaaaaaattttaaacacacgcccactgtctccatttgtaatattgtcattttgcctctgtaattttaagtggttcaaacttaatgtgtttcctaaacaatttggaaagtttaaaaacattttgtccctttatttctctgttaatgggcttttgaaaactatggctatcctttgcttttaacttaaaaacactttcttttgaaaacttttatggctgggtgcagtggctcaggcctgtaattccagcactttgggaggctgaggtgggaggatcacttgaggcaaggagtttgagatcagcctgggcaacatagtaagaccctgtctgatccagcaccagccccccgcccccagcccccccaaaattagccaggtgtggtggtgcccacctgtagtcccagctactcgtgaggctgaggcaggtgggtcccctgagcccaggaagttaaggctgcagtgagttgtgatcatgcttgggtgaaagaacaagaccccatctca

SEQ ID NO: 53422 - DNA, 137 bp, Homo sapiens
  misc_feature (5)..(6): n is a, c, g, or t
  misc_feature (8)..(8): n is a, c, g, or t
  misc_feature (120)..(121): n is a, c, g, or t
  misc_feature (125)..(126): n is a, c, g, or t
  misc_feature (128)..(128): n is a, c, g, or t
  misc_feature (130)..(130): n is a, c, g, or t
  misc_feature (136)..(136): n is a, c, g, or t
ttcannanagattctgctgtctacatcaatacacctgaatagttggacagaaaattgaaatcttttaactaattctaactatgaagcacagtgaaatagaaagttaggctgtaagaagtnnggcnntncngtgtgnc

SEQ ID NO: 53423 - DNA, 456 bp, Homo sapiens
attgagctgtgtcgacatttgctatatagactgtagggcctaacgagtgcttcttgagaccctttcctacttacagtggctctccttgtcatcttgctgcctcttttagtttgttcttggctcagaggctagatgtccatggtataacttagccatcaaaacagggatggggctgggcacagtgactcatgcttatcatatcaggagtttgggaggccaatgtgggaggattgagcccaagagtttgagaccaccctgggcaacatggcagaatcccttctctacacacacacaaacacagccagacatggtagcgcctgcctgtacacacacatacagagccagatgtggtgctgcgtgcctgtagtcccagctactcaggaggctgaggtaagaggatcacttgagttgggcaggttgaggctgtagggagctggcatcatgccaatgtactgc

SEQ ID NO: 53424 - DNA, 402 bp, Homo sapiens
  misc_feature (28)..(28): n is a, c, g, or t
gggggtgatttggatcatggggagttancttctccatggtttaacacccattccccattggggctgttctcacaacagagttctcgtgagatctgcttgtttttatttatttatttgagacagagttttgctcttggttgcccaggctttctttacagcccttctgagaaggaacaacctattgagcagcaggatgggagcattgtgcattggactatgcgtgatactatacacatcagctttgcacaattttttttaaatcaagtgtttgagtctctacaaatgaaaaaaacatttagcaaatactgagttcataaaatatgctctagggaaaaaatttctagaagattatatttttaaagccatgtaagctgagtgtaaatggacagaactaggaatact

SEQ ID NO: 53425 - DNA, 2728 bp, Homo sapiens
  misc_feature (1087)..(1087): n is a, c, g, or t
  misc_feature (1539)..(1539): n is a, c, g, or t
  misc_feature (1811)..(1811): n is a, c, g, or t
actgaaataaataaagagaagcatggtttttgaatgttctccagctttagatgcattgaagttttcaagatcagtcaataagcatttttctgcccaattacctgtgagaagatgtatctattgggaataaagaatggggggcggggggtattggaaaggctgatcaataaggctgggcttcatgtcaaacatgtcaatgtatgcttaggccagtttcaaatgtttggtggcattttgttcacaaaaggatagagtgtgtgcatcatatttgttttttttgttttttcacaaaattgagttaaatccagtgcttttgttattggctattcttcatgtagctttctttagggtggttgtttacaaagacttcggcatggtttcacagagactcattccagtggaatccagttagatggtcctaatgctttcgttccagctatgacatgtgttttgattcacagtatgcttggatggactgtgtggatgcttcattcctatggaagacataattcagaacagaaaacttgtaacagcagcatcttgcctgcaaaattatttaagaaaaaaaaaaaaagactttctggttaataccaaaatctttaactgtcctttagataggtactgtttcaagtaattaacccactgtgattctcaacaatgggtccataatagccttacctgaacattaactcctcctatttgcccccattactcccagagattccggtatttttttagtggggctttggtggtggtgtgcgtgtatgtatgtatgtgtatatgttatgtatacacatgcacatatgtgccttgggtgtatgtaactatgtatgtatatacacacatatttttaaacataaatttttataatattcattttaaacaaaagtatacagatatataatcttaagcaccacaggtgagtttgaagtccagccattgttgggaaccatggaatcaaacacaattttttaaaagcactttgctttcatgacaaataatacacttaaggataggaagagaaggagatgctcacagatacaaagacgttaaaaaaaaaatgcccatgttcatgaaggggcttgcntacaaccaattgctctcttatttcacgggctcttttgattttacataaagttcagtgctataaaactctgtaaaatttcattatgtttttaaagtcagaggcagggaaaaagtcacctccaggtgtttagaaaactaaaaaagactgccatttcactgggctaagtttgaagccccgcagatgcaagtgccttgtattcatgagtccacaaataaggaggtgttaatgatcaaggtagtggttgagtggatcctggtaaatacagcttcaattggagatggactcaagcagttcagcatatacagcagacacacaagctgatgataaccacttactatgtgctaggtactgttctgatgctttgcttacatcacctcatgacatctcgacaacaaggtaggtattattatccctgctttatcaatgagaatttcagtcacagacccttgacnacatttgctcagctagtaggcagggactggaactcaaatccgtgtgacttcaaagccacgcagcaaccaccacaccagtcatatgctctgccctgtggattgggccatattgaaacaataaagaccatcgagctgatggatttcgaaccacttcagagaaatatgtaaaaggcttacatgcaaaaatatgttcagaagacaagccaaaaggccaagtattcttgtaaatgtggcagtgatgactgaagactttattaaaaatatattaagcntgtagatagagagtgaactgctcataaatctaggtggttttgtttacttctatttttctgtatgtttgagatatttcattgctgattatttttgggcaacgggacatggaagaaagttgataagctcttctgaattatgacttattcaggtagttttgcataaaccagagggcagataattgctgatatgacctcaacaaagagataaggtggagaaaggaatgtttgctaattatctacaaaggaaagagaaaggtgagaaataataagttacctgattctctgtgttctgtgcttacttgttcctccaaagcattctccccagcatgtctcttccagcttaataactgaaaacacttagtcaacaacaatacactctagtggaaaagagatcctgttagttttctagacgatgcctgttgtgggtatattgtttccaaaattatattagtgctcatgagctggaatcgctgcactttacacactcaaaattatgagaccatttgtccccggtggtagctcagtttttggagtgaacctcaaaagcaatccttggctaacagaagattcttccagattctagcaatgtttgttcaaagtggggcatagctggccaggtgtagtggctcacacctgtaatctcagcactttgggaggctgaagcaggcagatcacctgaggttaagagttcaagaccagcctggccaacatggtgaaaccctgtctctagtaaaaatacaaaaaattagctaggcgtggtggcacacgcctgtaatcacagctacttgggaggctgaggcatgagaattgcttgaacccaggaggcggaggttgcagtgggccgagattgcaccacttcactccagcctgggtgacagagtgagactccatctcaaaacaaacaaaaaacaaaaagc

SEQ ID NO: 53426 - DNA, 206 bp, Homo sapiens
ggaggtaacaagagaaacccaaaataggttgaagggaaaatcaaaggcagcaaagaagtatatccagcttcccatccagaactctacaacatgatagacacagagtggccagtacagccatagcacagatgtggcagtcaagcgtactatgaaaggtggaaaagtggggggatgagggaagaggtcctaaactaagttattagctc

SEQ ID NO: 53427 - DNA, 195 bp, Homo sapiens
ctttgcacctctcagcctaagaacacaagtgtctgtagcatatataatagctatgccttaccagcacaggaaagacagtttgtcatagcgcagtagaagggagttcatcatgcctgaattccagtcttggcactgccacatggctaatgtctcagcctcagtttttcatctgtaaaataagcttttgataaaatt

SEQ ID NO: 53428 - DNA, 424 bp, Homo sapiens
aatccaaatcaaattcttgctcactatcctgaagatcaaacacttgagccctcccacagatctggaaagaaaaggcctcccaccaaggaagcatgaccatcctgcctaaaatttgaattaaaaatccagttggcccagctcctcagtgggtggattctggaaagggatggttacccagggtgaacacagcatcctctgggaagggcttgttggaatcagccaggtttagcctgggctataggaggaagcctggcctcttatgtgttactaatccgtgatccagagagactcatttaaaaaggcctcagccaggcgcagtgatgcacgcctgtaatcttagctacttgggaggctgaggtgggaagatcgcttgagcccaggagtctgaaaccagcctgggtaacatagcgagaccttatcttca

SEQ ID NO: 53429 - DNA, 479 bp, Homo sapiens
gtccatttcccttctctgaaggatggcactcttgcattgcctgttgcagcctcaacataattgtttcctatgttttttccaattttctattgtttacagaagaacattaattctggaccatttaactcccaaatggccagagctgaagttacttgttctatttttaatttcgatatattttttttgagacagggttttgctctgtcacctaggctggactgcagtggcgtgatcatagctcactgcagcctcaaactcctgggctcaagcaatcctgcctcagcatcctgagtaaacctgttttattttgaatatgttcaagtgggagatgttgaggtagttatgctgctagctatatacgcattcaacaatattcagcttgcatttattgactactcgctgtgtgccaggttttcggttaggtaccagggtcatcgagatgaaggacagtagtcctttcccatggggagataatagtc

SEQ ID NO: 53430 - DNA, 581 bp, Homo sapiens
tttatttctaaaagagttataatttgcccatgatcacagagctaagtaaatgatagagctatgatcggaacttcaactttctgattccatgtctgttagcactgtggaaggctgtctttggcattttaatatacttatcaagtgtttcatatacattggttaatttgtccaactgccacagagtgggatgggtggctctttttcctaaactgtagccatcttttccccaaagtgtagccttcatgaattttgccctatttatatatcacctatgctattaagttacctaccatttaaaatttttaattaaatgtgttatttcttaccctcattcctaaataatagccatggaaaaaccattgatgtgctaattttttttcttgaatccacactaaaataactacataaccattaaaatgaaaaatgcattagccaggtgtggtggtgcgtgcctgtagcctcagctactcgggtggcagaggagaagaatcgcttgaacctggaaggcggaggttgcagtgagccgagatttgcaccgctgtactccagcctgggcaacagagggagacttcatctcaaaa

SEQ ID NO: 53431 - DNA, 284 bp, Homo sapiens
ctctgtgaacactgaagatgctctaaaattatctgttgcatgaataaatgaatgaatgaataagtgagtgagtaagatgcttctatacctagagggatcttaaaaattactactacgactgagggacaggttgagctaatccagaaagttactatgagtactttgtccatcatttacgttctaaaattcatcatctgaaaatacttcacaacatgataaaccttcccaccccatcacaaacaagtctccagaatcaggttcagcagtgagtggccgtgtgtaca

SEQ ID NO: 53432 - DNA, 385 bp, Homo sapiens
cttcatttccaatgtggatttctcctgatctcatgaacaatacatccaactgctaaatcagtggctatctccagttgcatgtcccaccataccacagatttcacctatcattctgtcccctgcttctgcttccatctaagccttgctttcattttttcctgcctttggtatcttgtgagatctcaaaccacttaacttggttaaagttttatttttatgtttctttcacactcaatataaattggtacctaaaatctcccctttaactcatggtagatattaaagacatgtgcttgctaatcagtgaatgaacataaatgacaggatgctgctaatatgatgggcttttttaataacctctgattaatatcagaacaaggttcaa

SEQ ID NO: 53433 - DNA, 428 bp, Homo sapiens
aacaaatttgaaacctaaatcttctttataaccttttaacctgtcatttcagagcaagcagtaattttaaggtggttgaaaatatgaatgtgaacacaaagatggggctcacagtgggagactggtccaccatgatagcatatgagaagcccatgtgaccaccatgagcatgtgcaccgaccacaggccataagagatacgactcagccataggctacaaacatttggtttgcttggcatgcacattcctctcttgtaaaatgatgcatgagactctcagagctaaattcattaaaccatctccttttcctctgaatccctgtctattctggccctaggcattttcagccatgctgggagttttgtgttagtctaggctgtgtatttcagcttctggcgagtttgtgagcatgacttagcatccttgt

SEQ ID NO: 53434 - DNA, 457 bp, Homo sapiens
tgttcaggctggtctcgaactcctgacctcgtgatctgcccgccttggcctcccagagtgctgggattacaggcatgagccaccgcgcccggccgatttcaggtaattcttgttcatctcagtgagaactcagaatgggatgttagattgtaagtcttgtgcttggtgaatgggtttgggcaacagctcatggtttgttaatataaaatgtaaaaggcactagttgtgccaggcagatcatcatgtgcttttccatgaaactaagcacattctgttttgttttgaggttaatagactagttgcagttctgaaacataatattttctgaataatgtgattgtgttgctatgcacttatctttgaaaagcccttgtgcaaactgaattctaggatctttgtatataggactgaggccaaagctgaaaagggcaacttttttttttgcagaaaaaccttg

SEQ ID NO: 53435 - DNA, 342 bp, Homo sapiens
ggacagtataaaatacagtttcgctttactgagcaagctatatagggaagccttcataaactgggattacaggcgtgagtcaccgcccacggccgctttatttattttttagaaatgtcttgatggtcgttctaggccatacacagatactgactggggtcttttgaatggtgtagtaaccggtagaaggggctctgctaaaggatgcgtttccactgttagccaggcagtggcgaatgtgtctgggcttatgtgtgaacgtttctgaagcggagagtgctagtgcgagccttgggggtgcgcacatggagagttgagatactccagcggtgccgcctgaaa

SEQ ID NO: 53436 - DNA, 4357 bp, Homo sapiens
agcggagtggccgtccgccgtccgctgctcgttgtttaagcggctgacgggaaggagaagccagagctccagcggcgccgcggggcggcagtcaagaccagagccggagccgtcactcacctctggattagcctgaagcggagactaccggctgcggagcggcggggcgagacacttgctcgccttttgaccccatcatgtcgcggggctccatcgagattcccctccgggacactgacgaggtcattgaacttgacttcgatcagttaccggagggagatgaagttatcagtattctgaaacaggaacacacacaactgcacatatggattgctttggcgctggaatactacaagcaaggaaaaacagaagagtttgtaaaattgttggaagcagcacgtatagatggcaatttggactatagagaccatgaaaaagaccagatgacttgcttggatacattggcagcgtattatgtacaacaggctcggaaagaaaagaataaggacaataaaaaggatcttattacacaggccaccttgttgtatacaatggccgataaaattattatgtatgatcagaaccatttgttgggaagagcctgcttctgcctacttgagggtgacaaaatggatcaagctgatgcacagtttcattttgtactcaatcagtctccaaataatattccagcccttcttggtaaagcttgcatttccttcaacaagaaggattacagaggagctcttgcttactataagaaagcattgcgtactaacccaggatgtccagcggaagttcgtttaggaatgggtcattgctttgtgaaacttaacaaactggaaaaagctcgtctggcattcagcagagccctggaactcaattccaaatgcgtgggagcattggttggactggctgttctagaactcaacaataaagaggctgattccattaaaaatggtgtccagcttctttccagagcctatactattgatcctagcaaccctatggtattgaaccatttggcaaatcactttttcttcaaaaaggattatagtaaagtccagcatctggccctccatgcattccataatacagaagtggaagctatgcaagcagagagctgctatcagctagctagatcattccatgttcaggaagattatgaccaagcttttcagtactattatcaagccacacagtttgcctcatcctcttttgtgctcccattttttggtttgggacaaatgtatatttatcgaggtgacaaagaaaatgcatctcagtgctttgagaaggttttgaaagcttatcctaataattacgaaactatgaaaattctcggctctctctatgctgcctcagaagatcaagaaaaacgagatattgccaagggccatttgaagaaggtcacagaacagtatcccgatgatgttgaagcttggattgaattggcacaaatcttagaacagactgatatacagggtgccctttcagcctatggaacagcaacacgaatccttcaggagaaagtgcaggccgatgttcctccagagattctcaataatgtgggtgccctccattttagacttggaaacctaggggaggctaagaaatattttttggcgtcattggaccgtgcaaaagcagaagcggaacacgatgagcattactataacgccatttccgttaccacgtcatataatctcgccaggctatatgaggcgatgtgtgaattccatgaagcagaaaaactgtataaaaacatcttacgcgaacatcctaattatgttgactgctatttgcgcctaggagccatggctagagataagggaaacttttatgaggcttcagattggtttaaggaagctcttcagattaatcaggatcatccagatgcttggtctttgattggcaatcttcatttggcaaaacaagaatggggtcctgggcagaagaagtttgagaggatattaaaacagccatccacacagagtgatacctattctatgctagcccttggcaacgtgtggctccaaactttacatcagcccacccgagatcgagaaaaggaaaagcgtcatcaagatcgtgctctggccatctacaaacaagtactcagaaatgatgcaaagaatctgtatgctgccaatggcataggagctgttttggcccacaaaggatattttcgtgaagctcgtgatgtatttgcccaagtaagagaagcaacagcagatattagtgatgtgtggctgaacttagcacacatctatgtggagcaaaagcagtacatcagcgccgttcagatgtatgaaaactgcctccgaaagttctataagcaccaaaacactgaagttgtactctatttggcccgggccctcttcaagtgtggcaagttacaggaatgcaaacagactttgctgaaggctagacatgtggcacccagtgatacagttcttatgtttaatgtggccttggtcctgcaaagattagctacctctgtcctgaaagatgaaaaaagtaatctgaaggaagtacttaatgctgtgaaagaactggagcttgcacatagatacttcagttatttgagtaaagtgggagataaaatgagatttgatttggcccttgctgctacagaagccaggcagtgttctgacttactgagccaggcccagtaccatgtggcccgggcacgcaaacaagatgaagaagagcgggagctgcgggccaagcaagagcaagaaaaggagctgttaaggcagaaacttcttaaagaacaggaagagaaacgtctcagagaaaaggaagagcaaaagaaacttttggaacagcgggcccagtatgtggagaagaccaaaaatattcttatgtttactggtgagactgaagcaacaaaagagaagaaaagaggtggtggtggtggacggcgttctaagaagggaggagagtttgatgaatttgtcaatgatgacactgatgatgacctacctatatccaaaaagaagaagagaagaaagggtagtggcagtgaacaagaaggtgaagatgaggagggtggtgagagaaagaagaaaaagaggagaagacatccaaagggagaagaaggatctgatgatgatgaaacagaaaatggccccaaaccaaaaaaacgacgtccaccaaaagcagagaagaaaaaggctcccaagccagaacgtctgcctccatcaatgaagggaaaaataaaatccaaagccataatttcatcaagtgatgactcttcggatgaggataaacttaaaattgctgatgaaggacatcccaggaacagcaacagcaacagtgactcagacgaggacgaacaacgaaagaaatgtgcctcatcagagagtgattccgatgagaaccagaacaagtctggcagcgaggccggcagtccccggaggccacgaagacagcggtcagatcaggactcagacagtgaccagccatccagaaagagaaggccctccggttctgagcagtctgacaatgaatctgtgcagtcagggagaagccactcaggagtttctgagaacgactctcgcccagcttctccaagtgccgaatcagatcacgaatcggagagaggatctgataatgagggttctggccaaggctctggaaatgaatcggaaccagagggatccaacaatgaggcctcagatagaggctcagaacatgggtcagatgatagtgactaggttttatttcatcaataagcttcatctctggaggaaacttttttaatatatgaaagctgtgataaaaatgtttcagatgtttagtcaattgtgaaatttttcttaaggcaattttcttttctatcagtttgtatattactaagccccaagagacatttcctgtgctagagtccaatatttgagtctctcgtgcaaatgagactattctttgtggtacaattccacctatcatatgtgaaaactgcagtaaaaataaacccagatgctaaatcattcctacaaaggtttgactgaaactgtggcagatgtctcatcttctttatatgttaagcagcatactcttctgatttttattgcaatcttttaccaagtggtgcacaaacttggtattgatgtctttattccattttgagtttagattgagaatatttttattttctgaaggcagagatatctactgtataattgcaccaaagtacatttgaaaggaaggttttcaatagtgtaatactgcagcgatgtagataaaatcacaaatgtataatgtgttaggttgaataaggtgtggaaaatgcttttctgttagtagaatgcaaaaacctacctaagccacataataataaaattcttttaccaac

SEQ ID NO: 53437 - DNA, 440 bp, Homo sapiens
tctctctctctctctctctctctctctcctcgtgccgtgaaaactgcagtaaaaataaacccagatgctaaatcattcctacaaaggtttgactgaaactgtggcagatgtctcatcttctttatatgttaagcagcatactcttctgatttttattgcaatcttttaccaagtggtgcacaaacttggtattgatgtctttattccattttgagtttagattgagaatatttttattttctgaaggcagagatatctactgtataattgcaccaaagtacatttgaaaggaaggttttcaatagtgtaatactgcagcgatgtagataaaatcacaaatgtataatgtgttaggttgaataaggtgtggaaaatgcttttctgttagtagaatgcaaaaacctacctaagccacataataataaaattcttttaccaac

SEQ ID NO: 53438 - DNA, 637 bp, Homo sapiens
agcggagtggccgtccgccgtccgctgctcgttgtttaagcggctgacgggaaggagaagccagagctccagcggcgccgcggggcggcagtcaagaccagagccggagccgtcactcacctctggattagcctgaagcggagactaccggctgcggagcggcggggcgagacacttgctcgccttttgaccccatcatgtcgcggggctccatcgagattcccctccgggacactgacgaggtcattgaacttgacttcgatcagttaccggagggagatgaagttatcagtattctgaaacaggaacacacacaactgcacatatggattgctttggcgctggaatactacaagcaaggaaaaacagaagagtttgtaaaattgttggaagcagcacgtatagatggcaatttggactatagagaccatgaaaaagaccagatgacttgcttggatacattggcagcgtattatgtacaacaggctcggaaagaaaagaataaggacaataaaaaggatcttattacacaggccaccttgttgtatacaatggccgataaaattattatgtatgatcaggtaaaaataaagtcaaatttctttccatttatgaagggagaaaagcacatgaaagc

SEQ ID NO: 53439 - DNA, 625 bp, Homo sapiens
ttcagattttttaatttgtataaggaaaatagatgtgctgagttttttaatatagtagttacattcatgtttctctaaacctgaaatgttctaggcagtgttctgacttactgagccaggcccagtaccatgtggcccgggcacgcaaacaagatgaagaagagcgggagctgcgggccaagcaagagcaagaaaaggagctgttaaggcagaaacttcttaaagaacaggtatcttgtattttccagttatactggaattaatgaattgtgtgcatgcatacactttgtatgtttaaaaaaaaaagtcctctgccaggcgtggtggctgacacctctaattccaacactttgggaggatgaggtgggtgaaggcggatcacttgaggtcaggagttcgagaccagcctggccaacatggtggaaccccgtctctactaaaaatacaaaaattagccaggagtggtggcatgcacctgtaatcccagctactcggggagctgaggcaggagaatcacttgaacctgggagggcaaggttgtagtgagccgagattgcaccctgtacttcagtctaggcaacagagtgagacttcatctcaaaagaaaaaaaaaaatcctctgctt

SEQ ID NO: 53440 - DNA, 639 bp, Homo sapiens
  misc_feature (556)..(556): n is a, c, g, or t
  misc_feature (571)..(571): n is a, c, g, or t
  misc_feature (596)..(596): n is a, c, g, or t
  misc_feature (630)..(630): n is a, c, g, or t
agcggagtggccgtccgccgtccgctgctcgttgtttaagcggctgacgggaaggagaagccagagctccagcggcgccgcggggcggcagtcaagaccagagccggagccgtcactcacctctggattagcctgaagcggagactaccggctgcggagcggcggggcgagacacttgctcgccttttgaccccatcatgtcgcggggctccatcgagattcccctccgggacactgacgaggtcattgaacttgacttcgatcagttaccggagggagatgaagttatcagtattctgaaacaggaacacacacaactgcacatatggattgctttggcgctggaatactacaagcaaggaaaaacagaagagtttgtaaaattgttggaagcagcacgtatagatggcaatttggactatagagaccatgaaaaagaccagatgacttgcttggatacattggcagcgtattatgtacaacaggctcggaaagaaaaggaaattaaagggaccaatttaaaaaagggaatcttttatttaccaccagggccccncccctttggtttggngattaccaaatggggccccgatttnaaaaatttaatttaattggtattggaattcaagnaaaacccca

SEQ ID NO: 53441 - DNA, 261 bp, Homo sapiens
ttttgtcccccagccaagctctaaagcacatgtagccgctgagacctgctgtatccggtggatcaggagtttgagaccagcctagccaacatggtgaaaccctttctttacgaaggttttcaatagtgtaatactgcagcgatgtagataaaatcacaaatgtataatgtgttaggttgaataaggtgtggaaaatgcttttctgttagtagaatgcaaaaacctacctaagccacataataataaaattcttttaccaac

SEQ ID NO: 53442 - DNA, 4320 bp, Homo sapiens
agcggagtggccgtccgccgtccgctgctcgttgtttaagcggctgacgggaaggagaagccagagctccagcggcgccgcggggcggcagtcaagaccagagccggagccgtcactcacctctggattagcctgaagcggagactaccggctgcggagcggcggggcgagacacttgctcgccttttgaccccatcatgtcgcggggctccatcgagattcccctccgggacactgacgaggtcattgaacttgacttcgatcagttaccggagggagatgaagttatcagtattctgaaacaggaacacacacaactgcacatatggattgctttggcgctggaatactacaagcaaggaaaaacagaagagtttgtaaaattgttggaagcagcacgtatagatggcaatttggactatagagaccatgaaaaagaccagatgacttgcttggatacattggcagcgtattatgtacaacaggctcggaaagaaaagaataaggacaataaaaaggatcttattacacaggccaccttgttgtatacaatggccgataaaattattatgtatgatcagaaccatttgttgggaagagcctgcttctgcctacttgagggtgacaaaatggatcaagctgatgcacagtttcattttgtactcaatcagtctccaaataatattccagcccttcttggtaaagcttgcatttccttcaacaagaaggattacagaggagctcttgcttactataagaaagcattgcgtactaacccaggatgtccagcggaagttcgtttaggaatgggtcattgctttgtgaaacttaacaaactggaaaaagctcgtctggcattcagcagagccctggaactcaattccaaatgcgtgggagcattggttggactggctgttctagaactcaacaataaagaggctgattccattaaaaatggtgtccagcttctttccagagcctatactattgatcctagcaaccctatggtattgaaccatttggcaaatcactttttcttcaaaaaggattatagtaaagtccagcatctggccctccatgcattccataatacagaagtggaagctatgcaagcagagagctgctatcagctagctagatcattccatgttcaggaagattatgaccaagcttttcagtactattatcaagccacacagtttgcctcatcctcttttgtgctcccattttttggtttgggacaaatgtatatttatcgaggtgacaaagaaaatgcatctcagtgctttgagaaggttttgaaagcttatcctaataattacgaaactatgaaaattctcggctctctctatgctgcctcagaagatcaagaaaaacgagatattgccaagggccatttgaagaaggtcacagaacagtatcccgatgatgttgaagcttggattgaattggcacaaatcttagaacagactgatatacagggtgccctttcagcctatggaacagcaacacgaatccttcaggagaaagtgcaggccgatgttcctccagagattctcaataatgtgggtgccctccattttagacttggaaacctaggggaggctaagaaatattttttggcgtcattggaccgtgcaaaagcagaagcggaacacgatgagcattactataacgccatttccgttaccacgtcatataatctcgccaggctatatgaggcgatgtgtgaattccatgaagcagaaaaactgtataaaaacatcttacgcgaacatcctaattatgttgactgctatttgcgcctaggagccatggctagagataagggaaacttttatgaggcttcagattggtttaaggaagctcttcagattaatcaggatcatccagatgcttggtctttgattggcaatcttcatttggcaaaacaagaatggggtcctgggcagaagaagtttgagaggatattaaaacagccatccacacagagtgatacctattctatgctagcccttggcaacgtgtggctccaaactttacatcagcccacccgagatcgagaaaaggaaaagcgtcatcaagatcgtgctctggccatctacaaacaagtactcagaaatgatgcaaagaatctgtatgctgccaatggcataggagctgttttggcccacaaaggatattttcgtgaagctcgtgatgtatttgcccaagtaagagaagcaacagcagatattagtgatgtgtggctgaacttagcacacatctatgtggagcaaaagcagtacatcagcgccgttcagatgtatgaaaactgcctccgaaagttctataagcaccaaaacactgaagttgtactctatttggcccgggccctcttcaagtgtggcaagttacaggaatgcaaacagactttgctgaaggctagacatgtggcacccagtgatacagttcttatgtttaatgtggccttggtcctgcaaagattagctacctctgtcctgaaagatgaaaaaagtaatctgaaggaagtacttaatgctgtgaaagaactggagcttgcacatagatacttcagttatttgagtaaagtgggagataaaatgagatttgatttggcccttgctgctacagaagccaggcagtgttctgacttactgagccaggcccagtaccatgtggcccgggcacgcaaacaagatgaagaagagcgggagctgcgggccaagcaagagcaagaaaaggagctgttaaggcagaaacttcttaaagaacaggaagagaaacgtctcagagaaaaggaagagcaaaagaaacttttggaacagcgggcccagtatgtggagaagaccaaaaatattcttatgtttactggtgagactgaagcaacaaaagagaagaaaagaggtggtggtggtggacggcgttctaagaagggaggagagtttgatgaatttgtcaatgatgacactgatgatgacctacctatatccaaaaagaagaagagaagaaagggtagtggcagtgaacaagaaggtgaagatgaggagggtggtgagagaaagaagaaaaagaggagaagacatccaaagggagaagaaggatctgatgatgatgaaacagaaaatggccccaaaccaaaaaaacgacgtccaccaaaagcagagaagaaaaaggctcccaagccagaacgtctgcctccatcaatgaagggaaaaataaaatccaaagccataatttcatcaagtgatgactcttcggatgaggataaacttaaaattgctgatgaagggaggacgaacaacgaaagaaatgtgcctcatcagagagtgattccgatgagaaccagaacaagtctggcagcgaggccggcagtccccggaggccacgaagacagcggtcagatcaggactcagacagtgaccagccatccagaaagagaaggccctccggttctgagcagtctgacaatgaatctgtgcagtcagggagaagccactcaggagtttctgagaacgactctcgcccagcttctccaagtgccgaatcagatcacgaatcggagagaggatctgataatgagggttctggccaaggctctggaaatgaatcggaaccagagggatccaacaatgaggcctcagatagaggctcagaacatgggtcagatgatagtgactaggttttatttcatcaataagcttcatctctggaggaaacttttttaatatatgaaagctgtgataaaaatgtttcagatgtttagtcaattgtgaaatttttcttaaggcaattttcttttctatcagtttgtatattactaagccccaagagacatttcctgtgctagagtccaatatttgagtctctcgtgcaaatgagactattctttgtggtacaattccacctatcatatgtgaaaactgcagtaaaaataaacccagatgctaaatcattcctacaaaggtttgactgaaactgtggcagatgtctcatcttctttatatgttaagcagcatactcttctgatttttattgcaatcttttaccaagtggtgcacaaacttggtattgatgtctttattccattttgagtttagattgagaatatttttattttctgaaggcagagatatctactgtataattgcaccaaagtacatttgaaaggaaggttttcaatagtgtaatactgcagcgatgtagataaaatcacaaatgtataatgtgttaggttgaataaggtgtggaaaatgcttttctgttagtagaatgcaaaaacctacctaagccacataataataaaattcttttaccaac

SEQ ID NO: 53443 - DNA, 3715 bp, Homo sapiens
agcggagtggccgtccgccgtccgctgctcgttgtttaagcggctgacgggaaggagaagccagagctccagcggcgccgcggggcggcagtcaagaccagagccggagccgtcactcacctctggattagcctgaagcggagactaccggctgcggagcggcggggcgagacacttgctcgccttttgaccccatcatgtcgcggggctccatcgagattcccctccgggacactgacgaggtcattgaacttgacttcgatcagttaccggagggagatgaagttatcagtattctgaaacaggaacacacacaactgcacatatggattgctttggcgctggaatactacaagcaaggaaaaacagaagagtttgtaaaattgttggaagcagcacgtatagatggcaatttggactatagagaccatgaaaaagaccagatgacttgcttggatacattggcagcgtattatgtacaacaggctcggaaagaaaagaataaggacaataaaaaggatcttattacacaggccaccttgttgtatacaatggccgataaaattattatgtatgatcagaaccatttgttgggaagagcctgcttctgcctacttgagggtgacaaaatggatcaagctgatgcacagtttcattttgtactcaatcagtctccaaataatattccagcccttcttggtaaagcttgcatttccttcaacaagaaggattacagaggagctcttgcttactataagaaagcattgcgtactaacccaggatgtccagcggaagttcgtttaggaatgggtcattgctttgtgaaacttaacaaactggaaaaagctcgtctggcattcagcagagccctggaactcaattccaaatgcgtgggagcattggttggactggctgttctagaactcaacaataaagaggctgattccattaaaaatggtgtccagcttctttccagagcctatactattgatcctagcaaccctatggtattgaaccatttggcaaatcactttttcttcaaaaaggattatagtaaagtccagcatctggccctccatgcattccataatacagaagtggaagctatgcaagcagagagctgctatcagctagctagatcattccatgttcaggaagattatgaccaagcttttcagtactattatcaagccacacagtttgcctcatcctcttttgtgctcccattttttggtttgggacaaatgtatatttatcgaggtgacaaagaaaatgcatctcagtgctttgagaaggttttgaaagcttatcctaataattacgaaactatgaaaattctcggctctctctatgctgcctcagaagatcaagaaaaacgagatattgccaagggccatttgaagaaggtcacagaacagtatcccgatgatgttgaagcttggattgaattggcacaaatcttagaacagactgatatacagggtgccctttcagcctatggaacagcaacacgaatccttcaggagaaagtgcaggccgatgttcctccagagattctcaataatgtgggtgccctccattttagacttggaaacctaggggaggctaagaaatattttttggcgtcattggaccgtgcaaaagcagaagcggaacacgatgagcattactataacgccatttccgttaccacgtcatataatctcgccaggctatatgaggcgatgtgtgaattccatgaagcagaaaaactgtataaaaacatcttacgcgaacatcctaattatgttgactgctatttgcgcctaggagccatggctagagataagggaaacttttatgaggcttcagattggtttaaggaagctcttcagattaatcaggatcatccagatgcttggtctttgattggcaatcttcatttggcaaaacaagaatggggtcctgggcagaagaagtttgagaggatattaaaacagccatccacacagagtgatacctattctatgctagcccttggcaacgtgtggctccaaactttacatcagcccacccgagatcgagaaaaggaaaagcgtcatcaagatcgtgctctggccatctacaaacaagtactcagaaatgatgcaaagaatgaagagaaacgtctcagagaaaaggaagagcaaaagaaacttttggaacagcgggcccagtatgtggagaagaccaaaaatattcttatgtttactggtgagactgaagcaacaaaagagaagaaaagaggtggtggtggtggacggcgttctaagaagggaggagagtttgatgaatttgtcaatgatgacactgatgatgacctacctatatccaaaaagaagaagagaagaaagggtagtggcagtgaacaagaaggtgaagatgaggagggtggtgagagaaagaagaaaaagaggagaagacatccaaagggagaagaaggatctgatgatgatgaaacagaaaatggccccaaaccaaaaaaacgacgtccaccaaaagcagagaagaaaaaggctcccaagccagaacgtctgcctccatcaatgaagggaaaaataaaatccaaagccataatttcatcaagtgatgactcttcggatgaggataaacttaaaattgctgatgaaggacatcccaggaacagcaacagcaacagtgactcagacgaggacgaacaacgaaagaaatgtgcctcatcagagagtgattccgatgagaaccagaacaagtctggcagcgaggccggcagtccccggaggccacgaagacagcggtcagatcaggactcagacagtgaccagccatccagaaagagaaggccctccggttctgagcagtctgacaatgaatctgtgcagtcagggagaagccactcaggagtttctgagaacgactctcgcccagcttctccaagtgccgaatcagatcacgaatcggagagaggatctgataatgagggttctggccaaggctctggaaatgaatcggaaccagagggatccaacaatgaggcctcagatagaggctcagaacatgggtcagatgatagtgactaggttttatttcatcaataagcttcatctctggaggaaacttttttaatatatgaaagctgtgataaaaatgtttcagatgtttagtcaattgtgaaatttttcttaaggcaattttcttttctatcagtttgtatattactaagccccaagagacatttcctgtgctagagtccaatatttgagtctctcgtgcaaatgagactattctttgtggtacaattccacctatcatatgtgaaaactgcagtaaaaataaacccagatgctaaatcattcctacaaaggtttgactgaaactgtggcagatgtctcatcttctttatatgttaagcagcatactcttctgatttttattgcaatcttttaccaagtggtgcacaaacttggtattgatgtctttattccattttgagtttagattgagaatatttttattttctgaaggcagagatatctactgtataattgcaccaaagtacatttgaaaggaaggttttcaatagtgtaatactgcagcgatgtagataaaatcacaaatgtataatgtgttaggttgaataaggtgtggaaaatgcttttctgttagtagaatgcaaaaacctacctaagccacataataataaaattcttttaccaac

SEQ ID NO: 53444 - DNA, 2340 bp, Homo sapiens
cctcaccagactgcccctggcagaagcaggaagcacccgagatcgagaaaaggaaaagcgtcatcaagatcgtgctctggccatctacaaacaagtactcagaaatgatgcaaagaatctgtatgctgccaatggcataggagctgttttggcccacaaaggatattttcgtgaagctcgtgatgtatttgcccaagtaagagaagcaacagcagatattagtgatgtgtggctgaacttagcacacatctatgtggagcaaaagcagtacatcagcgccgttcagatgtatgaaaactgcctccgaaagttctataagcaccaaaacactgaagttgtactctatttggcccgggccctcttcaagtgtggcaagttacaggaatgcaaacagactttgctgaaggctagacatgtggcacccagtgatacagttcttatgtttaatgtggccttggtcctgcaaagattagctacctctgtcctgaaagatgaaaaaagtaatctgaaggaagtacttaatgctgtgaaagaactggagcttgcacatagatacttcagttatttgagtaaagtgggagataaaatgagatttgatttggcccttgctgctacagaagccaggcagtgttctgacttactgagccaggcccagtaccatgtggcccgggcacgcaaacaagatgaagaagagcgggagctgcgggccaagcaagagcaagaaaaggagctgttaaggcagaaacttcttaaagaacaggaagagaaacgtctcagagaaaaggaagagcaaaagaaacttttggaacagcgggcccagtatgtggagaagaccaaaaatattcttatgtttactggtgagactgaagcaacaaaagagaagaaaagaggtggtggtggtggacggcgttctaagaagggaggagagtttgatgaatttgtcaatgatgacactgatgatgacctacctatatccaaaaagaagaagagaagaaagggtagtggcagtgaacaagaaggtgaagatgaggagggtggtgagagaaagaagaaaaagaggagaagacatccaaagggagaagaaggatctgatgatgatgaaacagaaaatggccccaaaccaaaaaaacgacgtccaccaaaagcagagaagaaaaaggctcccaagccagaacgtctgcctccatcaatgaagggaaaaataaaatccaaagccataatttcatcaagtgatgactcttcggatgaggataaacttaaaattgctgatgaaggacatcccaggaacagcaacagcaacagtgactcagacgaggacgaacaacgaaagaaatgtgcctcatcagagagtgattccgatgagaaccagaacaagtctggcagcgaggccggcagtccccggaggccacgaagacagcggtcagatcaggactcagacagtgaccagccatccagaaagagaaggccctccggttctgagcagtctgacaatgaatctgtgcagtcagggagaagccactcaggagtttctgagaacgactctcgcccagcttctccaagtgccgaatcagatcacgaatcggagagaggatctgataatgagggttctggccaaggctctggaaatgaatcggaaccagagggatccaacaatgaggcctcagatagaggctcagaacatgggtcagatgatagtgactaggttttatttcatcaataagcttcatctctggaggaaacttttttaatatatgaaagctgtgataaaaatgtttcagatgtttagtcaattgtgaaatttttcttaaggcaattttcttttctatcagtttgtatattactaagccccaagagacatttcctgtgctagagtccaatatttgagtctctcgtgcaaatgagactattctttgtggtacaattccacctatcatatgtgaaaactgcagtaaaaataaacccagatgctaaatcattcctacaaaggtttgactgaaactgtggcagatgtctcatcttctttatatgttaagcagcatactcttctgatttttattgcaatcttttaccaagtggtgcacaaacttggtattgatgtctttattccattttgagtttagattgagaatatttttattttctgaaggcagagatatctactgtataattgcaccaaagtacatttgaaaggaaggttttcaatagtgtaatactgcagcgatgtagataaaatcacaaatgtataatgtgttaggttgaataaggtgtggaaaatgcttttctgttagtagaatgcaaaaacctacctaagccacataataataaaattcttttaccaac

SEQ ID NO: 53445 - DNA, 4427 bp, Homo sapiens
  misc_feature (4409)..(4409): n is a, c, g, or t
  misc_feature (4414)..(4414): n is a, c, g, or t
  misc_feature (4421)..(4421): n is a, c, g, or t
agcggagtggccgtccgccgtccgctgctcgttgtttaagcggctgacgggaaggagaagccagagctccagcggcgccgcggggcggcagtcaagaccagagccggagccgtcactcacctctggattagcctgaagcggagactaccggctgcggagcggcggggcgagacacttgctcgccttttgaccccatcatgtcgcggggctccatcgagattcccctccgggacactgacgaggtcattgaacttgacttcgatcagttaccggagggagatgaagttatcagtattctgaaacaggaacacacacaactgcacatatggattgctttggcgctggaatactacaagcaaggaaaaacagaagagtttgtaaaattgttggaagcagcacgtatagatggcaatttggactatagagaccatgaaaaagaccagatgacttgcttggatacattggcagcgtattatgtacaacaggctcggaaagaaaagaataaggacaataaaaaggatcttattacacaggccaccttgttgtatacaatggccgataaaattattatgtatgatcagaaccatttgttgggaagagcctgcttctgcctacttgagggtgacaaaatggatcaagctgatgcacagtttcattttgtactcaatcagtctccaaataatattccagcccttcttggtaaagcttgcatttccttcaacaagaaggattacagaggagctcttgcttactataagaaagcattgcgtactaacccaggatgtccagcggaagttcgtttaggaatgggtcattgctttgtgaaacttaacaaactggaaaaagctcgtctggcattcagcagagccctggaactcaattccaaatgcgtgggagcattggttggactggctgttctagaactcaacaataaagaggctgattccattaaaaatggtgtccagcttctttccagagcctatactattgatcctagcaaccctatggtattgaaccatttggcaaatcactttttcttcaaaaaggattatagtaaagtccagcatctggccctccatgcattccataatacagaagtggaagctatgcaagcagagagctgctatcagctagctagatcattccatgttcaggaagattatgaccaagcttttcagtactattatcaagccacacagtttgcctcatcctcttttgtgctcccattttttggtttgggacaaatgtatatttatcgaggtgacaaagaaaatgcatctcagtgctttgagaaggttttgaaagcttatcctaataattacgaaactatgaaaattctcggctctctctatgctgcctcagaagatcaagaaaaacgagatattgccaagggccatttgaagaaggtcacagaacagtatcccgatgatgttgaagcttggattgaattggcacaaatcttagaacagactgatatacagggtgccctttcagcctatggaacagcaacacgaatccttcaggagaaagtgcaggccgatgttcctccagagattctcaataatgtgggtgccctccattttagacttggaaacctaggggaggctaagaaatattttttggcgtcattggaccgtgcaaaagcagaagcggaacacgatgagcattactataacgccatttccgttaccacgtcatataatctcgccaggctatatgaggcgatgtgtgaattccatgaagcagaaaaactgtataaaaacatcttacgcgaacatcctaattatgttgactgctatttgcgcctaggagccatggctagagataagggaaacttttatgaggcttcagattggtttaaggaagctcttcagattaatcaggatcatccagatgcttggtctttgattggcaatcttcatttggcaaaacaagaatggggtcctgggcagaagaagtttgagaggatattaaaacagccatccacacagagtgatacctattctatgctagcccttggcaacgtgtggctccaaactttacatcagcccacccgagatcgagaaaaggaaaagcgtcatcaagatcgtgctctggccatctacaaacaagtactcagaaatgatgcaaagaatctgtatgctgccaatggcataggagctgttttggcccacaaaggatattttcgtgaagctcgtgatgtatttgcccaagtaagagaagcaacagcagatattagtgatgtgtggctgaacttagcacacatctatgtggagcaaaagcagtacatcagcgccgttcagatgtatgaaaactgcctccgaaagttctataagcaccaaaacactgaagttgtactctatttggcccgggccctcttcaagtgtggcaagttacaggaatgcaaacagactttgctgaaggctagacatgtggcacccagtgatacagttcttatgtttaatgtggccttggtcctgcaaagattagctacctctgtcctgaaagatgaaaaaagtaatctgaaggaagtacttaatgctgtgaaagaactggagcttgcacatagatacttcagttatttgagtaaagtgggagataaaatgagatttgatttggcccttgctgctacagaagccaggcagtgttctgacttactgagccaggcccagtaccatgtggcccgggcacgcaaacaagatgaagaagagcgggagctgcgggccaagcaagagcaagaaaaggagctgttaaggcagaaacttcttaaagaacaggaagagaaacgtctcagagaaaaggaagagcaaaagaaacttttggaacagcgggcccagtatgtggagaagaccaaaaatattcttatgtttactggtgagactgaagcaacaaaagagaagaaaagaggtggtggtggtggacggcgttctaagaagggaggagagtttgatgaatttgtcaatgatgacactgatgatgacctacctatatccaaaaagaagaagagaagaaagggtagtggcagtgaacaagaaggtgaagatgaggagggtggtgagagaaagaagaaaaagaggagaagacatccaaagggagaagaaggatctgatgatgatgaaacagaaaatggccccaaaccaaaaaaacgacgtccaccaaaagcagagaagaaaaaggctcccaagccagaacgtctgcctccatcaatgaagggaaaaataaaatccaaagccataatttcatcaagtgatgactcttcggatgaggataaacttaaaattgctgatgaaggacatcccaggaacagcaacagcaacagtgactcagacgaggacgaacaacgaaagaaatgtgcctcatcagagagtgattccgatgagaaccagaacaagtctggcagcgaggccggcagtccccggaggccacgaagacagcggtcagatcaggactcagacagtgaccagccatccagaaagagaaggccctccggttctgagcagtctgacaatgaatctgtgcagtcagggagaagccactcaggagtttctgagaacgactctcgcccagcttctccaagtgccgaatcagatcacgaatcggagagaggatctgataatgagggttctggccaaggctctggaaatgaatcggaaccagagggatccaacaatgaggcctcagatagaggctcagaacatgggtcagatgatagtgactaggttttatttcatcaataagcttcatctctggaggaaacttttttaatatatgaaagctgtgataaaaatgtttcagatgtttagtcaattgtgaaatttttcttaaggcaattttcttttctatcagtttgtatattactaagccccaagagacatttcctgtgctagagtccaatatttgagtctctcgtgcaaatgagactattctttgtggtacaattccacctatcatatgtgaaaactgcagtaaaaataaacccagatgctaaatcattcctacaaaggtttgactgaaactgtggcagatgtctcatcttctttatatgttaagcagcatactcttctgatttttattgcaatcttttaccaagtggtgcacaaacttggtattgatgtctttattccattttgagtttagattgagaatatttttattttctgaaggcagagatatctactgtataattgcaccaaagtacatttgaaaggaaggttttcaatagtgtaatactgcagcgatgtagataaaatcacaaatgtataatgtgttaggttgaataaggtgtggaaaatgcttttctgttagtagaatgcaaaaacctacctaagccacataataataaaattcttttaccaacgcctttaaaaaaaaaaaaaaaaaaaaaaaaaaaaaaaaaaaaaagaaaaaanaaaanaaaaaanaaaaag

SEQ ID NO: 53446 - DNA, 4497 bp, Homo sapiens
agcggagtggccgtccgccgtccgctgctcgttgtttaagcggctgacgggaaggagaagccagagctccagcggcgccgcggggcggcagtcaagaccagagccggagccgtcactcacctctggattagcctgaagcggagactaccggctgcggagcggcggggcgagacacttgctcgccttttgaccccatcatgtcgcggggctccatcgagattcccctccgggacactgacgaggtcattgaacttgacttcgatcagttaccggagggagatgaagttatcagtattctgaaacaggaacacacacaactgcacatatggattgctttggcgctggaatactacaagcaaggaaaaacagaagagtttgtaaaattgttggaagcagcacgtatagatggcaatttggactatagagaccatgaaaaagaccagatgacttgcttggatacattggcagcgtattatgtacaacaggctcggaaagaaaagaataaggacaataaaaaggatcttattacacaggccaccttgttgtatacaatggccgataaaattattatgtatgatcagaaccatttgttgggaagagcctgcttctgcctacttgagggtgacaaaatggatcaagctgatgcacagtttcattttgtactcaatcagtctccaaataatattccagcccttcttggtaaagcttgcatttccttcaacaagaaggattacagaggagctcttgcttactataagaaagcattgcgtactaacccaggatgtccagcggaagttcgtttaggaatgggtcattgctttgtgaaacttaacaaactggaaaaagctcgtctggcattcagcagagccctggaactcaattccaaatgcgtgggagcattggttggactggctgttctagaactcaacaataaagaggctgattccattaaaaatggtgtccagcttctttccagagcctatactattgatcctagcaaccctatggtattgaaccatttggcaaatcactttttcttcaaaaaggattatagtaaagtccagcatctggccctccatgcattccataatacagaagtggaagctatgcaagcagagagctgctatcagctagctagatcattccatgttcaggaagattatgaccaagcttttcagtactattatcaagccacacagtttgcctcatcctcttttgtgctcccattttttggtttgggacaaatgtatatttatcgaggtgacaaagaaaatgcatctcagtgctttgagaaggttttgaaagcttatcctaataattacgaaactatgaaaattctcggctctctctatgctgcctcagaagatcaagaaaaacgagatattgccaagggccatttgaagaaggtcacagaacagtatcccgatgatgttgaagcttggattgaattggcacaaatcttagaacagactgatatacagggtgccctttcagcctatggaacagcaacacgaatccttcaggagaaagtgcaggccgatgttcctccagagattctcaataatgtgggtgccctccattttagacttggaaacctaggggaggctaagaaatattttttggcgtcattggaccgtgcaaaagcagaagcggaacacgatgagcattactataacgccatttccgttaccacgtcatataatctcgccaggctatatgaggcgatgtgtgaattccatgaagcagaaaaactgtataaaaacatcttacgcgaacatcctaattatgttgactgctatttgcgcctaggagccatggctagagataagggaaacttttatgaggcttcagattggtttaaggaagctcttcagattaatcaggatcatccagatgcttggtctttgattggcaatcttcatttggcaaaacaagaatggggtcctgggcagaagaagtttgagaggatattaaaacagccatccacacagagtgatacctattctatgctagcccttggcaacgtgtggctccaaactttacatcagcccacccgagatcgagaaaaggaaaagcgtcatcaagatcgtgctctggccatctacaaacaagtactcagaaatgatgcaaagaatctgtatgctgccaatggcataggagctgttttggcccacaaaggatattttcgtgaagctcgtgatgtatttgcccaagtaagagaagcaacagcagatattagtgatgtgtggctgaacttagcacacatctatgtggagcaaaagcagtacatcagcgccgttcagatgtatgaaaactgcctccgaaagttctataagcaccaaaacactgaagttgtactctatttggcccgggccctcttcaagtgtggcaagttacaggaatgcaaacagactttgctgaaggctagacatgtggcacccagtgatacagttcttatgtttaatgtggccttggtcctgcaaagattagctacctctgtcctgaaagatgaaaaaagtaatctgaaggaagtacttaatgctgtgaaagaactggagcttgcacatagatacttcagttatttgagtaaagtgggagataaaatgagatttgatttggcccttgctgctacagaagccaggcagtgttctgacttactgagccaggcccagtaccatgtggcccgggcacgcaaacaagatgaagaagagcgggagctgcgggccaagcaagagcaagaaaaggagctgttaaggcagaaacttcttaaagaacaggaagagaaacgtctcagagaaaaggaagagcaaaagaaacttttggaacagcgggcccagtatgtggagaagaccaaaaatattcttatgtttactggtgagactgaagcaacaaaagagaagaaaagaggtggtggtggtggacggcgttctaagaagggaggagagtttgatgaatttgtcaatgatgacactgatgatgacctacctatatccaaaaagaagaagagaagaaagggtagtggcagtgaacaagaaggtgaagatgaggagggtggtgagagaaagaagaaaaagaggagaagacatccaaagggagaagaaggatctgatgatgatgaaacagaaaatggccccaaaccaaaaaaacgacgtccaccaaaagcagagaagaaaaaggctcccaagccagaacgtctgcctccatcaatgaagggaaaaataaaatccaaagccataatttcatcaagtgatgactcttcggatgaggataaacttaaaattgctgatgaaggacatcccaggaacagcaacagcaacagtgactcagacgaggacgaacaacgaaagaaatgtgcctcatcagagagtgattccgatgagaaccagaacaagtctggcagcgaggccggcagtccccggaggccacgaagacagcggtcagatcaggactcagacagtgaccagccatccagaaagagaaggccctccggttctgagcagtctgacaatgaatctgtgcagtcagggagaagccactcaggagtttctgagaacgactctcgcccagcttctccaagtgccgaatcagatcacgaatcggagagaggatctgataatgagggttctggccaaggctctggaaatgaatcggaaccagagggatccaacaatgaggcctcagatagaggctcagaacatgggtcagatgatagtgactaggttttatttcatcaataagcttcatctctggaggaaacttttttaatatatgaaagctgtgataaaaatgtttcagatgtttagtcaattgtgaaatttttcttaaggcaattttcttttctatcagtttgtatattactaagccccaagagacatttcctgtgctagagtccaatatttgagtctctcgtgcaaatgagactattctttgtggtacaattccacctatcatatgtgaaaactgcagtaaaaataaacccagatgctaaatcattcctacaaaggtttgactgaaactgtggcagatgtctcatcttctttatatgttaagcagcatactcttctgatttttattgcaatcttttaccaagtggtgcacaaacttggtattgatgtctttattccattttgagtttagattgagaatatttttattttctgaaggcagagatatctactgtataattgcaccaaagtacatttgaaaggaaggttttcaatagtgtaatactgcagcgatgtagataaaatcacaaatgtataatgtgttaggttgaataaggtgtggaaaatgcttttctgttagtagaatgcaaaaacctacctaagccacataataataaaattcttttaccaacaaaaaaaaaaaacaggggggcgtctaaatttccacagggccacaaatcagacgagcagaatttttgcacaagggccacagagaacacataaaaaaagcacgaccgcaaaaagcaatgggacaagccatgccttggacgac

SEQ ID NO: 53447 - DNA, 4148 bp, Homo sapiens
agcggagtggccgtccgccgtccgctgctcgttgtttaagcggctgacgggaaggagaagccagagctccagcggcgccgcggggcggcagtcaagaccagagccggagccgtcactcacctctggattagcctgaagcggagactaccggctgcggagcggcggggcgagacacttgctcgccttttgaccccatcatgtcgcggggctccatcgagattcccctccgggacactgacgaggtcattgaacttgacttcgatcagttaccggagggagatgaagttatcagtattctgaaacaggaacacacacaactgcacatatggattgctttggcgctggaatactacaagcaaggaaaaacagaagagtttgtaaaattgttggaagcagcacgtatagatggcaatttggactatagagaccatgaaaaagaccagatgacttgcttggatacattggcagcgtattatgtacaacaggctcggaaagaaaagaataaggacaataaaaaggatcttattacacaggccaccttgttgtatacaatggccgataaaattattatgtatgatcagaaccatttgttgggaagagcctgcttctgcctacttgagggtgacaaaatggatcaagctgatgcacagtttcattttgtactcaatcagtctccaaataatattccagcccttcttggtaaagcttgcatttccttcaacaagaaggattacagaggagctcttgcttactataagaaagcattgcgtactaacccaggatgtccagcggaagttcgtttaggaatgggtcattgctttgtgaaacttaacaaactggaaaaagctcgtctggcattcagcagagccctggaactcaattccaaatgcgtgggagcattggttggactggctgttctagaactcaacaataaagaggctgattccattaaaaatggtgtccagcttctttccagagcctatactattgatcctagcaaccctatggtattgaaccatttggcaaatcactttttcttcaaaaaggattatagtaaagtccagcatctggccctccatgcattccataatacagaagtggaagctatgcaagcagagagctgctatcagctagctagatcattccatgttcaggaagattatgaccaagcttttcagtactattatcaagccacacagtttgcctcatcctcttttgtgctcccattttttggtttgggacaaatgtatatttatcgaggtgacaaagaaaatgcatctcagtgctttgagaaggttttgaaagcttatcctaataattacgaaactatgaaaattctcggctctctctatgctgcctcagaagatcaagaaaaacgagatattgccaagggccatttgaagaaggtcacagaacagtatcccgatgatgttgaagcttggattgaattggcacaaatcttagaacagactgatatacagggtgccctttcagcctatggaacagcaacacgaatccttcaggagaaagtgcaggccgatgttcctccagagattctcaataatgtgggtgccctccattttagacttggaaacctaggggaggctaagaaatattttttggcgtcattggaccgtgcaaaagcagaagcggaacacgatgagcattactataacgccatttccgttaccacgtcatataatctcgccaggctatatgaggcgatgtgtgaattccatgaagcagaaaaactgtataaaaacatcttacgcgaacatcctaattatgttgactgctatttgcgcctaggagccatggctagagataagggaaacttttatgaggcttcagattggtttaaggaagctcttcagattaatcaggatcatccagatgcttggtctttgattggcaatcttcatttggcaaaacaagaatggggtcctgggcagaagaagtttgagaggatattaaaacagccatccacacagagtgatacctattctatgctagcccttggcaacgtgtggctccaaactttacatcagcccacccgagatcgagaaaaggaaaagcgtcatcaagatcgtgctctggccatctacaaacaagtactcagaaatgatgcaaagaatctgtatgctgccaatggcataggagctgttttggcccacaaaggatattttcgtgaagctcgtgatgtatttgcccaagtaagagaagcaacagcagatattagtgatgtgtggctgaacttagcacacatctatgtggagcaaaagcagtacatcagcgccgttcagatgtatgaaaactgcctccgaaagttctataagcaccaaaacactgaagttgtactctatttggcccgggccctcttcaagtgtggcaagttacaggaatgcaaacagactttgctgaaggctagacatgtggcacccagtgatacagttcttatgtttaatgtggccttggtcctgcaaagattagctacctctgtcctgaaagatgaaaaaagtaatctgaaggaagtacttaatgctgtgaaagaactggagcttgcacatagatacttcagttatttgagtaaagtgggagataaaatgagatttgatttggcccttgctgctacagaagccaggcagtgttctgacttactgagccaggcccagtaccatgtggcccgggcacgcaaacaagatgaagaagagcgggagctgcgggccaagcaagagcaagaaaaggagctgttaaggcagaaacttcttaaagaacaggaagagaaacgtctcagagaaaaggaagagcaaaagaaacttttggaacagcgggcccagtatgtggagaagaccaaaaatattcttatgtttactggtgagactgaagcaacaaaagagaagaaaagaggtggtggtggtggacggcgttctaagaagggaggagagtttgatgaatttgtcaatgatgacactgatgatgacctacctatatccaaaaagaagaagagaagaaagggtagtggcagtgaacaagaaggtgaagatgaggagggtggtgagagaaagaagaaaaagaggagaagacatccaaagggagaagaaggatctgatgatgatgaaacagaaaatggccccaaaccaaaaaaacgacgtccaccaaaagcagagaagaaaaaggctcccaagccagaacgtctgcctccatcaatgaagggaaaaataaaatccaaagccataatttcatcaagtgatgactcttcggatgaggataaacttaaaattgctgatgaaggacatcccaggaacagcaacagcaacagtgactcagacgaggacgaacaacgaaagaaatgtgcctcatcagagagtgattccgatgagaaccagaacaagtctggcagcgaggccggcagtccccggaggccacgaagacagcggtcagatcaggactcagacagtgaccagccatccagaaagagaaggccctccggttctgagcagtctgacaatgaatctgtgcagtcagggagaagccactcaggagtttctgagaacgactctcgcccagcttctccaagtgccgaatcagatcacgaatcggagagaggatctgataatgagggttctggccaaggctctggaaatgaatcggaaccagagggatccaacaatgaggcctcagatagaggctcagaacatgggtcagatgatagtgactaggttttatttcatcaataagcttcatctctggaggaaacttttttaatatatgaaagctgtgataaaaatgtttcagatgtttagtcaattgtgaaatttttcttaaggcaattttcttttctatcagtttgtatattactaagccccaagagacatttcctgtgctagagtccaatatttgagtctctcgtgcaaatgagactattctttgtggtacaattccacctatcatatgtgaaaactgcagtaaaaataattgcaccaaagtacatttgaaaggaaggttttcaatagtgtaatactgcagcgatgtagataaaatcacaaatgtataatgtgttaggttgaataaggtgtggaaaatgcttttctgttagtagaatgcaaaaacctacctaagccacataataataaaattcttttaccaac

SEQ ID NO: 53448 - DNA, 1539 bp, Homo sapiens
gaaaaaggcccaaggggcctttgggggttaaccccgggggggtcggaattccgggattgagactgaagcaacaaaagagaagaaaagaggtggtggtggtggacggcgttctaagaagggaggagagtttgatgaatttgtcaatgatgacactgatgatgacctacctatatccaaaaagaagaagagaagaaagggtagtggcagtgaacaagaaggtgaagatgaggagggtggtgagagaaagaagaaaaagaggagaagacatccaaagggagaagaaggatctgatgatgatgaaacagaaaatggccccaaaccaaaaaaacgacgtccaccaaaagcagagaagaaaaaggctcccaagccagaacgtctgcctccatcaatgaagggaaaaataaaatccaaagccataatttcatcaagtgatgactcttcggatgaggataaacttaaaattgctgatgaaggacatcccaggaacagcaacagcaacagtgactcagacgaggacgaacaacgaaagaaatgtgcctcatcagagagtgattccgatgagaaccagaacaagtctggcagcgaggccggcagtccccggaggccacgaagacagcggtcagatcaggactcagacagtgaccagccatccagaaagagaaggccctccggttctgagcagtctgacaatgaatctgtgcagtcagggagaagccactcaggagtttctgagaacgactctcgcccagcttctccaagtgccgaatcagatcacgaatcggagagaggatctgataatgagggttctggccaaggctctggaaatgaatcggaaccagagggatccaacaatgaggcctcagatagaggctcagaacatgggtcagatgatagtgactaggttttatttcatcaataagcttcatctctggaggaaacttttttaatatatgaaagctgtgataaaaatgtttcagatgtttagtcaattgtgaaatttttcttaaggcaattttcttttctatcagtttgtatattactaagccccaagagacatttcctgtgctagagtccaatatttgagtctctcgtgcaaatgagactattctttgtggtacaattccacctatcatatgtgaaaactgcagtaaaaataaacccagatgctaaatcattcctacaaaggtttgactgaaactgtggcagatgtctcatcttctttatatgttaagcagcatactcttctgatttttattgcaatcttttaccaagtggtgcacaaacttggtattgatgtctttattccattttgagtttagattgagaatatttttattttctgaaggcagagatatctactgtataattgcaccaaagtacatttgaaaggaaggttttcaatagtgtaatactgcagcgatgtagataaaatcacaaatgtataatgtgttaggttgaataaggtgtggaaaatgcttttctgttagtagaatgcaaaaacctacctaagccacataataataaaattcttttaccaac

SEQ ID NO: 53449 - DNA, 3317 bp, Homo sapiens
  misc_feature (3317)..(3317): n is a, c, g, or t
agcggagtggccgtccgccgtccgctgctcgttgtttaagcggctgacgggaaggagaagccagagctccagcggcgccgcggggcggcagtcaagaccagagccggagccgtcactcacctctggattagcctgaagcggagactaccggctgcggagcggcggggcgagacacttgctcgccttttgaccccatcatgtcgcggggctccatcgagattcccctccgggacactgacgaggtcattgaacttgacttcgatcagttaccggagggagatgaagttatcagtattctgaaacaggaacacacacaactgcacatatggattgctttggcgctggaatactacaagcaaggaaaaacagaagagtttgtaaaattgttggaagcagcacgtatagatggcaatttggactatagagaccatgaaaaagaccagatgacttgcttggatacattggcagcgtattatgtacaacaggctcggaaagaaaagaataaggacaataaaaaggatcttattacacaggccaccttgttgtatacaatggccgataaaattattatgtatgatcagaaccatttgttgggaagagcctgcttctgcctacttgagggtgacaaaatggatcaagctgatgcacagtttcattttgtactcaatcagtctccaaataatattccagcccttcttggtaaagcttgcatttccttcaacaagaaggattacagaggagctcttgcttactataagaaagcattgcgtactaacccaggatgtccagcggaagttcgtttaggaatgggtcattgctttgtgaaacttaacaaactggaaaaagctcgtctggcattcagcagagccctggaactcaattccaaatgcgtgggagcattggttggactggctgttctagaactcaacaataaagaggctgattccattaaaaatggtgtccagcttctttccagagcctatactattgatcctagcaaccctatggtattgaaccatttggcaaatcactttttcttcaaaaaggattatagtaaagtccagcatctggccctccatgcattccataatacagaagtggaagctatgcaagcagagagctgctatcagctagctagatcattccatgttcaggaagattatgaccaagcttttcagtactattatcaagccacacagtttgcctcatcctcttttgtgctcccattttttggtttgggacaaatgtatatttatcgaggtgacaaagaaaatgcatctcagtgctttgagaaggttttgaaagcttatcctaataattacgaaactatgaaaattctcggctctctctatgctgcctcagaagatcaagaaaaacgagatattgccaagggccatttgaagaaggtcacagaacagtatcccgatgatgttgaagcttggattgaattggcacaaatcttagaacagactgatatacagggtgccctttcagcctatggaacagcaacacgaatccttcaggagaaagtgcaggccgatgttcctccagagattctcaataatgtgggtgccctccattttagacttggaaacctaggggaggctaagaaatattttttggcgtcattggaccgtgcaaaagcagaagcggaacacgatgagcattactataacgccatttccgttaccacgtcatataatctcgccaggctatatgaggcgatgtgtgaattccatgaagcagaaaaactgtataaaaacatcttacgcgaacatcctaattatgttgactgctatttgcgcctaggagccatggctagagataagggaaacttttatgaggcttcagattggtttaaggaagctcttcagattaatcaggatcatccagatgcttggtctttgattggcaatcttcatttggcaaaacaagaatggggtcctgggcagaagaagtttgagaggatattaaaacagccatccacacagagtgatacctattctatgctagcccttggcaacgtgtggctccaaactttacatcagcccacccgagatcgagaaaaggaaaagcgtcatcaagatcgtgctctggccatctacaaacaagtactcagaaatgatgcaaagaatctgtatgctgccaatggcataggagctgttttggcccacaaaggatattttcgtgaagctcgtgatgtatttgcccaagtaagagaagcaacagcagatattagtgatgtgtggctgaacttagcacacatctatgtggagcaaaagcagtacatcagcgccgttcagatgtatgaaaactgcctccgaaagttctataagcaccaaaacactgaagttgtactctatttggcccgggccctcttcaagtgtggcaagttacaggaatgcaaacagactttgctgaaggctagacatgtggcacccagtgatacagttcttatgtttaatgtggccttggtcctgcaaagattagctacctctgtcctgaaagatgaaaaaagtaatctgaaggaagtacttaatgctgtgaaagaactggagcttgcacatagatacttcagttatttgagtaaagtgggagataaaatgagatttgatttggcccttgctgctacagaagccaggcagtgttctgacttactgagccaggcccagtaccatgtggcccgggcacgcaaacaagatgaagaagagcgggagctgcgggccaagcaagagcaagaaaaggagctgttaaggcagaaacttcttaaagaacaggaagagaaacgtctcagagaaaaggaagagcaaaagaaacttttggaacagcgggcccagtatgtggagaagaccaaaaatattcttatgtttactggtgagactgaagcaacaaaagagaagaaaagaggtggtggtggtggacggcgttctaagaagggaggagagtttgatgaatttgtcaatgatgacactgatgatgacctacctatatccaaaaagaagaagagaagaaagggtagtggcagtgaacaagaaggtgaagatgaggagggtggtgagagaaagaagaaaaagaggagaagacactccaaaggagaagaaaggtcttgtgtttgttgaaaaacaaaaatggggccccaaacccaaaaaacgccgtgcgccccaaaagcgagaaaataaaaagggcttccaaaccgaaaacgttgtgtctctctatgtgaggggaaataaaaaatccaaaacccatatttttttcaagggaagactttttcgggtggaggtctttgacgggggccgaaccaacgggtggcgctcttn

SEQ ID NO: 53450 - DNA, 1011 bp, Homo sapiens
taacgacaggctggtacggccccgggagtaagggaaccagaacaagtctggcagcgaggccggcagtccccggaggccacgaagacagcggtcagatcaggactcagacagtgaccagccatccagaaagagaaggccctccggttctgagcagtctgacaatgaatctgtgcagtcagggagaagccactcaggagtttctgagaacgactctcgcccagcttctccaagtgccgaatcagatcacgaatcggagagaggatctgataatgagggttctggccaaggctctggaaatgaatcggaaccagagggatccaacaatgaggcctcagatagaggctcagaacatgggtcagatgatagtgactaggttttatttcatcaataagcttcatctctggaggaaacttttttaatatatgaaagctgtgataaaaatgtttcagatgtttagtcaattgtgaaatttttcttaaggcaattttcttttctatcagtttgtatattactaagccccaagagacatttcctgtgctagagtccaatatttgagtctctcgtgcaaatgagactattctttgtggtacaattccacctatcatatgtgaaaactgcagtaaaaataaacccagatgctaaatcattcctacaaaggtttgactgaaactgtggcagatgtctcatcttctttatatgttaagcagcatactcttctgatttttattgcaatcttttaccaagtggtgcacaaacttggtattgatgtctttattccattttgagtttagattgagaatatttttattttctgaaggcagagatatctactgtataattgcaccaaagtacatttgaaaggaaggttttcaatagtgtaatactgcagcgatgtagataaaatcacaaatgtataatgtgttaggttgaataaggtgtggaaaatgcttttctgttagtagaatgcaaaaacctacctaagccacataataataaaattcttttaccaac

SEQ ID NO: 53451 - DNA, 905 bp, Homo sapiens
gcactcatgttctacatatgagaatcctctccgagtctagcctcgctctcgtgcatgactctggtgctggccggcgtaatccaatctcgagtttctgagaacgactctcgcccagcttctccaagtgccgaatcagatcacgaatcggagagaggatctgataatgagggttctggccaaggctctggaaatgaatcggaaccagagggatccaacaatgaggcctcagatagaggctcagaacatgggtcagatgatagtgactaggttttatttcatcaataagcttcatctctggaggaaacttttttaatatatgaaagctgtgataaaaatgtttcagatgtttagtcaattgtgaaatttttcttaaggcaattttcttttctatcagtttgtatattactaagccccaagagacatttcctgtgctagagtccaatatttgagtctctcgtgcaaatgagactattctttgtggtacaattccacctatcatatgtgaaaactgcagtaaaaataaacccagatgctaaatcattcctacaaaggtttgactgaaactgtggcagatgtctcatcttctttatatgttaagcagcatactcttctgatttttattgcaatcttttaccaagtggtgcacaaacttggtattgatgtctttattccattttgagtttagattgagaatatttttattttctgaaggcagagatatctactgtataattgcaccaaagtacatttgaaaggaaggttttcaatagtgtaatactgcagcgatgtagataaaatcacaaatgtataatgtgttaggttgaataaggtgtggaaaatgcttttctgttagtagaatgcaaaaacctacctaagccacataataataaaattcttttaccaac

SEQ ID NO: 53452 - DNA, 3246 bp, Homo sapiens
  misc_feature (2930)..(2931): n is a, c, g, or t
  misc_feature (2933)..(2933): n is a, c, g, or t
  misc_feature (2943)..(2943): n is a, c, g, or t
  misc_feature (2981)..(2981): n is a, c, g, or t
  misc_feature (2983)..(2983): n is a, c, g, or t
  misc_feature (3002)..(3002): n is a, c, g, or t
  misc_feature (3009)..(3009): n is a, c, g, or t
  misc_feature (3018)..(3018): n is a, c, g, or t
  misc_feature (3025)..(3025): n is a, c, g, or t
  misc_feature (3029)..(3030): n is a, c, g, or t
  misc_feature (3032)..(3032): n is a, c, g, or t
  misc_feature (3037)..(3037): n is a, c, g, or t
  misc_feature (3039)..(3039): n is a, c, g, or t
  misc_feature (3048)..(3048): n is a, c, g, or t
  misc_feature (3057)..(3057): n is a, c, g, or t
  misc_feature (3060)..(3060): n is a, c, g, or t
  misc_feature (3071)..(3071): n is a, c, g, or t
  misc_feature (3073)..(3073): n is a, c, g, or t
  misc_feature (3077)..(3078): n is a, c, g, or t
  misc_feature (3084)..(3084): n is a, c, g, or t
  misc_feature (3089)..(3089): n is a, c, g, or t
  misc_feature (3095)..(3095): n is a, c, g, or t
  misc_feature (3099)..(3099): n is a, c, g, or t
  misc_feature (3103)..(3103): n is a, c, g, or t
  misc_feature (3107)..(3107): n is a, c, g, or t
  misc_feature (3112)..(3112): n is a, c, g, or t
  misc_feature (3114)..(3115): n is a, c, g, or t
  misc_feature (3119)..(3119): n is a, c, g, or t
  misc_feature (3125)..(3125): n is a, c, g, or t
  misc_feature (3127)..(3127): n is a, c, g, or t
  misc_feature (3130)..(3130): n is a, c, g, or t
  misc_feature (3141)..(3141): n is a, c, g, or t
  misc_feature (3148)..(3148): n is a, c, g, or t
  misc_feature (3166)..(3167): n is a, c, g, or t
  misc_feature (3170)..(3170): n is a, c, g, or t
  misc_feature (3176)..(3176): n is a, c, g, or t
agcggagtggccgtccgccgtccgctgctcgttgtttaagcggctgacgggaaggagaagccagagctccagcggcgccgcggggcggcagtcaagaccagagccggagccgtcactcacctctggattagcctgaagcggagactaccggctgcggagcggcggggcgagacacttgctcgccttttgaccccatcatgtcgcggggctccatcgagattcccctccgggacactgacgaggtcattgaacttgacttcgatcagttaccggagggagatgaagttatcagtattctgaaacaggaacacacacaactgcacatatggattgctttggcgctggaatactacaagcaaggaaaaacagaagagtttgtaaaattgttggaagcagcacgtatagatggcaatttggactatagagaccatgaaaaagaccagatgacttgcttggatacattggcagcgtattatgtacaacaggctcggaaagaaaagaataaggacaataaaaaggatcttattacacaggccaccttgttgtatacaatggccgataaaattattatgtatgatcagaaccatttgttgggaagagcctgcttctgcctacttgagggtgacaaaatggatcaagctgatgcacagtttcattttgtactcaatcagtctccaaataatattccagcccttcttggtaaagcttgcatttccttcaacaagaaggattacagaggagctcttgcttactataagaaagcattgcgtactaacccaggatgtccagcggaagttcgtttaggaatgggtcattgctttgtgaaacttaacaaactggaaaaagctcgtctggcattcagcagagccctggaactcaattccaaatgcgtgggagcattggttggactggctgttctagaactcaacaataaagaggctgattccattaaaaatggtgtccagcttctttccagagcctatactattgatcctagcaaccctatggtattgaaccatttggcaaatcactttttcttcaaaaaggattatagtaaagtccagcatctggccctccatgcattccataatacagaagtggaagctatgcaagcagagagctgctatcagctagctagatcattccatgttcaggaagattatgaccaagcttttcagtactattatcaagccacacagtttgcctcatcctcttttgtgctcccattttttggtttgggacaaatgtatatttatcgaggtgacaaagaaaatgcatctcagtgctttgagaaggttttgaaagcttatcctaataattacgaaactatgaaaattctcggctctctctatgctgcctcagaagatcaagaaaaacgagatattgccaagggccatttgaagaaggtcacagaacagtatcccgatgatgttgaagcttggattgaattggcacaaatcttagaacagactgatatacagggtgccctttcagcctatggaacagcaacacgaatccttcaggagaaagtgcaggccgatgttcctccagagattctcaataatgtgggtgccctccattttagacttggaaacctaggggaggctaagaaatattttttggcgtcattggaccgtgcaaaagcagaagcggaacacgatgagcattactataacgccatttccgttaccacgtcatataatctcgccaggctatatgaggcgatgtgtgaattccatgaagcagaaaaactgtataaaaacatcttacgcgaacatcctaattatgttgactgctatttgcgcctaggagccatggctagagataagggaaacttttatgaggcttcagattggtttaaggaagctcttcagattaatcaggatcatccagatgcttggtctttgattggcaatcttcatttggcaaaacaagaatggggtcctgggcagaagaagtttgagaggatattaaaacagccatccacacagagtgatacctattctatgctagcccttggcaacgtgtggctccaaactttacatcagcccacccgagatcgagaaaaggaaaagcgtcatcaagatcgtgctctggccatctacaaacaagtactcagaaatgatgcaaagaatctgtatgctgccaatggcataggagctgttttggcccacaaaggatattttcgtgaagctcgtgatgtatttgcccaagtaagagaagcaacagcagatattagtgatgtgtggctgaacttagcacacatctatgtggagcaaaagcagtacatcagcgccgttcagatgtatgaaaactgcctccgaaagttctataagcaccaaaacactgaagttgtactctatttggcccgggccctcttcaagtgtggcaagttacaggaatgcaaacagactttgctgaaggctagacatgtggcacccagtgatacagttcttatgtttaatgtggccttggtcctgcaaagattagctacctctgtcctgaaagatgaaaaaagtaatctgaaggaagtacttaatgctgtgaaagaactggagcttgcacatagatacttcagttatttgagtaaagtgggagataaaatgagatttgatttggcccttgctgctacagaagccaggcagtgttctgacttactgagccaggcccagtaccatgtggcccgggcacgcaaacaagatgaagaagagcgggagctgcgggccaagcaagagcaagaaaaggagctgttaaggcagaaacttcttaaagaacaggaagagaaacgtctcagagaaaaggaagagcaaaagaaacttttggaacagcgggcccagtatgtggagaagaccaaaaatattcttatgtttactggtgagactgaagcaacaaaagagaagaaaaaaagggggggggggggaccgcggtcnnanaaaggaaganaggttgatgaatttggccatggtgacactggtgatgancntcctttattccaaaagaanaaaaggnaaaaggggntgacgangaanncnaaaangnggaggtggnggggggganganaaaaaaaagtnanagcnntccaanggganaaaagngctntttntttntaaantnnaaanggcccngnccntaaaaaacctntcacccnaagggaaaataaaaaggnnccnaaggcnaaaaggtggcgccctctccggagggtataatacccagggccatttccatgtggggacctttggggggggg

SEQ ID NO: 53453 - DNA, 3083 bp, Homo sapiens
agcggagtggccgtccgccgtccgctgctcgttgtttaagcggctgacgggaaggagaagccagagctccagcggcgccgcggggcggcagtcaagaccagagccggagccgtcactcacctctggattagcctgaagcggagactaccggctgcggagcggcggggcgagacacttgctcgccttttgaccccatcatgtcgcggggctccatcgagattcccctccgggacactgacgaggtcattgaacttgacttcgatcagttaccggagggagatgaagttatcagtattctgaaacaggaacacacacaactgcacatatggattgctttggcgctggaatactacaagcaaggaaaaacagaagagtttgtaaaattgttggaagcagcacgtatagatggcaatttggactatagagaccatgaaaaagaccagatgacttgcttggatacattggcagcgtattatgtacaacaggctcggaaagaaaagaataaggacaataaaaaggatcttattacacaggccaccttgttgtatacaatggccgataaaattattatgtatgatcagaaccatttgttgggaagagcctgcttctgcctacttgagggtgacaaaatggatcaagctgatgcacagtttcattttgtactcaatcagtctccaaataatattccagcccttcttggtaaagcttgcatttccttcaacaagaaggattacagaggagctcttgcttactataagaaagcattgcgtactaacccaggatgtccagcggaagttcgtttaggaatgggtcattgctttgtgaaacttaacaaactggaaaaagctcgtctggcattcagcagagccctggaactcaattccaaatgcgtgggagcattggttggactggctgttctagaactcaacaataaagaggctgattccattaaaaatggtgtccagcttctttccagagcctatactattgatcctagcaaccctatggtattgaaccatttggcaaatcactttttcttcaaaaaggattatagtaaagtccagcatctggccctccatgcattccataatacagaagtggaagctatgcaagcagagagctgctatcagctagctagatcattccatgttcaggaagattatgaccaagcttttcagtactattatcaagccacacagtttgcctcatcctcttttgtgctcccattttttggtttgggacaaatgtatatttatcgaggtgacaaagaaaatgcatctcagtgctttgagaaggttttgaaagcttatcctaataattacgaaactatgaaaattctcggctctctctatgctgcctcagaagatcaagaaaaacgagatattgccaagggccatttgaagaaggtcacagaacagtatcccgatgatgttgaagcttggattgaattggcacaaatcttagaacagactgatatacagggtgccctttcagcctatggaacagcaacacgaatccttcaggagaaagtgcaggccgatgttcctccagagattctcaataatgtgggtgccctccattttagacttggaaacctaggggaggctaagaaatattttttggcgtcattggaccgtgcaaaagcagaagcggaacacgatgagcattactataacgccatttccgttaccacgtcatataatctcgccaggctatatgaggcgatgtgtgaattccatgaagcagaaaaactgtataaaaacatcttacgcgaacatcctaattatgttgactgctatttgcgcctaggagccatggctagagataagggaaacttttatgaggcttcagattggtttaaggaagctcttcagattaatcaggatcatccagatgcttggtctttgattggcaatcttcatttggcaaaacaagaatggggtcctgggcagaagaagtttgagaggatattaaaacagccatccacacagagtgatacctattctatgctagcccttggcaacgtgtggctccaaactttacatcagcccacccgagatcgagaaaaggaaaagcgtcatcaagatcgtgctctggccatctacaaacaagtactcagaaatgatgcaaagaatctgtatgctgccaatggcataggagctgttttggcccacaaaggatattttcgtgaagctcgtgatgtatttgcccaagtaagagaagcaacagcagatattagtgatgtgtggctgaacttagcacacatctatgtggagcaaaagcagtacatcagcgccgttcagatgtatgaaaactgcctccgaaagttctataagcaccaaaacactgaagttgtactctatttggcccgggccctcttcaagtgtggcaagttacaggaatgcaaacagactttgctgaaggctagacatgtggcacccagtgatacagttcttatgtttaatgtggccttggtcctgcaaagattagctacctctgtcctgaaagatgaaaaaagtaatctgaaggaagtacttaatgctgtgaaagaactggagcttgcacatagatacttcagttatttgagtaaagtgggagataaaatgagatttgatttggcccttgctgctacagaagccaggtaatgttactatttatggaaggtgactttgggtgaggcagtgatatttacatgggctgggaaagtgccacagtagggaacagaggttcctgaccttccacaggtcagtctttcacacttctcttggggactctctaatctttgccaggactttttcctttcagggaattggacaaaattgccttagtacaagtacttgagttctgggggaaaatacttttctattttacttatgtcagctatgtcagcctagtcaagataaaattcatgactctgagttatatgtaaagataatgttggaaatctttttagctgtgctttgagaggacatttatagtttggaaacttaacatagttggcagtattggcttatgataaactaagttaattttgctaattaagactccatacattggtatggtatggcaagtgtaatgcaaaa

SEQ ID NO: 53454 - DNA, 3635 bp, Homo sapiens
agcggagtggccgtccgccgtccgctgctcgttgtttaagcggctgacgggaaggagaagccagagctccagcggcgccgcggggcggcagtcaagaccagagccggagccgtcactcacctctggattagcctgaagcggagactaccggctgcggagcggcggggcgagacacttgctcgccttttgaccccatcatgtcgcggggctccatcgagattcccctccgggacactgacgaggtcattgaacttgacttcgatcagttaccggagggagatgaagttatcagtattctgaaacaggaacacacacaactgcacatatggattgctttggcgctggaatactacaagcaaggaaaaacagaagagtttgtaaaattgttggaagcagcacgtatagatggcaatttggactatagagaccatgaaaaagaccagatgacttgcttggatacattggcagcgtattatgtacaacaggctcggaaagaaaagaataaggacaataaaaaggatcttattacacaggccaccttgttgtatacaatggccgataaaattattatgtatgatcagaaccatttgttgggaagagcctgcttctgcctacttgagggtgacaaaatggatcaagctgatgcacagtttcattttgtactcaatcagtctccaaataatattccagcccttcttggtaaagcttgcatttccttcaacaagaaggattacagaggagctcttgcttactataagaaagcattgcgtactaacccaggatgtccagcggaagttcgtttaggaatgggtcattgctttgtgaaacttaacaaactggaaaaagctcgtctggcattcagcagagccctggaactcaattccaaatgcgtgggagcattggttggactggctgttctagaactcaacaataaagaggctgattccattaaaaatggtgtccagcttctttccagagcctatactattgatcctagcaaccctatggtattgaaccatttggcaaatcactttttcttcaaaaaggattatagtaaagtccagcatctggccctccatgcattccataatacagaagtggaagctatgcaagcagagagctgctatcagctagctagatcattccatgttcaggaagattatgaccaagcttttcagtactattatcaagccacacagtttgcctcatcctcttttgtgctcccattttttggtttgggacaaatgtatatttatcgaggtgacaaagaaaatgcatctcagtgctttgagaaggttttgaaagcttatcctaataattacgaaactatgaaaattctcggctctctctatgctgcctcagaagatcaagaaaaacgagatattgccaagggccatttgaagaaggtcacagaacagtatcccgatgatgttgaagcttggattgaattggcacaaatcttagaacagactgatatacagggtgccctttcagcctatggaacagcaacacgaatccttcaggagaaagtgcaggccgatgttcctccagagattctcaataatgtgggtgccctccattttagacttggaaacctaggggaggctaagaaatattttttggcgtcattggaccgtgcaaaagcagaagcggaacacgatgagcattactataacgccatttccgttaccacgtcatataatctcgccaggctatatgaggcgatgtgtgaattccatgaagcagaaaaactgtataaaaacatcttacgcgaacatcctaattatgttgactgctatttgcgcctaggagccatggctagagataagggaaacttttatgaggcttcagattggtttaaggaagctcttcagattaatcaggatcatccagatgcttggtctttgattggcaatcttcatttggcaaaacaagaatggggtcctgggcagaagaagtttgagaggatattaaaacagccatccacacagagtgatacctattctatgctagcccttggcaacgtgtggctccaaactttacatcagcccacccgagatcgagaaaaggaaaagcgtcatcaagatcgtgctctggccatctacaaacaagtactcagaaatgatgcaaagaatctgtatgctgccaatggcataggagctgttttggcccacaaaggatattttcgtgaagctcgtgatgtatttgcccaagtaagagaagcaacagcagatattagtgatgtgtggctgaacttagcacacatctatgtggagcaaaagcagtacatcagcgccgttcagatgtatgaaaactgcctccgaaagttctataagcaccaaaacactgaagttgtactctatttggcccgggccctcttcaagtgtggcaagttacaggaatgcaaacagactttgctgaaggctagacatgtggcacccagtgatacagttcttatgtttaatgtggccttggtcctgcaaagattagctacctctgtcctgaaagatgaaaaaagtaatctgaaggaagtacttaatgctgtgaaagaactggagcttgcacatagatacttcagttatttgagtaaagtgggagataaaatgagatttgatttggcccttgctgctacagaagccaggcagtgttctgacttactgagccaggcccagtaccatgtggcccgggcacgcaaacaagatgaagaagagcgggagctgcgggccaagcaagagcaagaaaaggagctgttaaggcagaaacttcttaaagaacaggaagagaaacgtctcagagaaaaggaagagcaaaagaaacttttggaacagcgggcccagtatgtggagaagaccaaaaatattcttatgtttactggtgagactgaagcaacaaaagagaagaaaagaggtggtggtggtggacggcgttctaagaagggaggagagtttgatgaatttgtcaatgatgacactgatgatgacctacctatatccaaaaagaagaagagaagaaagggtagtggcagtgaacaagaaggtgaagatgaggagggtggtgagagaaagaagaaaaagaggagaagacatccaaagggagaagaaggatctgatgatgatgaaacagaaaatggccccaaaccaaaaaaacgacgtccaccaaaagcagagaagaaaaaggctgtaagtttatagtactgtgtttttctgtcccctagtagatgtgaaagattgcagtacactagaatacattctttccttgcagctttctcaagcacaaatgcttgtttacaaagttcatcagtggctgtttgattgtatcattgtaatgcaaacccaatttaacaagatggcctaatgtaagagtcttgactaatctattatgtttgacattctttagcccaagccagaacgtctgcctccatcaatgaagggaaaaataaaatccaaagccataatttcatcaagtgatgactcttcggatgaggataaacttaaaattgctgatgaagggaagggtaggatattttctctttgtaaattcttctcatgatgtagataaatcaaaagtgattactaatcagcctgtctgtactaagaaaaatatacttttctttctttataaataataagaggggt

SEQ ID NO: 53455 - DNA, 3263 bp, Homo sapiens
agcggagtggccgtccgccgtccgctgctcgttgtttaagcggctgacgggaaggagaagccagagctccagcggcgccgcggggcggcagtcaagaccagagccggagccgtcactcacctctggattagcctgaagcggagactaccggctgcggagcggcggggcgagacacttgctcgccttttgaccccatcatgtcgcggggctccatcgagattcccctccgggacactgacgaggtcattgaacttgacttcgatcagttaccggagggagatgaagttatcagtattctgaaacaggaacacacacaactgcacatatggattgctttggcgctggaatactacaagcaaggaaaaacagaagagtttgtaaaattgttggaagcagcacgtatagatggcaatttggactatagagaccatgaaaaagaccagatgacttgcttggatacattggcagcgtattatgtacaacaggctcggaaagaaaagaataaggacaataaaaaggatcttattacacaggccaccttgttgtatacaatggccgataaaattattatgtatgatcagaaccatttgttgggaagagcctgcttctgcctacttgagggtgacaaaatggatcaagctgatgcacagtttcattttgtactcaatcagtctccaaataatattccagcccttcttggtaaagcttgcatttccttcaacaagaaggattacagaggagctcttgcttactataagaaagcattgcgtactaacccaggatgtccagcggaagttcgtttaggaatgggtcattgctttgtgaaacttaacaaactggaaaaagctcgtctggcattcagcagagccctggaactcaattccaaatgcgtgggagcattggttggactggctgttctagaactcaacaataaagaggctgattccattaaaaatggtgtccagcttctttccagagcctatactattgatcctagcaaccctatggtattgaaccatttggcaaatcactttttcttcaaaaaggattatagtaaagtccagcatctggccctccatgcattccataatacagaagtggaagctatgcaagcagagagctgctatcagctagctagatcattccatgttcaggaagattatgaccaagcttttcagtactattatcaagccacacagtttgcctcatcctcttttgtgctcccattttttggtttgggacaaatgtatatttatcgaggtgacaaagaaaatgcatctcagtgctttgagaaggttttgaaagcttatcctaataattacgaaactatgaaaattctcggctctctctatgctgcctcagaagatcaagaaaaacgagatattgccaagggccatttgaagaaggtcacagaacagtatcccgatgatgttgaagcttggattgaattggcacaaatcttagaacagactgatatacagggtgccctttcagcctatggaacagcaacacgaatccttcaggagaaagtgcaggccgatgttcctccagagattctcaataatgtgggtgccctccattttagacttggaaacctaggggaggctaagaaatattttttggcgtcattggaccgtgcaaaagcagaagcggaacacgatgagcattactataacgccatttccgttaccacgtcatataatctcgccaggctatatgaggcgatgtgtgaattccatgaagcagaaaaactgtataaaaacatcttacgcgaacatcctaattatgttgactgctatttgcgcctaggagccatggctagagataagggaaacttttatgaggcttcagattggtttaaggaagctcttcagattaatcaggatcatccagatgcttggtctttgattggcaatcttcatttggcaaaacaagaatggggtcctgggcagaagaagtttgagaggatattaaaacagccatccacacagagtgatacctattctatgctagcccttggcaacgtgtggctccaaactttacatcagcccacccgagatcgagaaaaggaaaagcgtcatcaagatcgtgctctggccatctacaaacaagtactcagaaatgatgcaaagaatctgtatgctgccaatggcataggagctgttttggcccacaaaggatattttcgtgaagctcgtgatgtatttgcccaagtaagagaagcaacagcagatattagtgatgtgtggctgaacttagcacacatctatgtggagcaaaagcagtacatcagcgccgttcagatgtatgaaaactgcctccgaaagttctataagcaccaaaacactgaagttgtactctatttggcccgggccctcttcaagtgtggcaagttacaggaatgcaaacagactttgctgaaggctagacatgtggcacccagtgatacagttcttatgtttaatgtggccttggtcctgcaaagattagctacctctgtcctgaaagatgaaaaaagtaatctgaaggaagtacttaatgctgtgaaagaactggagcttgcacatagatacttcagttatttgagtaaagtgggagataaaatgagatttgatttggcccttgctgctacagaagccaggcagtgttctgacttactgagccaggcccagtaccatgtggcccgggcacgcaaacaagatgaagaagagcgggagctgcgggccaagcaagagcaagaaaaggagctgttaaggcagaaacttcttaaagaacaggaagagaaacgtctcagagaaaaggaagagcaaaagaaacttttggaacagcgggcccagtatgtggagaagaccaaaaatattcttatgtttactggtgagactgaagcaacaaaagagaagaaaagaggtggtggtggtggacggcgttctaagaagggaggagagtttgatgaatttgtcaatgatgacactgatgatgacctacctatatccaaaaagaagaagagaagaaagggtagtggcagtgaacaagaaggtgaagatgaggagggtggtgagagaaagaagaaaaagaggagaagaccttccaaggggaaaaaggtttggtttttttgaatacccaaatggctccaaaccaaaaaaacctaggcgcccaataaataagggttaaaaggggaaaaagccgaacgcgtttcgttaattaaaaaagggaaaaaaaacccccaacccctaattttctccccttggggactctttgggctt

SEQ ID NO: 53456 - DNA, 3308 bp, Homo sapiens
  misc_feature (2930)..(2931): n is a, c, g, or t
  misc_feature (2933)..(2933): n is a, c, g, or t
  misc_feature (2943)..(2943): n is a, c, g, or t
  misc_feature (2981)..(2981): n is a, c, g, or t
  misc_feature (2983)..(2983): n is a, c, g, or t
  misc_feature (3002)..(3002): n is a, c, g, or t
  misc_feature (3009)..(3009): n is a, c, g, or t
  misc_feature (3018)..(3018): n is a, c, g, or t
  misc_feature (3025)..(3025): n is a, c, g, or t
  misc_feature (3029)..(3030): n is a, c, g, or t
  misc_feature (3032)..(3032): n is a, c, g, or t
  misc_feature (3037)..(3037): n is a, c, g, or t
  misc_feature (3039)..(3039): n is a, c, g, or t
  misc_feature (3048)..(3048): n is a, c, g, or t
  misc_feature (3057)..(3057): n is a, c, g, or t
  misc_feature (3060)..(3060): n is a, c, g, or t
  misc_feature (3071)..(3071): n is a, c, g, or t
  misc_feature (3073)..(3073): n is a, c, g, or t
  misc_feature (3077)..(3078): n is a, c, g, or t
  misc_feature (3084)..(3084): n is a, c, g, or t
  misc_feature (3089)..(3089): n is a, c, g, or t
  misc_feature (3095)..(3095): n is a, c, g, or t
  misc_feature (3099)..(3099): n is a, c, g, or t
  misc_feature (3103)..(3103): n is a, c, g, or t
  misc_feature (3107)..(3107): n is a, c, g, or t
  misc_feature (3112)..(3112): n is a, c, g, or t
  misc_feature (3114)..(3115): n is a, c, g, or t
  misc_feature (3119)..(3119): n is a, c, g, or t
  misc_feature (3125)..(3125): n is a, c, g, or t
  misc_feature (3127)..(3127): n is a, c, g, or t
  misc_feature (3130)..(3130): n is a, c, g, or t
  misc_feature (3141)..(3141): n is a, c, g, or t
  misc_feature (3148)..(3148): n is a, c, g, or t
  misc_feature (3166)..(3167): n is a, c, g, or t
  misc_feature (3170)..(3170): n is a, c, g, or t
  misc_feature (3176)..(3176): n is a, c, g, or t
agcggagtggccgtccgccgtccgctgctcgttgtttaagcggctgacgggaaggagaagccagagctccagcggcgccgcggggcggcagtcaagaccagagccggagccgtcactcacctctggattagcctgaagcggagactaccggctgcggagcggcggggcgagacacttgctcgccttttgaccccatcatgtcgcggggctccatcgagattcccctccgggacactgacgaggtcattgaacttgacttcgatcagttaccggagggagatgaagttatcagtattctgaaacaggaacacacacaactgcacatatggattgctttggcgctggaatactacaagcaaggaaaaacagaagagtttgtaaaattgttggaagcagcacgtatagatggcaatttggactatagagaccatgaaaaagaccagatgacttgcttggatacattggcagcgtattatgtacaacaggctcggaaagaaaagaataaggacaataaaaaggatcttattacacaggccaccttgttgtatacaatggccgataaaattattatgtatgatcagaaccatttgttgggaagagcctgcttctgcctacttgagggtgacaaaatggatcaagctgatgcacagtttcattttgtactcaatcagtctccaaataatattccagcccttcttggtaaagcttgcatttccttcaacaagaaggattacagaggagctcttgcttactataagaaagcattgcgtactaacccaggatgtccagcggaagttcgtttaggaatgggtcattgctttgtgaaacttaacaaactggaaaaagctcgtctggcattcagcagagccctggaactcaattccaaatgcgtgggagcattggttggactggctgttctagaactcaacaataaagaggctgattccattaaaaatggtgtccagcttctttccagagcctatactattgatcctagcaaccctatggtattgaaccatttggcaaatcactttttcttcaaaaaggattatagtaaagtccagcatctggccctccatgcattccataatacagaagtggaagctatgcaagcagagagctgctatcagctagctagatcattccatgttcaggaagattatgaccaagcttttcagtactattatcaagccacacagtttgcctcatcctcttttgtgctcccattttttggtttgggacaaatgtatatttatcgaggtgacaaagaaaatgcatctcagtgctttgagaaggttttgaaagcttatcctaataattacgaaactatgaaaattctcggctctctctatgctgcctcagaagatcaagaaaaacgagatattgccaagggccatttgaagaaggtcacagaacagtatcccgatgatgttgaagcttggattgaattggcacaaatcttagaacagactgatatacagggtgccctttcagcctatggaacagcaacacgaatccttcaggagaaagtgcaggccgatgttcctccagagattctcaataatgtgggtgccctccattttagacttggaaacctaggggaggctaagaaatattttttggcgtcattggaccgtgcaaaagcagaagcggaacacgatgagcattactataacgccatttccgttaccacgtcatataatctcgccaggctatatgaggcgatgtgtgaattccatgaagcagaaaaactgtataaaaacatcttacgcgaacatcctaattatgttgactgctatttgcgcctaggagccatggctagagataagggaaacttttatgaggcttcagattggtttaaggaagctcttcagattaatcaggatcatccagatgcttggtctttgattggcaatcttcatttggcaaaacaagaatggggtcctgggcagaagaagtttgagaggatattaaaacagccatccacacagagtgatacctattctatgctagcccttggcaacgtgtggctccaaactttacatcagcccacccgagatcgagaaaaggaaaagcgtcatcaagatcgtgctctggccatctacaaacaagtactcagaaatgatgcaaagaatctgtatgctgccaatggcataggagctgttttggcccacaaaggatattttcgtgaagctcgtgatgtatttgcccaagtaagagaagcaacagcagatattagtgatgtgtggctgaacttagcacacatctatgtggagcaaaagcagtacatcagcgccgttcagatgtatgaaaactgcctccgaaagttctataagcaccaaaacactgaagttgtactctatttggcccgggccctcttcaagtgtggcaagttacaggaatgcaaacagactttgctgaaggctagacatgtggcacccagtgatacagttcttatgtttaatgtggccttggtcctgcaaagattagctacctctgtcctgaaagatgaaaaaagtaatctgaaggaagtacttaatgctgtgaaagaactggagcttgcacatagatacttcagttatttgagtaaagtgggagataaaatgagatttgatttggcccttgctgctacagaagccaggcagtgttctgacttactgagccaggcccagtaccatgtggcccgggcacgcaaacaagatgaagaagagcgggagctgcgggccaagcaagagcaagaaaaggagctgttaaggcagaaacttcttaaagaacaggaagagaaacgtctcagagaaaaggaagagcaaaagaaacttttggaacagcgggcccagtatgtggagaagaccaaaaatattcttatgtttactggtgagactgaagcaacaaaagagaagaaaagaggtggtggtggtggacggcggtcnnanaaaggaaganaggttgatgaatttggccatggtgacactggtgatgancntcctttattccaaaagaanaaaaggnaaaaggggntgacgangaanncnaaaangnggaggtggnggggggganganaaaaaaaagtnanagcnntccaanggganaaaagngctntttntttntaaantnnaaanggcccngnccntaaaaaacctntcacccnaagggaaaataaaaaggnnccnaaggcnaaaaggtggcgccctttgggcaagggaaaattaaaaaccaagccctgattccccggagggatggcttttgggaaagcgataaatttaaatttgttttaagggccccaggaacgggaccgggggggcctgggg

SEQ ID NO: 53457 - DNA, 2596 bp, Homo sapiens
agcggagtggccgtccgccgtccgctgctcgttgtttaagcggctgacgggaaggagaagccagagctccagcggcgccgcggggcggcagtcaagaccagagccggagccgtcactcacctctggattagcctgaagcggagactaccggctgcggagcggcggggcgagacacttgctcgccttttgaccccatcatgtcgcggggctccatcgagattcccctccgggacactgacgaggtcattgaacttgacttcgatcagttaccggagggagatgaagttatcagtattctgaaacaggaacacacacaactgcacatatggattgctttggcgctggaatactacaagcaaggaaaaacagaagagtttgtaaaattgttggaagcagcacgtatagatggcaatttggactatagagaccatgaaaaagaccagatgacttgcttggatacattggcagcgtattatgtacaacaggctcggaaagaaaagaataaggacaataaaaaggatcttattacacaggccaccttgttgtatacaatggccgataaaattattatgtatgatcagaaccatttgttgggaagagcctgcttctgcctacttgagggtgacaaaatggatcaagctgatgcacagtttcattttgtactcaatcagtctccaaataatattccagcccttcttggtaaagcttgcatttccttcaacaagaaggattacagaggagctcttgcttactataagaaagcattgcgtactaacccaggatgtccagcggaagttcgtttaggaatgggtcattgctttgtgaaacttaacaaactggaaaaagctcgtctggcattcagcagagccctggaactcaattccaaatgcgtgggagcattggttggactggctgttctagaactcaacaataaagaggctgattccattaaaaatggtgtccagcttctttccagagcctatactattgatcctagcaaccctatggtattgaaccatttggcaaatcactttttcttcaaaaaggattatagtaaagtccagcatctggccctccatgcattccataatacagaagtggaagctatgcaagcagagagctgctatcagctagctagatcattccatgttcaggaagattatgaccaagcttttcagtactattatcaagccacacagtttgcctcatcctcttttgtgctcccattttttggtttgggacaaatgtatatttatcgaggtgacaaagaaaatgcatctcagtgctttgagaaggttttgaaagcttatcctaataattacgaaactatgaaaattctcggctctctctatgctgcctcagaagatcaagaaaaacgagatattgccaagggccatttgaagaaggtcacagaacagtatcccgatgatgttgaagcttggattgaattggcacaaatcttagaacagactgatatacagggtgccctttcagcctatggaacagcaacacgaatccttcaggagaaagtgcaggccgatgttcctccagagattctcaataatgtgggtgccctccattttagacttggaaacctaggggaggctaagaaatattttttggcgtcattggaccgtgcaaaagcagaagcggaacacgatgagcattactataacgccatttccgttaccacgtcatataatctcgccaggctatatgaggcgatgtgtgaattccatgaagcagaaaaactgtataaaaacatcttacgcgaacatcctaattatgttgactgctatttgcgcctaggagccatggctagagataagggaaacttttatgaggcttcagattggtttaaggaagctcttcagattaatcaggatcatccagatgcttggtctttgattggcaatcttcatttggcaaaacaagaatggggtcctgggcagaagaagtttgagaggatattaaaacagccatccacacagagtgatacctattctatgctagcccttggcaacgtgtggctccaaactttacatcagcccacccgagatcgagaaaaggaaaagcgtcatcaagatcgtgctctggccatctacaaacaagtactcagaaatgatgcaaagaatctgtatgctgccaatggcataggagctgttttggcccacaaaggatattttcgtgaagctcgtgatgtatttgcccaagtaagagaagcaacagcagatattagtgatgtgtggctgaacttagcacacatctatgtggagcaaaagcagtacatcagcgccgttcagatgtatgaaaactgcctccgaaagttctataagcaccaaaacactgaagttgtactctatttggcccgggccctcttcaagtgtggcaagttacaggaatgcaaacagactttgctgaaggctagacatgtggcacccagtgatacagttcttatgtttaatgtggccttggtcctgcaaagattagctacctctgtcctgaaagatgaaaaaagtaatctgaaggaagtacttaatgctattgaaacttctaaaactaggcctagttttagaagtttcaatagcacctagtt

SEQ ID NO: 53458 - DNA, 865 bp, Homo sapiens
tatttcaattcgctaatagaagcacaattatcttcttgtctgctttcttaaatgttactggtaaactagtaattttgcatgtccaggtaactgcagctgctacagtcaatctgctttggaaagtcttggcattattgtgtcatttaatttaaaatttttaagtttttttagtttcttcccttattgaggacttattaggcgctaattagctttatgctagacatctcatgcatggcagtgaatgaaaacaacactgcctttgagggttttaacttgtatatagtttataccattttttttccaggttatagaatcaaagaaattgtttcaattcatatcacagtatttctctattaaatcaaatggtattttgcttgcataaatttaagtatccaagttgagatcttacatagaatctgttaatctaatattagtgttttcttcatttcattgtcttgggtttttttttcttaataattatttttcccaataccatccatttgttttgctcttacatttttaagtcttttatgttccaaatcaggtgacttacatcctccacttgtccattgaggatagcccagtaaacctttattctgactttaaattgcctccttgcttcaagaactgagttgcatgactcagttttctttgctagaaatatccctggatagtctcgtatgtattcttgatcaatgaattgcagaagatttgattaaaaattttaaatggatttcagggataaactatttgtatcaaatgtcatcaccaggaatttctacaactgaaaaatttgaattgttatttttattgaagaatatttatctttaagataaatgcaacttgctataaaatgatagaaatg

SEQ ID NO: 53459 - DNA, 234 bp, Homo sapiens
atgaagcagaggcaaccaacagaaattgacatcagaaactctgctggatccccaccagcatgctaccgatgaatcctgctctctttcagatgaatttttattttttttccaataaggccagccctaccctggaatctggaaccagttctggcccagggtagaaaggctaccaagcacctatggtagaagccctggtgtccaggcatgccttggaccttattattgaccttctct

SEQ ID NO: 53460 - DNA, 439 bp, Homo sapiens
cacacaccacactaccagcgaaaggagtgcctatttctccaccttcattgtttgataggtgaaaaatgtggttccctttaaaagtgataatcttgactagtagtgtggttaagcatctttttaaatgttaatgaccaattagttttcctcctctcgggaagagctcctcattgcctttgctttttgtcagttggcaggggttcattttgtcttaggaatgtataatcttttgtgtagctaatctttacaattatcttccagtctatttcttgtttgttaacagagtcaagaaaaagttcttaaaaaatacaatcacacaggtttatattttacttcaagacatctcagttatctgttttgcctcataattcaaaccataatgctttgattaacggaggctttttagtaaattttgatctgaaaaggcaaaaattcctta

SEQ ID NO: 53461 - DNA, 434 bp, Homo sapiens
cgtatttgtaagtatatcattgtggaaagtatttctaattacagacttactaagaaaattcaaaaactaactggatggttacacctagagaaatttatttaagttgacttggatctaccattatttaacactatgtcttcattaaagattagaggtgctcactgtaaagatgtcatgatactttaaaaggattacaatgatcattgtttaaatggtatttaatttttaaatgttaaacttttataccattttaaaagaacttcattttcaagtgttttgaaaatgagcatgtatgtgttttaagtattcctctgatatatctctaagtgaagattattgtaagttgtttctattataaaccacttttcatgtggtttcaatatcttgtattatattgttattgttattatagtttatgcagttattagcaaatg

SEQ ID NO: 53462 - DNA, 258 bp, Homo sapiens
  misc_feature (42)..(42): n is a, c, g, or t
tcaggatgcaaagaattatcatgcctggcagcatcgacaatnggttattcaggaatttaaacttttataccattttaaaagaacttcattttcaagtgttttgaaaatgagcatgtatgtgttttaagtattcctctgatatatctctaagtgaagattattgtaagttgtttctattataaaccacttttcatgtggtttcaatatcttgtattatattgttattgttattatagtttatgcagttattagcaaatg

SEQ ID NO: 53463 - DNA, 1741 bp, Homo sapiens
aacagttctgggggtcgtccgatcctgcaggtagtgtccgcgtgggaggggaggtgcagccgtcagcgctgccggcggctcccgttacgtgaattagtgagaggttcaaacttcttccccaggcttcagtgtcacatcttttcacacgggcaccccgagggcccggactggaaaggcgagccagccatctcgagactgggcgctcctgcccgccttttagtgcccatgtggccccatcctgggtgtgggagcggcggggcttccggggagggcgctgggacgcgcggacgaggccctccccgtttagggaatgggtggctttcggagtcttctgggggcccggcatgcccgctgcttgcggggcgtcccaggtggtgcaggacccgtgagacgctgaacctggggcctcgtaacgcctaggtttccattcgggcgctctggatgggtccgagactcggcatttctcacaggttcccaggaaacgatgccagcgctttgagtagcgaagaggtggagaaatagcccgggccgtttgcaagctttgaaggtccaggctctctttcacactcctcagtgtcatctcaaactgtcaaacgcagccacatccgttatacaatacatgttttgtagtaaaagtgttttgttgtgccgtaagatacagaaagtgtttttaaaaattaacttggctcttgcaatttggctgtctcaatttgtaattcacgtttggctcttacaactcactgtcctgtccgttttcaggaatgctcctgatgagtaagcattcaactcacaaattgctttcaaatgtaacaaaacaattttatgaattaaatttaacaggccgggcgcggtggctcacgcctttaatccctgcactttgggaggccgaggtgggcagattgcctgaggtcaggagatcgagaccagcctgacgaacagggtgaaaccccatctctactaaaaatacaaaaattagccagatgtggtggtgggcgcctgtaatcccagctactagggaggctgaggcaggagaatcgcttgaacctgggaggcagaggttgcagtgagcagagatggcaacactgcgctccagcctgggcgatagtgagactctgtcttaaaaaaataataatagtgaattaaatttaacagttaatttgatataatagtgtattttgtagacatttacttcaacatgtattgattttgatttttatcatttcatttgaatattgcagccaataattcttttttggtttttgcaagttatgcattgttttttatggtgaaaagttgaacataatatctaacactaggaggaggatagtcaaatttggttttggtagaaaataaaccctgtgcaaccataaacttgtttttcaggaatatttaagaacatttaaattgcatatcatataatgttaagtgataagtgaaattttaaaaagccaatatgcagcctagcgcggtggctcacgcctgtaatcccagcactttgggaggcagatgcgggtggatcacgaggtcaggagatcgagaccatcctggctaacacggtgaaaccccgtctctactaaaaatacaaaaacaaaattagccaggtttggtggcaggcacctgtagtcccagctactcaggagcctgaggcgggagaatggtgtgaacccaggagacggagctggcagtgagccgagattgcaccactgcactccagcctgggcagcagagcgagactccgtat

SEQ ID NO: 53464 - DNA, 1446 bp, Homo sapiens
aacagttctgggggtcgtccgatcctgcaggtagtgtccgcgtgggaggggaggtgcagccgtcagcgctgccggcggctcccgttacgtgaattagtgagaggttcaaacttcttccccaggcttcagtgtcacatcttttcacacgggcaccccgagggcccggactggaaaggttcccaggaaacgatgccagcgctttgagtagcgaagaggtggagaaatagcccgggccgtttgcaagctttgaaggtccaggctctctttcacactcctcagtgtcatctcaaactgtcaaacgcagccacatccgttatacaatacatgttttgtagtaaaagtgttttgttgtgccgtaagatacagaaagtgtttttaaaaattaacttggctcttgcaatttggctgtctcaatttgtaattcacgtttggctcttacaactcactgtcctgtccgttttcaggaatgctcctgatgagtaagcattcaactcacaaattgctttcaaatgtaacaaaacaattttatgaattaaatttaacaggccgggcgcggtggctcacgcctttaatccctgcactttgggaggccgaggtgggcagattgcctgaggtcaggagatcgagaccagcctgacgaacagggtgaaaccccatctctactaaaaatacaaaaattagccagatgtggtggtgggcgcctgtaatcccagctactagggaggctgaggcaggagaatcgcttgaacctgggaggcagaggttgcagtgagcagagatggcaacactgcgctccagcctgggcgatagtgagactctgtcttaaaaaaataataatagtgaattaaatttaacagttaatttgatataatagtgtattttgtagacatttacttcaacatgtattgattttgatttttatcatttcatttgaatattgcagccaataattcttttttggtttttgcaagttatgcattgttttttatggtgaaaagttgaacataatatctaacactaggaggaggatagtcaaatttggttttggtagaaaataaaccctgtgcaaccataaacttgtttttcaggaatatttaagaacatttaaattgcatatcatataatgttaagtgataagtgaaattttaaaaagccaatatgcagcctagcgcggtggctcacgcctgtaatcccagcactttgggaggcagatgcgggtggatcacgaggtcaggagatcgagaccatcctggctaacacggtgaaaccccgtctctactaaaaatacaaaaacaaaattagccaggtttggtggcaggcacctgtagtcccagctactcaggagcctgaggcgggagaatggtgtgaacccaggagacggagctggcagtgagccgagattgcaccactgcactccagcctgggcagcagagcgagactccgtat

SEQ ID NO: 53465 - DNA, 352 bp, Homo sapiens
gtggtgagccgagatagtgccactgtactccagcctggtgacagagcgagactctgtccaaaatatatatattttggatgggtgtattggttaattgctaaattttaaaattgtttattcttgattatatatcctacactgagccttggaagaaattaaaatataattacagtcttttcataatgcaatccttagattcagtaataccctttaataattatacccagttatttagtatctggaaatgtatctacataccaaattgtacacaaaaaaagtaaaataactacataaaccataaaatctctaaatcactttgccatcaagtgtgtttacaaacaaaatatgattg

SEQ ID NO: 53466 - DNA, 720 bp, Homo sapiens
tactaaacaaaatacaaaaaattagctggacgtggtggctggcgcctgtagtcccagctacttgggaggctgaggcaggagaatggcgtgaacccggaaggcagagcttgcagtgagctgagatgtgccactgcgctccagcctgggcaacagagcgagactccatctcaaaaaagtttacgtcactttttaaaataacatctggaatgtaaaaggggcaacacttttacaacattattcttttgtgtttaacttaattttttgaaaaccccagtacaacaggagccaattttttacctaaggaaagatgtttttctgtctcgatttactgctttgtgtatatcattttgtatttcctatagtgtgaagcctcagtttaggtcatctggtggttcagaacactcaacagagggctctgtatccttgggggatggacagttgaacagatatagttcaagaaactttccagctgaacggcataaccccacagtaactgggcatcaggagcaaacttaccttcagaaggagacttccactttgcaggtggaacagaatggggactatggtaggggcaggtaagaaaataaagtacctgaaaacctttgataataatgtgatcatcctgaataattgaagaacgtgatcttcataataattaaatgagcatttaattattggtatatggttatattaaataaatacgttattttcagaacatga

SEQ ID NO: 53467 - DNA, 176 bp, Homo sapiens
agcaacttaagttgatgaagtctatccataccttcaatgactccggatgttcttctctctctgctgtgatttccccttaatttcaatttattagaaacataaatgttatccatgaatatatgtacttgtaagagctgtattaaaactttgtctgcagtctgacatctgggtcatct

SEQ ID NO: 53468 - DNA, 1584 bp, Homo sapiens
gaggggcaaggcgagtgtgtgtccttatcctagcaattggggcgcgggcctgtgagccagttggagttgcggcggcgggaacgattgggctgagcagaggacgacatgttgcttttcgtggagcaggtagcatctaaaggaactggtttaaatcctaatgccaaagtatggcaagaaattgctcctggaaatactgatgccaccccagtaactcatggaactgaaagctcttggcatgaaatagcagctacatcaggtgctcatcctgagggtaatgcagagctctcagaagatatatgtaaagaatatgaagtaatgtattcttcatcttgtgaaaccacaagaaatactacaggcattgaagaatcaactgatgggatgattttaggaccagaagatctgagttaccaaatatatgatgtttccggagaaagcaattcagcagtttctacagaagacctaaaagaatgtctgaagaaacaattagaattctgtttttcacgagaaaatttgtcaaaggatctttacttgatatctcaaatggatagtgatcagttcatcccaatttggacagttgccaacatggaagaaataaaaaagttgactacagaccctgatctaattcttgaagtgttaagatcttctcccatggtacaagttgatgagaagggtgagaaagtgagaccaagtcataagcgttgtattgtaattcttagagagattcctgaaacaacaccaatagaggaagtgaaaggtttgttcaaaagtgaaaactgccccaaagtgataagctgtgagtttgcacacaatagcaactggtatatcactttccagtcagacacagatgcacaacaggcttttaaatacttaagagaagaagttaaaacatttcagggcaagccaattatggcaaggataaaagccatcaatacattttttgctaagaatggttatcgattaatggattctagtatctatagtcaccccattcaaactcaagcacagtatgcctccccagtctttatgcagcctgtatataatcctcaccaacagtactcggtctatagtattgtgcctcagtcttggtctccaaatcctacaccttactttgaaacaccactggctccctttcccaatggtagttttgtgaatggctttaattcgccaggatcttataaaacaaatgctgctgctatgaatatgggtcgaccattccaaaaaaatcgtgtgaagcctcagtttaggtcatctggtggttcagaacactcaacagagggctctgtatccttgggggatggacagttgaacagatatagttcaagaaactttccagctgaacggcataaccccacagtaactgggcatcaggagcaaacttaccttcagaaggagacttccactttgcaggtggaacagaatggggactatggtaggggcaggtaagaaaataaagtacctgaaaacctttgataataatgtgatcatcctgaataattgaagaacgtgatcttcataataattaaatgagcatttaattattggtatatggttatattaaataaatacgttattttcagaacatga

SEQ ID NO: 53469 - DNA, 1809 bp, Homo sapiens
ggctcacaacactctaggaagctatgggaggtgaggcccgtagtggagaagaattgaaggagaaaaacggagggctgttctggtgtggcgcatttatggggttaagtggcatgggatttctgtttctgatagtaaatagacgggctcactttgttaccccggctggagtgcggtgtcacgatctcggctcactgtaacctccacctcccaggttcaagcattcctcctgtctcagctctccaagtggctgggactacagtgagaatcagagcgtctactgcacctttcagatgaccgggtgccgtggctcaacacctataatcccagcacttgggatgggaggctaagcaggtagcatctaaaggaactggtttaaatcctaatgccaaagtatggcaagaaattgctcctggaaatactgatgccaccccagtaactcatggaactgaaagctcttggcatgaaatagcagctacatcaggtgctcatcctgagggtaatgcagagctctcagaagatatatgtaaagaatatgaagtaatgtattcttcatcttgtgaaaccacaagaaatactacaggcattgaagaatcaactgatgggatgattttaggaccagaagatctgagttaccaaatatatgatgtttccggagaaagcaattcagcagtttctacagaagacctaaaagaatgtctgaagaaacaattagaattctgtttttcacgagaaaatttgtcaaaggatctttacttgatatctcaaatggatagtgatcagttcatcccaatttggacagttgccaacatggaagaaataaaaaagttgactacagaccctgatctaattcttgaagtgttaagatcttctcccatggtacaagttgatgagaagggtgagaaagtgagaccaagtcataagcgttgtattgtaattcttagagagattcctgaaacaacaccaatagaggaagtgaaaggtttgttcaaaagtgaaaactgccccaaagtgataagctgtgagtttgcacacaatagcaactggtatatcactttccagtcagacacagatgcacaacaggcttttaaatacttaagagaagaagttaaaacatttcagggcaagccaattatggcaaggataaaagccatcaatacattttttgctaagaatggttatcgattaatggattctagtatctatagtcaccccattcaaactcaagcacagtatgcctccccagtctttatgcagcctgtatataatcctcaccaacagtactcggtctatagtattgtgcctcagtcttggtctccaaatcctacaccttactttgaaacaccactggctccctttcccaatggtagttttgtgaatggctttaattcgccaggatcttataaaacaaatgctgctgctatgaatatgggtcgaccattccaaaaaaatcgtgtgaagcctcagtttaggtcatctggtggttcagaacactcaacagagggctctgtatccttgggggatggacagttgaacagatatagttcaagaaactttccagctgaacggcataaccccacagtaactgggcatcaggagcaaacttaccttcagaaggagacttccactttgcaggtggaacagaatggggactatggtaggggcaggtaagaaaataaagtacctgaaaacctttgataataatgtgatcatcctgaataattgaagaacgtgatcttcataataattaaatgagcatttaattattggtatatggttatattaaataaatacgttattttcagaacatga

SEQ ID NO: 53470 - DNA, 1574 bp, Homo sapiens
ccagcacacctggttattttgacgtgtgtttgtttggcggggggggttttaccttgtttactatggtttttataccatgaaaacgtttttattatttattaattaattaaagctgtcattttcttttcttttgctctactgattctactgtaggcagaaatagtatagtcatgtaaaatatatgttaaaatgtaaattaaatgtattttttaaaatatacacttaattctttgttgctataatgtgttcctcttctaggcaaggataaaagccatcaatacattttttgctaagaatggttatcgattaatggattctagtatctatagtcaccccattcaaactcaagcacagtatgcctccccagtctttatgcagcctgtatataatcctcaccaacagtactcggtctatagtattgtgcctcagtcttggtctccaaatcctacaccttactttgaaacaccactggtaagtgagatccttacaataaaatataataatatttttaatttgagctgaaatttgaagaaatcagttggagtgggagctcatttatgttgacattgatgactttttggcctttattttattttattttttgtatttttcgtagagatggaattttgccatgttgcccaggctggtctcgaactcctgtgctcaggcagtccacccgcctcagcctcccaaaatgctaggattacaagccactatgcccggccactttttggcttttaaacagtgatatggatatctaattctccataccaaataaatgcatatgactaagaggtgagctattagagcgcataattttattccataaaatttgctgagtgaattgaaagaagagactggataacttttgcgtgattttaaatgcattttagtgttgcgaaatgtcagaccagacattctttactaagttatgaattgttcataaatccagtggtacttgaagtgaatattgcagaaatgaatcagtaaaatattttaagatatttttggcttgtaaaagataaattcataagctcattaaggttcttgtgaccctcacaccagattttacctttgccattaatattgtttaaacatacatttttttctaggctccctttcccaatggtagttttgtgaatggctttaattcgccaggatcttataaaacaaatgctgctgctatgaatatgggtcgaccattccaaaaaaatcgtgtgaagcctcagtttaggtcatctggtggttcagaacactcaacagagggctctgtatccttgggggatggacagttgaacagatatagttcaagaaactttccagctgaacggcataaccccacagtaactgggcatcaggagcaaacttaccttcagaaggagacttccactttgcaggtggaacagaatggggactatggtaggggcaggtaagaaaataaagtacctgaaaacctttgataataatgtgatcatcctgaataattgaagaacgtgatcttcataataattaaatgagcatttaattattggtatatggttatattaaataaatacgttattttcagaacatga

SEQ ID NO: 53471 - DNA, 1673 bp, Homo sapiens
gaggggcaaggcgagtgtgtgtccttatcctagcaattggggcgcgggcctgtgagccagttggagttgcggcggcgggaacgattgggctgagcagaggacgacatgttgcttttcgtggagtgagaatcagagcgtctactgcacctttcagatgaccgggtgccgtggctcaacacctataatcccagcacttgggatgggaggctaagcaggtagcatctaaaggaactggtttaaatcctaatgccaaagtatggcaagaaattgctcctggaaatactgatgccaccccagtaactcatggaactgaaagctcttggcatgaaatagcagctacatcaggtgctcatcctgagggtaatgcagagctctcagaagatatatgtaaagaatatgaagtaatgtattcttcatcttgtgaaaccacaagaaatactacaggcattgaagaatcaactgatgggatgattttaggaccagaagatctgagttaccaaatatatgatgtttccggagaaagcaattcagcagtttctacagaagacctaaaagaatgtctgaagaaacaattagaattctgtttttcacgagaaaatttgtcaaaggatctttacttgatatctcaaatggatagtgatcagttcatcccaatttggacagttgccaacatggaagaaataaaaaagttgactacagaccctgatctaattcttgaagtgttaagatcttctcccatggtacaagttgatgagaagggtgagaaagtgagaccaagtcataagcgttgtattgtaattcttagagagattcctgaaacaacaccaatagaggaagtgaaaggtttgttcaaaagtgaaaactgccccaaagtgataagctgtgagtttgcacacaatagcaactggtatatcactttccagtcagacacagatgcacaacaggcttttaaatacttaagagaagaagttaaaacatttcagggcaagccaattatggcaaggataaaagccatcaatacattttttgctaagaatggttatcgattaatggattctagtatctatagtcaccccattcaaactcaagcacagtatgcctccccagtctttatgcagcctgtatataatcctcaccaacagtactcggtctatagtattgtgcctcagtcttggtctccaaatcctacaccttactttgaaacaccactggctccctttcccaatggtagttttgtgaatggctttaattcgccaggatcttataaaacaaatgctgctgctatgaatatgggtcgaccattccaaaaaaatcgtgtgaagcctcagtttaggtcatctggtggttcagaacactcaacagagggctctgtatccttgggggatggacagttgaacagatatagttcaagaaactttccagctgaacggcataaccccacagtaactgggcatcaggagcaaacttaccttcagaaggagacttccactttgcaggtggaacagaatggggactatggtaggggcaggtaagaaaataaagtacctgaaaacctttgataataatgtgatcatcctgaataattgaagaacgtgatcttcataataattaaatgagcatttaattattggtatatggttatattaaataaatacgttattttcagaacatga

SEQ ID NO: 53472 - DNA, 1725 bp, Homo sapiens
gaggggcaaggcgagtgtgtgtccttatcctagcaattggggcgcgggcctgtgagccagttggagttgcggcggcgggaacgattgggctgagcagaggacgacatgttgcttttcgtggagcaggtagcatctaaaggaactggtttaaatcctaatgccaaagtatggcaagaaattgctcctggaaatactgatgccaccccagtaactcatggaactgaaagctcttggcatgaaatagcagctacatcaggtgctcatcctgagggtaatgcagagctctcagaagatatatgtaaagaatatgaagtaatgtattcttcatcttgtgaaaccacaagaaatactacaggcattgaagaatcaactgatgggatgattttaggaccagaagatctgagttaccaaatatatgatgtttccggagaaagcaattcagcagtttctacagaagacctaaaagaatgtctgaagaaacaattagaattctgtttttcacgagaaaatttgtcaaaggatctttacttgatatctcaaatggatagtgatcagttcatcccaatttggacagttgccaacatggaagaaataaaaaagttgactacagaccctgatctaattcttgaagtgttaagatcttctcccatggtacaagttgatgagaagggtgagaaagtgagaccaagtcataagcgttgtattgtaattcttagagagattcctgaaacaacaccaatagaggaagtgaaaggtttgttcaaaagtgaaaactgccccaaagtgataagctgtgagtttgcacacaatagcaactggtatatcactttccagtcagacacagatgcacaacaggcttttaaatacttaagagaagaagttaaaacatttcagggcaagccaattatgagacggagttttgctgtgtcatccaggttggtctcttaactcctgagggcaagcgatccccccactaaggcctcccaaagtgttgggactatagacgtgagccactgcgcccagcatttgtgatgagtattttccatggatacagaatgcagggatgacagctaaaattattttccattcttttaagataccattctggactcttgtttctgatgagatgttcaccatcattcacatggttcttcccctgtatatgatgtgtcctttttctttgcctgctgtcaagatgttttatttttggtttccagtaggttggctatggtgtgtctagtatgcttttacttattatacttgggaaatactaaacttcttggctctgtatgttgatattctttactgcatttggggaatttccaaatacttgccaaaaattttttctgccctctcttctcctttctttttttggtactccaatttcatatgttggactgattgatgtcactgagattctgttcatttttcttcaacctatttttgttgttgttgttgttctccagattggatcatttctgtggatttgggttcatcttcaagttcactgaacttttcttttgctgtccccaatgtgataggactgtccagtgaatattttagatgctgtattctagagtttccatttttcaaaatatttcttctctctctgctgtgatttccccttaatttcaatttattagaaacataaatgttatccatgaatatatgtacttgtaagagctgtattaaaactttgtctgcagtctgacatctgggtcatct

SEQ ID NO: 53473 - DNA, 827 bp, Homo sapiens
  misc_feature (808)..(808): n is a, c, g, or t
ggctcacaacactctaggaagctatgggaggtgaggcccgtagtggagaagaattgaaggagaaaaacggagggctgttctggtgtggcgcatttatggggttaagtggcatgggatttctgtttctgatagtaaatagacgggctcactttgttaccccggctggagtgcggtgtcacgatctcggctcactgtaacctccacctcccaggttcaagcattcctcctgtctcagctctccaagtggctgggactacagtgagaatcagagcgtctactgcacctttcagatgaccgggtgccgtggctcaacacctataatcccagcacttgggatgggaggctaagcaggtagcatctaaaggaactggtttaaatcctaatgccaaagtatggcaagaaattgctcctggaaatactgatgccaccccagtaactcatggaactgaaagctcttggcatgaaatagcagctacatcaggtgctcatcctgagggtaatgcagagctctcagaagatatatgtaaagaatatgaagtaatgtattcttcatcttgtgaaaccacaagaaatactacaggcattgaagaatcaactgatgggatgattttaggaccagaagatctgagttaccaaatatatgatgtttccggagaaagcaattcagcagtttctacagaagacctaaaagaatgtctgaagaaacaattagaattctgtttttcacgagaaaatttgtcaaaggatctttacttgatatctcaaatggatagtgatcagttcatcccaatttggacaggccaccttnagaaatggggatcctcaga

SEQ ID NO: 53474 - DNA, 502 bp, Homo sapiens
aggaggattgcttgagcccaggagtttgagaacagtctgggcaacataatgagagcctgtctctacaaaaaaataaaaataaaaagttagctgggtatcatggcacaagtttgtggtcctagctactcaagaagctgtggtgggaggatcatttgagcccaggaggttgaggctatactgagctgtgatcacaccactgtactctagcctgggcaacaaagggagaccctgtttctctgaaacaatagctttgtggtgaattttgattgtagatactttgtggcttctgagtacaacagtatgtcagatttatcacctctactaacatgctattaactttttttccctcttcttttctaccatcaggagaaagcaattcagcagtttctacagaagacctaaaagaatgtctgaagaaacaattagaattctgtttttcacggtattgctgtttcccctttattgaattttattagtagatgtaaaatacgtgtgaaataga

SEQ ID NO: 53475 - DNA, 583 bp, Homo sapiens
gatgtaaaaattgaacctggatgattgatggggcaaaatacatttaatcaatttatacattttatttctgttttacagcatttatggggttaagtggcatgggatttctgtttctgatagtaaataggtaagtaaaacaaaaggttatgtatgtccgaagagacggttttaccatatttatggtgattttcttcctaactcatggttctgttaccttaggtctgtaatttcttaggacaggaggataccattttcacaagaatttgatggttctctttttcctttcatttttatctctctgaaggtagaatttagcattaaatgggacaataatcaggactgcctttggcttatttggggatgacatattgcttagaaataagggtggtgattgaagcatcagttttacagatagtttagatctttttgttgagtatctatgtgcttgcatactatgtatatgttggcagatagtttagcatgcatttggacagtttacatcgtttagtagatatttataaaactgtaatctcaagggcttctaatcctgtggaagtgatcaagattttgatggcggtctaaa

SEQ ID NO: 53476 - DNA, 1633 bp, Homo sapiens
gaggggcaaggcgagtgtgtgtccttatcctagcaattggggcgcgggcctgtgagccagttggagttgcggcggcgggaacgattgggctgagcagaggacgacatgttgcttttcgtggagcatttatggggttaagtggcatgggatttctgtttctgatagtaaatagcaggtagcatctaaaggaactggtttaaatcctaatgccaaagtatggcaagaaattgctcctggaaatactgatgccaccccagtaactcatggaactgaaagctcttggcatgaaatagcagctacatcaggtgctcatcctgagggtaatgcagagctctcagaagatatatgtaaagaatatgaagtaatgtattcttcatcttgtgaaaccacaagaaatactacaggcattgaagaatcaactgatgggatgattttaggaccagaagatctgagttaccaaatatatgatgtttccggagaaagcaattcagcagtttctacagaagacctaaaagaatgtctgaagaaacaattagaattctgtttttcacgagaaaatttgtcaaaggatctttacttgatatctcaaatggatagtgatcagttcatcccaatttggacagttgccaacatggaagaaataaaaaagttgactacagaccctgatctaattcttgaagtgttaagatcttctcccatggtacaagttgatgagaagggtgagaaagtgagaccaagtcataagcgttgtattgtaattcttagagagattcctgaaacaacaccaatagaggaagtgaaaggtttgttcaaaagtgaaaactgccccaaagtgataagctgtgagtttgcacacaatagcaactggtatatcactttccagtcagacacagatgcacaacaggcttttaaatacttaagagaagaagttaaaacatttcagggcaagccaattatggcaaggataaaagccatcaatacattttttgctaagaatggttatcgattaatggattctagtatctatagtcaccccattcaaactcaagcacagtatgcctccccagtctttatgcagcctgtatataatcctcaccaacagtactcggtctatagtattgtgcctcagtcttggtctccaaatcctacaccttactttgaaacaccactggctccctttcccaatggtagttttgtgaatggctttaattcgccaggatcttataaaacaaatgctgctgctatgaatatgggtcgaccattccaaaaaaatcgtgtgaagcctcagtttaggtcatctggtggttcagaacactcaacagagggctctgtatccttgggggatggacagttgaacagatatagttcaagaaactttccagctgaacggcataaccccacagtaactgggcatcaggagcaaacttaccttcagaaggagacttccactttgcaggtggaacagaatggggactatggtaggggcaggtaagaaaataaagtacctgaaaacctttgataataatgtgatcatcctgaataattgaagaacgtgatcttcataataattaaatgagcatttaattattggtatatggttatattaaataaatacgttattttcagaacatga

SEQ ID NO: 53477 - DNA, 1501 bp, Homo sapiens
cctggtggcgaattcggcacgagggttgcttttcgtggagcaggtagcatctaaaggaactggtttaaatcctaatgccaaagtatggcaagaaattgctcctggaaatactgatgccaccccagtaactcatggaactgaaagctcttggcatgaaatagcagctacatcaggtgctcatcctgagggtaatgcagagctctcagaagatatatgtaaagaatatgaagtaatgtattcttcatcttgtgaaaccacaagaaatactacaggcattgaagaatcaactgatgggatgattttaggaccagaagatctgagttaccaaatatatgatgtttccggagaaagcaattcagcagtttctacagaagacctaaaagaatgtctgaagaaacaattagaattctgtttttcacgagaaaatttgtcaaaggatctttacttgatatctcaaatggatagtgatcagttcatcccaatttggacagttgccaacatggaagaaataaaaaagttgactacagaccctgatctaattcttgaagtgttaagatcttctcccatggtacaagttgatgagaagggtgagaaagtgagaccaagtcataagcgttgtattgtaattcttagagagattcctgaaacaacaccaatagaggaagtgaaaggtttgttcaaaagtgaaaactgccccaaagtgataagctgtgagtttgcacacaatagcaactggtatatcactttccagtcagacacagatgcacaacaggcttttaaatacttaagagaagaagttaaaacatttcagggcaagccaattatggcaaggataaaagccatcaatacattttttgctaagaatggttatcgattaatggattctagtatctatagtcaccccattcaaactcaagcacagtatgcctccccagtctttatgcagcctgtatataatcctcaccaacagtactcggtctatagtattgtgcctcagtcttggtctccaaatcctacaccttactttgaaacaccactggctccctttcccaatggtagttttgtgaatggctttaattcgccaggatcttataaaacaaatgctgctgctatgaatatgggtcgaccattccaaaaaaatcgtgtgaagcctcagtttaggtcatctggtggttcagaacactcaacagagggctctgtatccttgggggatggacagttgaacagatatagttcaagaaactttccagctgaacggcataaccccacagtaactgggcatcaggagcaaacttaccttcagaaggagacttccactttgcaggtggaacagaatggggactatggtaggggcaggtaagaaaataaagtacctgaaaacctttgataataatgtgatcatcctgaataattgaagaacgtgatcttcataataattaaatgagcatttaattattggtatatggttatattaaataaatacgttattttcagaacatga

SEQ ID NO: 53478 - DNA, 1438 bp, Homo sapiens
gaggggcaaggcgagtgtgtgtccttatcctagcaattggggcgcgggcctgtgagccagttggagttgcggcggcgggaacgattgggctgagcagaggacgacatgttgcttttcgtggagcaggtagcatctaaaggaactggtttaaatcctaatgccaaagtatggcaagaaattgctcctggaaatactgatgccaccccagtaactcatggaactgaaagctcttggcatgaaatagcagctacatcaggtgctcatcctgagggtaatgcagagctctcagaagatatatgtaaagaatatgaagtaatgtattcttcatcttgtgaaaccacaagaaatactacaggcattgaagaatcaactgatgggatgattttaggaccagaagatctgagttaccaaatatatgatgtttccggagaaagcaattcagcagtttctacagaagacctaaaagaatgtctgaagaaacaattagaattctgtttttcacgagaaaatttgtcaaaggatctttacttgatatctcaaatggatagtgatcagttcatcccaatttggacagttgccaacatggaagaaataaaaaagttgactacagaccctgatctaattcttgaagtgttaagatcttctcccatggtacaagttgatgagaagggtgagaaagtgagaccaagtcataagcgttgtattgtaattcttagagagattcctgaaacaacaccaatagaggaagtgaaaggtttgttcaaaagtgaaaactgccccaaagtgataagctgtgagtttgcacacaatagcaactggtatatcactttccagtcagacacagatgcacaacaggcttttaaatacttaagagaagaagttaaaacatttcagggcaagccaattatggcaaggataaaagccatcaatacattttttgctaagaatggttatcgattaatggattctagtatctatagtcaccccattcaaactcaagcacagtatgcctccccagtctttatgcagcctgtatataatcctcaccaacagtactcggtctatagtattgtgcctcagtcttggtctccaaatcctacaccttactttgaaacaccactggctccctttcccaatggtagttttgtgaatggctttaattcgccaggatcttataaaacaaatgctgctgctatgaatatgggtcgaccattccaaaaaaatcgtgtgaagcctcagtttaggtcatctggtggttcagaacactcaacagagggctctgtatccttgggggatggacagttgaacagatatagttcaagaaactttccagctgaacggcataaccccacagtaactgggcatcaggagcttactccccaagggttttccaattacacgagaccgcacggtaggtaccggactttttacaaacagt

SEQ ID NO: 53479 - DNA, 345 bp, Homo sapiens
  misc_feature (163)..(163): n is a, c, g, or t
ttttttgtgactggcttatttcattcagcataatgtcctcaacgtttatccatgttgaagcatatgtaagaacttccttcctttttaagactgaataatatttcattgtgtgtatatatcacattttgatatctgtccgttaatttatgggcacttgtttttnccatgttttagctattatgaataatattgctatgaacagtctttagtaagaatcatttgaggggaagagaaacacaaaatgacagcggtaactgccaaagcttctctttgggagtttattgatattcctaaatgataggagaaggaaaactgatggaagaaaatgcaacagcctttaagggg

SEQ ID NO: 53480 - DNA, 204 bp, Homo sapiens
gggtgtttttttttaaattgttagtcctactctcccttaccacagccctttcgacagaacatcgtctatcattaccctttgtatccccaggggctaaaatatgtttggtacataatccaagcttaaggcacaattgtgggagaaaattgttattaaaataaaccaggggaatacaacagtaataaaagctggcagtctaaaagc

SEQ ID NO: 53481 - DNA, 425 bp, Homo sapiens
gccttactctatgaacccaaataattccctgagtctggctcccaagtccattctacagggaagaggattaagttctaaaaacttaaaatgctgacaattttgctatagcttcatgaaattgatcccaagaaccaggaactatcatgatttatagaaagatagatgttgtattagcttttgttcacggggaatctcagatttgttgaatgatctgatgttcagattagaagcagccacgagcccctgaagaagcaggccgaatgcagcaggggaggtctgtgctccagtcctggatttgtcgtttcctttctgcatgtgctggagcaaaccacttattgtctgtcagcctcagtttcctcatctgcatgcactgatgaccataatcctggcaatgacacaactttgctgtgaggctctcatgagag

SEQ ID NO: 53482 - DNA, 632 bp, Homo sapiens
tggactctcaccattcagtggatgaagagtacttattgctagaatgttcttcctcatatgaacttgacaacgttctgctctctaattccatttatttagctgtttcgaattgaatttgacagtttctagatccctgcagttggaatgatttaaggccacgggagtgaatctcaggtcctcagttttcattctcccagggttatgaataaggtaaacacagcaacaaaaaagttatgagaaccaagagctctgagaaggctgccaacgatgatcacagtgtccgtgtggcccgtgaagatgtcagagagagttgcccacctcttggtctggaaaccttaaaaatcacagacttccagctccatgcctccacggtgaagcgctatggcctgggggcacatcgagggagactcaacatccaggcgggcattaatgaaaatgatttttatgacggagcgtggtgcgcgggaagaaatgacctccagcagtggattgaagtggatgctcggcgcctgaccagattcactggtgtcatcactcaagggaggaactccctctggctgagtgactgggtgacatcctataaggtcatggtgagcaatgacagccacacgtgggtcactgttaagaatgga

SEQ ID NO: 53483 - DNA, 597 bp, Homo sapiens
agcggaggtaaagaagaggcatggaggtgaatgcaggcagcagctttcagggaagaagaagcatcaggctgcagaccttgcctcctccctgccctgatggcaggactgaggcctcccagggatgaagaaactgaggctgaggcagttcaacaacttgcccaaggccacgcagcaggtaaacacagcaacaaaaaagttatgagaaccaagagctctgagaaggctgccaacgatgatcacagtgtccgtgtggcccgtgaagatgtcagagagagttgcccacctcttggtctggaaaccttaaaaatcacagacttccagctccatgcctccacggtgaagcgctatggcctgggggcacatcgagggagactcaacatccaggcgggcattaatgaaaatgatttttatgacggagcgtggtgcgcgggaagaaatgacctccagcagtggattgaagtggatgctcggcgcctgaccagattcactggtgtcatcactcaagggaggaactccctctggctgagtgactgggtgacatcctataaggtcatggtgagcaatgacagccacacgtgggtcactgttaagaatgga

SEQ ID NO: 53484 - DNA, 345 bp, Homo sapiens
tgagacggagtctcactttgtcgcccaggctggagtgcagtggtgtgatctcggctcactgcaagctctgcctcccggggtcatgccattctcctgcctcagcctcccgagtatctgggaattacaggtgtgagccaccgcgcccggcagcattattttttaaagatctgtgatagtgcatgttgtgctagttctttaatacagactatattgtattccatgtcagtttttaaagtttatttccctattgatggcatttaattccaacttttagataaaaggatgtactggacatttttataatttttttgggggaccatgtaagagtttttctagggggaattc

SEQ ID NO: 53485 - DNA, 111 bp, Homo sapiens
ggttaaagtcagttctaaagaaatgacatgataacccggcatacaatagcagatatcttctcaaatctattcaaagaattagctaagacagaattcttaaaaatccaagct

SEQ ID NO: 53486 - DNA, 405 bp, Homo sapiens
cctggggctaagcatcctctcacctcagcctcccaagtagctcagaccacaggcacaccaccatgcccagctaatttttttttattttttgtcaagatgcggttttagtatgttgtccaggctggtctcaaactcctgtgcgtaagtgatcctcccattctccctgttcttaccagcatttgactttgtttagggcagcaacgtgtttaacggaggccccattgcctctgctgagtggggagaccatgtgacaggacactagccactgagaggtaagggaagccactagctatggcttgggtggatatttaaagaagggcagagccagggccaggagcagtggctcaaacctgcaatcctagcacttttgaaggccaaggcgggaggactgcttaagcccaggag

SEQ ID NO: 53487 - DNA, 2356 bp, Homo sapiens
  misc_feature (1098)..(1098): n is a, c, g, or t
atcaaaagaagttcaatactaaagataaagagttttccttattgaaatatatattgttaagcttttaaaccaaatgaaagtatgagtggtcatatttatactgtagtaggttttcataatagattttccagattaaaaccatttgttgaaatcatcaaagagatgttaatcctgctttagcattgatgcaaagttaaaataactgacattaaaaaaatcatttgggaagctttattgaatatattgagataaggtttattgtagtccttctcttcatgcatactgctgttacaattccaggaggtttcaaaatccatgtgaatgaccccattcaaccctcaaactgtccaattcctggcctaattcaccttcactctgctgtagctaccagttgcaggactagctgcattttggccagaactgcatcaccctggaaattttaaacacactctctctcttctgattgccctctttttctggttccatctcagctttattcccactgcattgttctttatctttggagctctctaaatccctagctgtgctagtggtggatgaggtgtttaacaaaggaaatgtaagatcttcctttagttgccagttcagtgtagttttttggaattagtttgctaaatttcttttaaagtgatcagtttagtatccaagaagtaaaatggagcaagttgaaaaattgtcctgcctgtgtttcagtttaggttgttcctaggcgcactgctgacttctcttatgaccttgggtagattcagtctttattggtatttgaacttttaatgtctgttgtgtactctccttagacacatttaaaactttaaagcatttgggcagggggaatgggtaaggatccagttttatttaagactgtcaggacccatctcaatagtagtatctattcccatgagagaaaaatgaaaggcaaggcttacatcagcctagtctcctcacttaggaatcacaacattcctaaggtcagaaacagtgtgaagtaagtctctgaacccattttggagggcagtacatcagaaatacagtggaaattgctctttagctggatgtgagtttcattttaagcaccantgtttatattctttatgtcttgcctttctttttatattgagtttgtttcaccttgtaaaattaagaagagcatgttctagcttttaaatgtgagaattgaattattaatagttttgggtaaaagtatcacctcccatttcttctaccaaaagcagcacatcctcacagacttttcacctcactgaaaatggtcatttaaagtttttactaattcagcatttaaagctttttatttcctccttgatttataacacagctgtttcttgaatagaaaaaactcaaggactacatgcaatctaattagattacattctttgtgtgagtctcctgcatttagtggaggccactaatcaaatcttgatatattttctatttcttttatttatttattcatttaattcatcaagtcaagatggctataattagagcagattactcctaccacattgtattatgatgatctcttcatgtttttttgtttcatactatatgatattcattaagggtagcattgtgccatcctccatcaagcattatatgcttcctttgtgcttatgatgttgaccgtagcaaccttaaactgttaagacttgtttataaacggtgaagctccatcattccaacagagtcagcatgctaattcactctagttcaaatccacattctagttgaatccctgcaatgtaacttgacatttggagaaattgattcataccattttaaagaaatatgatataggtgacagaatccaggatgaagaggtaccttgttgcttagatgatgacgttgtggattcatttcacatctctctctctttttaatgtagctcttctccctccttggtttttattcctccctccttctttcttcttcaagcctcctctaatgttaacatctttggcagtttggccagtgttgacaactactttttgattatttggtattttaaaatatttggtattttaaaatgcttttattggccaggcgtggtggctcacaccttataatcccagtactttgggaggccgaggcgggcagatcatgaggtcgagattgagaccatcctggctaacacggtgaaaccctgtctctactaaaactacaaaaaattagctgggcatggtggcgggcgcctgtagtcccagctactcaggaggctgaggcaggagaatggcatgaacctgggaggcggagctggcagtgagccgagatcgcgccaccgcactctagcctgggtgacagagcgagactccatctc

SEQ ID NO: 53488 - DNA, 839 bp, Homo sapiens
atcaaaagaagttcaatactaaagataaagagttttccttattgaaatatatattgttaagcttttaaaccaaatgaaagtatgagtggtcatatttatactgtagtaggttttcataatagattttccagattaaaaccatttgttgaaatcatcaaagagatgttaatcctgctttagcattgatgcaaagttaaaataactgacattaaaaaaatcatttgggaagctttattgaatatattgagataaggtttattgtagtccttctcttcatgcatactgctgttacaattccaggaggtttcaaaatccatgtgaatgaccccattcaaccctcaaactgtccaattcctggcctaattcaccttcactctgctgtagctaccagttgcaggactagctgcattttggccagaactgcatcaccctggaaattttaaacacactctctctcttctgattgccctctttttctggttccatctcagctttattcccactgcattgttctttatctttggagctctctaaatcccttaaattcattgggtataggattctgtcatcttcatctttgtaatatcagtgcctagactaagcctggcgtataataggcactcagagatttgaagaataaatgactaaatgactgtatcaaatacttgcccattgtttgctgtttctgaattgtacaaggccatcatgataattgatgatcttaataatgtgagaatatgattctcttaccttagtaagagagccatcagtttattggatgatagttatatggaaaaagaagtaaatgctactgtgataaatatttataattttaaaca

SEQ ID NO: 53489 - DNA, 288 bp, Homo sapiens
tatgcctcaggtaatggacacttactttattattacactgagcaaaataatgaaaaccatacatccactgctgaagtggtattaacatcttccagttctttatataaataatcttgatagcccctcctatactccattagtgtctaaaatttagaatatatagtatagtacttgagtttagatcaatgttaacctacatggcaaaacctgccatgtttagtgtatttttttgtataaagtaggtttgatttttatcttacaatatttatcctaatgaaagttataaaa

SEQ ID NO: 53490 - DNA, 2275 bp, Homo sapiens
ctggtccgagggcagcccgaatatgtccctgggtgtgggtatgggtgtggggcaatttgggtgggagcagcgtggaggctccaaggaccaagtcctgcgcctctttggcggggtgtgtgcaggaggaggggggataaataggaggctccctcctcccggcgacattcacggagccggccggcctcccgccctgggtgtttccctgccttgtagccagggtgccagcctgggaagtagtttcgtttccttctgcctccgggattagtttccaggcaccctctcaggcgcccgaggcccgggaagggggcgaagaaggagggagacttgtctaggggctgcccggcccggcagagcggggttgatggaccgggccgcccggtgcagcggcgccagctccctgccactgctcctggcccttgccctgggtctagtgatccttcactgtgtggtggcagatgggaattccaccagaagtcctgaaactaatggcctcctctgtggagaccctgaggaaaactgtgcagctaccaccacacaatcaaagcggaaaggccacttctctaggtgccccaagcaatacaagcattactgcatcaaagggagatgccgcttcgtggtggccgagcagacgccctcctgtgtctgtgatgaaggctacattggagcaaggtgtgagagagttgacttgttttacctaagaggagacagaggacagattctggtgatttgtttgatagcagttatggtagtttttattattttggtcatcggtgtctgcacatgctgtcaccctcttcggaaacgtcgtaaaagaaagaagaaagaagaagaaatggaaactctgggtaaagatataactcctatcaatgaagatattgaagagacaaatattgcttaaaaggctatgaagttacctccaggttggtggcaagctgcaaagtgccttgctcatttgaaaatggacagaatgtgtctcaggaaaaacagctagtagacatgaattttaaataatgtatttactttttatttgcaactttagtttgtgttattattttttaataagaacattaattatatgtatattgtctagtaattgggaaaaaagcaactggttaggtagcaacaacagaagggaaatttcaataacctttcacttaagtattgtcaccaggattactagtcaaacaaaaaagaaaagtagaaaggaggttaggtcttaggaattgaattaataataaagctaccatttatcaagcatttaccatgtgctaataagtttgaaatatattatttcctttattcctttcagcaatccatgagatagctattataatcctcatttcctacatatggaaacagggccaaagaagtcaagtcaaataatctaatccagatttagagagttggagattggtagagacagactagaaatcaagatttatctaaatcaaaatctatgctcttaaccatcatttttgttagtctgaatcggtgcaacctaactcaataatataacccaaggttttatactgaactgtgttttggtatgattgtgagatgtcaagaccgtcttcccacaggcacacagaatgagaaatcctggcctatattgctgttaccatcatgctttctatagaattggcttttattatgtttctttgctcctttataaattctcaatgatgtgactacatttttacattattaaagcaaatagattggccccataactagggaaatgaatagagatggaaaagtaaatgcttggcattccttaagccctgggtaagtgtttatgctcaataaaatgtaaataatattactgaaagaggctgtttatatgggagtaatggtcagtgacaacactggagagaccaggtagggaccggttgtgaccatatcctcatttatgttcttgatgacagcatatatgattgctctcaggtaaattttgatgcagtaaattcatgaccataacatctattacttgggaccatcttgccaagtgctcctttactccatgaaaaaacaatgctttaatgtttcttttttcctggactgagtttggttgaccaacaaaatctctcaagccattttgttttgatcctaaaatatcaatggtggctctcgaaatttggtagagctgatatcaagaaagaatttcaaagatttttatatcttttcaaaatgtattttatagttgctttgcatacactaaataactttgtttatgtaaactgtcaatattatcatgtaataaaataaatttattttt

SEQ ID NO: 53491 - DNA, 2128 bp, Homo sapiens
ctggtccgagggcagcccgaatatgtccctgggtgtgggtatgggtgtggggcaatttgggtgggagcagcgtggaggctccaaggaccaagtcctgcgcctctttggcggggtgtgtgcaggaggaggggggataaataggaggctccctcctcccggcgacattcacggagccggccggcctcccgccctgggtgtttccctgccttgtagccagggtgccagcctgggaagtagtttcgtttccttctgcctccgggattagtttccaggcaccctctcaggcgcccgaggcccgggaagggggcgaagaaggagggagacttgtctaggggctgcccggcccggcagagcggggttgatggaccgggccgcccggtgcagcggcgccagctccctgccactgctcctggcccttgccctgggtctagtgatccttcactgtgtggtggcagatgggaattccaccagaagtcctgaaactaatggcctcctctgtggagaccctgaggaaaactgtgcagctaccaccacacaatcaaagcggaaaggccacttctctaggtgccccaagcaatacaagcattactgcatcaaagggagatgccgcttcgtggtggccgagcagacgccctcctgtgtccctcttcggaaacgtcgtaaaagaaagaagaaagaagaagaaatggaaactctgggtaaagatataactcctatcaatgaagatattgaagagacaaatattgcttaaaaggctatgaagttacctccaggttggtggcaagctgcaaagtgccttgctcatttgaaaatggacagaatgtgtctcaggaaaaacagctagtagacatgaattttaaataatgtatttactttttatttgcaactttagtttgtgttattattttttaataagaacattaattatatgtatattgtctagtaattgggaaaaaagcaactggttaggtagcaacaacagaagggaaatttcaataacctttcacttaagtattgtcaccaggattactagtcaaacaaaaaagaaaagtagaaaggaggttaggtcttaggaattgaattaataataaagctaccatttatcaagcatttaccatgtgctaataagtttgaaatatattatttcctttattcctttcagcaatccatgagatagctattataatcctcatttcctacatatggaaacagggccaaagaagtcaagtcaaataatctaatccagatttagagagttggagattggtagagacagactagaaatcaagatttatctaaatcaaaatctatgctcttaaccatcatttttgttagtctgaatcggtgcaacctaactcaataatataacccaaggttttatactgaactgtgttttggtatgattgtgagatgtcaagaccgtcttcccacaggcacacagaatgagaaatcctggcctatattgctgttaccatcatgctttctatagaattggcttttattatgtttctttgctcctttataaattctcaatgatgtgactacatttttacattattaaagcaaatagattggccccataactagggaaatgaatagagatggaaaagtaaatgcttggcattccttaagccctgggtaagtgtttatgctcaataaaatgtaaataatattactgaaagaggctgtttatatgggagtaatggtcagtgacaacactggagagaccaggtagggaccggttgtgaccatatcctcatttatgttcttgatgacagcatatatgattgctctcaggtaaattttgatgcagtaaattcatgaccataacatctattacttgggaccatcttgccaagtgctcctttactccatgaaaaaacaatgctttaatgtttcttttttcctggactgagtttggttgaccaacaaaatctctcaagccattttgttttgatcctaaaatatcaatggtggctctcgaaatttggtagagctgatatcaagaaagaatttcaaagatttttatatcttttcaaaatgtattttatagttgctttgcatacactaaataactttgtttatgtaaactgtcaatattatcatgtaataaaataaatttattttt

SEQ ID NO: 53492 - DNA, 692 bp, Homo sapiens
ctggtccgagggcagcccgaatatgtccctgggtgtgggtatgggtgtggggcaatttgggtgggagcagcgtggaggctccaaggaccaagtcctgcgcctctttggcggggtgtgtgcaggaggaggggggataaataggaggctccctcctcccggcgacattcacggagccggccggcctcccgccctgggtgtttccctgccttgtagccagggtgccagcctgggaagtagtttcgtttccttctgcctccgggattagtttccaggcaccctctcaggcgcccgaggcccgggaagggggcgaagaaggagggagacttgtctaggggctgcccggcccggcagagcggggttgatggaccgggccgcccggtgcagcggcgccagctccctgccactgctcctggcccttgccctgggtctagtgatccttcactgtgtggtggcagatgggaattccaccagaagtcctgaaactaatggcctcctctgtggagaccctgaggaaaactgtgcagcgacatctcgaatcagcgatgcacacttggcagacacaatgattggcaaagcagtggaacatatgtttgagacagaggatggttctaaagatgagtggaggggaatggtcttagcacgtgcacctgtcatgaacacatggttttacattacctatgagaaagaccctg

SEQ ID NO: 53493 - DNA, 466 bp, Homo sapiens
aagatgtccttattgacaaagccaggctctaaggagactaactgaagacagggttatttcaaaagcaaagaccatgtcatccaacaggaaaaaaacaccgctaaggatgcttactcctgcatagcaacaattggcttgtatgtatgttacaaagaacagaaaatgtggttgtgtctttttaagatccggtaggaaactacatgaggcctggtcctgtgggaaaatgtgctacaaattgacactcacttgatgctgaacttactgtatttgaactttaaaacaaatctcctaattattttgatcttctgtactataatcaaacattctggcacatattcttttcgaatccctgaaatgtctgcttcaggtatcttgttgaatacttattatagaaaagtctagttctagatggcaagagcagatataaagattaaaagcccagcctttacctttacacagctcgcag

SEQ ID NO: 53494 - DNA, 371 bp, Homo sapiens
aaattagggaagccgtcagttattaatcaagttctggccatttggggctgattgttacggaggttattatttagctcctgaattgtcactagagataacaatctcacttcctgcaagttggacttatatcaggctggcttcctgggttgtttattataaatataagggttggtctcccaggcagattgctgcagattgtgagttaaagttctagttttatatatggtctggccattgtccatttgcatattcagtctctcaacaaataaacgatgtgacatccaaacaatagtatataattcagtgctagaaagaaatgtgttatcaagccataaaaaaatgaaggcaacttaaatgcatattactcagtg

SEQ ID NO: 53495 - DNA, 1178 bp, Homo sapiens
attatgctgacctctgacgagctgcaattggttatgaggtctggcgggaatttcctgaccggttggtgggttacccgggtcgtctgcatctctgggaccatgagatgaataagtggaagtatgagtctgagtggacgaatgaagtgtccatggtgctcactggggcagctttttatcacaagtattttaattacctgtatacctacaaaatgcctggggatatcaagaactgggtagatgctcatatgaactgtgaagatattgccatgaacttcctggtggccaacgtcacgggaaaagcagttatcaaggtaaccccacgaaagaaattcaagtgtcctgagtgcacagccatagatgggctttcactagaccaaacacacatggtggagaggtcagagtgcatcaacaagtttgcttcagtcttcgggaccatgcctctcaaggtggtggaacaccgagctgaccctgtcctgtacaaagatgactttcctgagaagctgaagagcttccccaacattggcagcttatgaaacgtgtcattggtggaggtctgaatgtgaggctgggacagagggagagaacaaggcctcccagcactctgatgtcagagtagtaggttaagggtggaaggttgacctacttggatcttggcatgcacccacctaacccactttctcaagaacaagaacctagaatgaatatccaagcacctcgagctatgcaacctctgttcttgtatttcttatgatctctgatgggttcttctcgaaaatgccaagtggaagactttgtggcatgctccagatttaaatccagctgaggctccctttgttttcagttccatgtaacaatctggaaggaaacttcacggacaggaagactgctggagaagagaagcgtgttagcccatttgaggtctggggaatcatgtaaagggtacccagacctcacttttagttatttacatcaatgagttctttcagggaaccaaacccagaattcggtgcaaaagccaaacatcttggtgggatttgataaatgccttgggacctggagtgctgggcttgtgcacaggaagagcaccagccgctgagtcaggatcctgtcagttccatgagctattcctctttggtttggctttttgatatgattaaaattattttttattccttttt

SEQ ID NO: 53496 - DNA, 1758 bp, Homo sapiens
caggcttccttcctgaattaaggaatatactggctctggtaaatattttctctgaagaaaagagaaggatttttggtccccttcattcttggctttttactcactgagattctgcccattcgtgtgttagacaactgtgtgtggaatgttgttgcataccaggcactgttctttgtgcgtggaataccacagtgtataaaacagtctctgtcctctttgagtttaaattctgcaagaggaaaatacataataaacaataaataaccaatataatggtgcaagtgaaagtttggtaaagaaaaggatgaggttggaggggtgtagcgaggagtggctggttgcgggtgctgtttgcttcagcaaggaaggttcgagaagccctctcaaagtagttgacatttaaacagggacctgacagatgagaaggacccaagcctttggaagagctggaagaacactccagccagaagaaacagcaagtgcagagggcttgaggtctagtggtggctgaagaacagaagggccactggagagtgaggggacatggtgagagaagaggtgaagagtggatgggccctctgtgacatgtgaaggagttcggatattattctcagtgcagtctggcgggaatttcctgaccggttggtgggttacccgggtcgtctgcatctctgggaccatgagatgaataagtggaagtatgagtctgagtggacgaatgaagtgtccatggtgctcactggggcagctttttatcacaagtattttaattacctgtatacctacaaaatgcctggggatatcaagaactgggtagatgctcatatgaactgtgaagatattgccatgaacttcctggtggccaacgtcacgggaaaagcagttatcaaggtaaccccacgaaagaaattcaagtgtcctgagtgcacagccatagatgggctttcactagaccaaacacacatggtggagaggtcagagtgcatcaacaagtttgcttcagtcttcgggaccatgcctctcaaggtggtggaacaccgagctgaccctgtcctgtacaaagatgactttcctgagaagctgaagagcttccccaacattggcagcttatgaaacgtgtcattggtggaggtctgaatgtgaggctgggacagagggagagaacaaggcctcccagcactctgatgtcagagtagtaggttaagggtggaaggttgacctacttggatcttggcatgcacccacctaacccactttctcaagaacaagaacctagaatgaatatccaagcacctcgagctatgcaacctctgttcttgtatttcttatgatctctgatgggttcttctcgaaaatgccaagtggaagactttgtggcatgctccagatttaaatccagctgaggctccctttgttttcagttccatgtaacaatctggaaggaaacttcacggacaggaagactgctggagaagagaagcgtgttagcccatttgaggtctggggaatcatgtaaagggtacccagacctcacttttagttatttacatcaatgagttctttcagggaaccaaacccagaattcggtgcaaaagccaaacatcttggtgggatttgataaatgccttgggacctggagtgctgggcttgtgcacaggaagagcaccagccgctgagtcaggatcctgtcagttccatgagctattcctctttggtttggctttttgatatgattaaaattattttttattccttttt

SEQ ID NO: 53497 - DNA, 1570 bp, Homo sapiens
attatgctgacctctgacgagctgcaattggttatgaggtctggcgggaatttcctgaccggttggtgggttacccgggtcgtctgcatctctgggaccatgagatgaataagtggaagtatgagtctgagtggacgaatgaagtgtccatggtgctcactggggcagctttttatcacaagtattttaattacctgtatacctacaaaatgcctggggatatcaagaactgggtagatgctcatatgaactgtgaagatattgccatgaacttcctggtggccaacgtcacgggaaaagcagttatcaaggtaaccccacgaaagaaattcaagtgtcctgagtgcacagccatagatgggctttcactagaccaaacacacatggtggagaggtcagagtgcatcaacaagtttgcttcagtcttcgggaccatgcctctcaaggtggtggaacaccgagctgaccctgtcctgtacaaagatgactttcctgagaagctgaagagcttccccaacattggcagcttatgaaacgtgtcattggtggaggtctgaatgtgaggctgggacagagggagagaacaaggcctcccagcactctgatgtcagagtagtaggttaagggtggaaggttgacctacttggatcttggcatgcacccacctaacccactttctcaagaacaagaacctagaatgaatatccaagcacctcgagctatgcaacctctgttcttgtatttcttatgatctctgatgggttcttctcgaaaatgccaagtggaagactttgtggcatgctccagatttaaatccagctgaggctccctttgttttcagttccatgtaacaatctggaaggaaacttcacggacaggaagactgctggagaagagaagcgtgttagcccatttgaggtctggggaatcatgtaaagggtacccagacctcacttttagttatttacatcaatgagttctttcagggaaccaaacccagaattcggtgcaaaagccaaacatcttggtgggatttgataaatgccttgggacctggagtgctgggcttgtgcacaggaagagcaccagccgctgagtcaggatcctgtcagttccatgagctattcctctttggtttggctttttgatatgattaaaattattttttattcctttttctactgtgtcttaaacaccaattcctgatagtccaaggaaccacctttctcccttgatatatttaactccgtctttggcctgacaacagtcttctgcccatgtctgggaacacacgccaggaggaatgtctgataccctctgcatcaagcgtaagaaggtcccaaatcataaccattttaagaacagatgactcagaaacctccagaggaatctgtttgcttcctgattagatccagtcaatgttttaaaggtattgtcagagaaaaacagagggtctgtactagccatgcaaggagtcgctctagctggtaccgtaaaagttgtgggaatgtgaccccatcccagggatgccaaaattctctcatctttggataactaacactacgcaggg

SEQ ID NO: 53498 - DNA, 361 bp, Homo sapiens
agtaagctattacccccacattaattgaaattcccaagcatatacaagaagattgggaggaagtcagaatcagcatctgtctttgagttttggcagaataactaacacctgtttgatggaacatctccagaatcccattatgaccttcttaggttatgatggtttgaacctaggaagtctgttgatacctgtttggataactcagcactgaatggttgctgtctgaattgggacttgattgttattatgtgtctgtccttaggtctggcgggaatttcctgaccggttggtgggttacccgggtcgtctgcatctctgggaccatgagatgaataagtggaagtatgagtctgagtggacg

SEQ ID NO: 53499 - DNA, 291 bp, Homo sapiens
ctggagaagagaagcgtgttagcccatttgaggtctggggaatcatgtaaagggtacccagacctcacttttagttatttacatcaatgagttctttcagggaaccaaacccagaattcggtgcaaaagccaaacatcttggtgggatttgataaatgccttgggacctggagtgctgggcttgtgcacaggaagagcaccagccgctgagtcaggatcctgtcagttccatgagctattcctctttggtttggctttttgatatgattaaaattattttttattcctttt

SEQ ID NO: 53500 - DNA, 1209 bp, Homo sapiens
atggcatctctgagtcagctgagtagccacctgaactacacctgtggggcagagaactccacaggtgccagccaggcccgcccacatgcctactatgccctctcctactgcgcgctcatcctggccatcgtcttcggcaatggcctggtgtgcatggctgtgctgaaggagcgggccctgcagactaccaccaactacttagtagtgagcctggctgtggcagacttgctggtggccaccttggtgatgccctgggtggtatacctggaggtgacaggtggagtctggaatttcagccgcatttgctgtgatgtttttgtcaccctggatgtcatgatgtgtacagccagcatccttaatctctgtgccatcagcatagacaggtacactgcagtggtcatgcccgttcactaccagcatggcacgggacagagctcctgtcggcgcgtggccctcatgatcacggccgtctgggtactggcctttgctgtgtcctgccctcttctgtttggctttaataccacaggggaccccactgtctgctccatctccaaccctgattttgtcatctactcttcagtggtgtccttctacctgccctttggagtgactgtccttgtctatgccagaatctatgtggtgctgaaacaaaggagacggaaaaggatcctcactcgacagaacagtcagtgcaacagtgtcaggcctggcttcccccaacaaaccctctctcctgacccggcacatctggagctgaagcgttactacagcatctgccaggacactgccttgggtggaccaggcttccaagaaagaggaggagagttgaaaagagaggagaagactcggaattccctgagtcccaccatagcgcccaagctcagcttagaagttcgaaaactcagcaatggcagattatcgacatctttgaagctggggcccctgcaacctcggggagtgccacttcgggagaagaaggcaacccaaatggtggccattgtgcttggggccttcattgtctgctggctgcccttcttcttgacccatgttctcaatacccactgccagacatgccacgtgtccccagagctttacagtgccacgacatggctgggctacgtgaatagcgccctcaaccctgtgatctataccaccttcaatatcgagttccggaaagccttcctcaagatcctgtcttgctgagggagc

SEQ ID NO: 53501 - DNA, 1111 bp, Homo sapiens
atggcatctctgagtcagctgagtagccacctgaactacacctgtggggcagagaactccacaggtgccagccaggcccgcccacatgcctactatgccctctcctactgcgcgctcatcctggccatcgtcttcggcaatggcctggtgtgcatggctgtgctgaaggagcgggccctgcagactaccaccaactacttagtagtgagcctggctgtggcagacttgctggtggccaccttggtgatgccctgggtggtatacctggaggtgacaggtggagtctggaatttcagccgcatttgctgtgatgtttttgtcaccctggatgtcatgatgtgtacagccagcatccttaatctctgtgccatcagcatagacaggtacactgcagtggtcatgcccgttcactaccagcatggcacgggacagagctcctgtcggcgcgtggccctcatgatcacggccgtctgggtactggcctttgctgtgtcctgccctcttctgtttggctttaataccacaggggaccccactgtctgctccatctccaaccctgattttgtcatctactcttcagtggtgtccttctacctgccctttggagtgactgtccttgtctatgccagaatctatgtggtgctgaaacaaaggagacggaaaaggatcctcactcgacagaacagtcagtgcaacagtgtcaggcctggcttcccccaacaaaccctctctcctgacccggcacatctggagctgaagcgttactacagcatctgccaggacactgccttgggtggaccaggcttccaagaaagaggaggagagttgaaaagagaggagaagactcggaattccctgagtgccacttcgggagaagaaggcaacccaaatggtggccattgtgcttggggccttcattgtctgctggctgcccttcttcttgacccatgttctcaatacccactgccagacatgccacgtgtccccagagctttacagtgccacgacatggctgggctacgtgaatagcgccctcaaccctgtgatctataccaccttcaatatcgagttccggaaagccttcctcaagatcctgtcttgctgagggagc

SEQ ID NO: 53502 - DNA, 305 bp, Homo sapiens
ggagagtaaagctttcattacttaaaaatatgtgtacaggtatatcagtatagttttaataagtaattattacatttataacaaaaatcattggtaatatataacattatgacaatagtctatttaattgtgtgactttctgacaattctttgcattgcatatctttatctatctgctttggccataagcaaatcactctggccagtagtataatgagctcagtaggattcctgttatctctcacactcaggaggcagagcattcgtaagttgaatacagactgccacgatatggtacaaagtac

SEQ ID NO: 53503 - DNA, 288 bp, Homo sapiens
agccaaactgattgctttaacttgtgcactctctgtcgccaaaggaatgcacattaaaatttatattgactcctaatatgctttccacatcctccacaaccatgctaccctttggactgaaagaggttttctcaccacacaaggctcttccattatcaatacctctctaataaaggccctccttaatgctgctctcttgctggccaaagctgggttcattcattgtaaaggacaccagaaaccaactgatcttattgctaaaggaaatgcctacgccaacaggacagc

SEQ ID NO: 53504 - DNA, 2560 bp, Homo sapiens
ctcaccctgaaggtgacagttccttggaaccttccctgatccttgtgatcccaggctccaagagtccacccttcccagctcagctcagtacctcagcagccacctccaagatccctacactgatcatgcttttcccaatctccatgtcggccacggagtttcttctggcctctgtcatcttctgtctggtattctgggtaatcagggcctcaagacctcaggtccccaaaggcctgaagaatccaccagggccatggggctggcctctgattgggcacatgctgaccctgggaaagaacccgcacctggcactgtcaaggatgagccagcagtatggggacgtgctgcagatccgaattggctccacacccgtggtggtgctgagcggcctggacaccatccggcaggccctggtgcggcagggcgatgatttcaagggccggcccgacctctacaccttcaccctcatcagtaatggtcagagcatgtccttcagcccagactctggaccagtgtgggctgcccgccggcgcctggcccagaatggcctgaaaagtttctccattgcctctgacccagcctcctcaacctcctgctacctggaagagcatgtgagcaaggaggctgaggtcctgataagcacgttgcaggagctgatggcagggcctgggcactttaacccctacaggtatgtggtggtatcagtgaccaatgtcatctgtgccatttgctttggccggcgctatgaccacaaccaccaagaactgcttagcctagtcaacctgaataataatttcggggaggtggttggctctggaaacccagctgacttcatccctattcttcgctacctacccaacccttccctgaatgccttcaaggacctgaatgagaagttctacagcttcatgcagaagatggtcaaggagcactacaaaacctttgagaagggccacatccgggacatcacagacagcctgattgagcactgtcaggagaagcagctggatgagaacgccaatgtccagctgtcagatgagaagatcattaacatcgtcttggacctctttggagctgggtttgacacagtcacaactgctatctcctggagcctcatgtatttggtgatgaaccccagggtacagagaaagatccaagaggagctagacacagtgattggcaggtcacggcggccccggctctctgacagatcccatctgccctatatggaggccttcatcctggagaccttccgacactcttccttcgtccccttcaccatcccccacagcacaacaagagacacaagtttgaaaggcttttacatccccaaggggcgttgtgtctttgtaaaccagtggcagatcaaccatgaccagaagctatgggtcaacccatctgagttcctacctgaacggtttctcacccctgatggtgctatcgacaaggtgttaagtgagaaggtgattatctttggcatgggcaagcggaagtgtatcggtgagaccattgcccgctgggaggtctttctcttcctggctatcctgctgcaacgggtggaattcagcgtgccactgggcgtgaaggtggacatgacccccatctatgggctaaccatgaagcatgcctgctgtgagcacttccaaatgcagctgcgctcttaggtgcttgagagccctgaggcctagactctgtctacctggtctggttgggcagccagaccagcaggctggcctatgtggtctaaggttcagcctgaaactcatagacactgatctggctgcagttttgctatctgggctgtgggcaagcctaagggatcctgcctgcccctaccctggacttgcctctgcacaccctccagagacaacaggtgaggcctgctagggttaggaggtccttaggcctctgagaagctctgaagaactctctggaagcccctgggcccagtacctagctggctctgtgagggtgctgactggcttcagcaagttagaactagccaaaccaggaccctgtccaatctttgacaattgggagctgccaagagtgaagggaagagacagcccaggatactggcacagaggtagtctcactgcttgaactaggctgagcaatctgaccctatgggtctaggacacagttcctgggaacatcacattcctctgcccttcctgcaggcaggaacaaacagggctgccttctggccttgtaagacccttattgctgtcctggaggggctggggacttgtgtctgcggggatcagagcgcacagggagtgcacatatccaggcaccaggactagggctggagtgaggggggggtatttcaattaccttctattggtctcccttctctacactcttgtaataaaatgtctatttttaatgtttgtacacaacaatccttctattctagcctgcattgagcttgcatgcttgcataagagcttaagaaccattgatttaatgtaatagggaaaattctaacccaggtatccaaaaatgtgtaagaacaactacctgagctaaataaagatattgttcagaaatcctatag

SEQ ID NO: 53505 - DNA, 2614 bp, Homo sapiens
ctcaccctgaaggtgacagttccttggaaccttccctgatccttgtgatcccaggctccaagagtccacccttcccagctcagctcagtacctcagcagccacctccaagatccctacactgatcatgcttttcccaatctccatgtcggccacggagtttcttctggcctctgtcatcttctgtctggtattctgggtaatcagggcctcaagacctcaggtccccaaaggcctgaagaatccaccagggccatggggctggcctctgattgggcacatgctgaccctgggaaagaacccgcacctggcactgtcaaggatgagccagcagtatggggacgtgctgcagatccgaattggctccacacccgtggtggtgctgagcggcctggacaccatccggcaggccctggtgcggcagggcgatgatttcaagggccggcccgacctctacaccttcaccctcatcagtaatggtcagagcatgtccttcagcccagactctggaccagtgtgggctgcccgccggcgcctggcccagaatggcctgaaaagtttctccattgcctctgacccagcctcctcaacctcctgctacctggaagagcatgtgagcaaggaggctgaggtcctgataagcacgttgcaggagctgatggcagggcctgggcactttaacccctacaggtatgtggtggtatcagtgaccaatgtcatctgtgccatttgctttggccggcgctatgaccacaaccaccaagaactgcttagcctagtcaacctgaataataatttcggggaggtggttggctctggaaacccagctgacttcatccctattcttcgctacctacccaacccttccctgaatgccttcaaggacctgaatgagaagttctacagcttcatgcagaagatggtcaaggagcactacaaaacctttgagaagggccacatccgggacatcacagacagcctgattgagcactgtcaggagaagcagctggatgagaacgccaatgtccagctgtcagatgagaagatcattaacatcgtcttggacctctttggagctgggtttgacacagtcacaactgctatctcctggagcctcatgtatttggtgatgaaccccagggtacagagaaagatccaagaggagctagacacagtgattggcaggtcacggcggccccggctctctgacagatcccatctgccctatatggaggccttcatcctggagaccttccgacactcttccttcgtccccttcaccatcccccacagcacaacaagagacacaagtttgaaaggcttttacatccccaaggggcgttgtgtctttgtaaaccagtggcagatcaaccatgaccagaagctatgggtcaacccatctgagttcctacctgaacggtttctcacccctgatggtgctatcgacaaggtgttaagtgagaaggtgattatctttggcatgggcaagcggaagtgtatcggtgagaccattgcccgctgggaggtctttctcttcctggctatcctgctgcaacgggtggaattcagcgtgccactgggcgtgaaggtggacatgacccccatctatgggctaaccatgaagcatgcctgctgtgagcacttccaaatgcagctgcgctcttaggtgcttgagagccctgaggcctagactctgtctacctggtctggttgggcagccagaccagcaggctggcctatgtggtctaaggttcagcctgaaactcatagacactgatctggctgcagttttgctatctgggctgtgggcaagcctaagggatcctgcctgcccctaccctggacttgcctctgcacaccctccagagacaacaggtaaaacagggccacatagatgctgatggagccttcccaagttgtgcttgagccaggaggcctgctagggttaggaggtccttaggcctctgagaagctctgaagaactctctggaagcccctgggcccagtacctagctggctctgtgagggtgctgactggcttcagcaagttagaactagccaaaccaggaccctgtccaatctttgacaattgggagctgccaagagtgaagggaagagacagcccaggatactggcacagaggtagtctcactgcttgaactaggctgagcaatctgaccctatgggtctaggacacagttcctgggaacatcacattcctctgcccttcctgcaggcaggaacaaacagggctgccttctggccttgtaagacccttattgctgtcctggaggggctggggacttgtgtctgcggggatcagagcgcacagggagtgcacatatccaggcaccaggactagggctggagtgaggggggggtatttcaattaccttctattggtctcccttctctacactcttgtaataaaatgtctatttttaatgtttgtacacaacaatccttctattctagcctgcattgagcttgcatgcttgcataagagcttaagaaccattgatttaatgtaatagggaaaattctaacccaggtatccaaaaatgtgtaagaacaactacctgagctaaataaagatattgttcagaaatcctatag

SEQ ID NO: 53506 - DNA, 1738 bp, Homo sapiens
tgtaagccaagaagggcatgctctcgggtctgcccattcttgaagataccagcttaaaattcaccaacaccagcagcaacaatcaggtcagcatagacagcctgattgagcactgtcaggagaagcagctggatgagaacgccaatgtccagctgtcagatgagaagatcattaacatcgtcttggacctctttggagctgggtttgacacagtcacaactgctatctcctggagcctcatgtatttggtgatgaaccccagggtacagagaaagatccaagaggagctagacacagtgattggcaggtcacggcggccccggctctctgacagatcccatctgccctatatggaggccttcatcctggagaccttccgacactcttccttcgtccccttcaccatcccccacagcacaacaagagacacaagtttgaaaggcttttacatccccaaggggcgttgtgtctttgtaaaccagtggcagatcaaccatgaccagaagctatgggtcaacccatctgagttcctacctgaacggtttctcacccctgatggtgctatcgacaaggtgttaagtgagaaggtgattatctttggcatgggcaagcggaagtgtatcggtgagaccattgcccgctgggaggtctttctcttcctggctatcctgctgcaacgggtggaattcagcgtgccactgggcgtgaaggtggacatgacccccatctatgggctaaccatgaagcatgcctgctgtgagcacttccaaatgcagctgcgctcttaggtgcttgagagccctgaggcctagactctgtctacctggtctggttgggcagccagaccagcaggctggcctatgtggtctaaggttcagcctgaaactcatagacactgatctggctgcagttttgctatctgggctgtgggcaagcctaagggatcctgcctgcccctaccctggacttgcctctgcacaccctccagagacaacaggtaaaacagggccacatagatgctgatggagccttcccaagttgtgcttgagccaggaggcctgctagggttaggaggtccttaggcctctgagaagctctgaagaactctctggaagcccctgggcccagtacctagctggctctgtgagggtgctgactggcttcagcaagttagaactagccaaaccaggaccctgtccaatctttgacaattgggagctgccaagagtgaagggaagagacagcccaggatactggcacagaggtagtctcactgcttgaactaggctgagcaatctgaccctatgggtctaggacacagttcctgggaacatcacattcctctgcccttcctgcaggcaggaacaaacagggctgccttctggccttgtaagacccttattgctgtcctggaggggctggggacttgtgtctgcggggatcagagcgcacagggagtgcacatatccaggcaccaggactagggctggagtgaggggggggtatttcaattaccttctattggtctcccttctctacactcttgtaataaaatgtctatttttaatgtttgtacacaacaatccttctattctagcctgcattgagcttgcatgcttgcataagagcttaagaaccattgatttaatgtaatagggaaaattctaacccaggtatccaaaaatgtgtaagaacaactacctgagctaaataaagatattgttcagaaatcctatag

SEQ ID NO: 53507 - DNA, 543 bp, Homo sapiens
cccaagaaaagtcaagtggagattggtggaagagaaattgctgcctgaattctgccaaccttcaggcattctgattagcatgtgtgatttggtgcctgtcttttgtgacactgtgcacttgctatatcacccttgtgtttttgatcctgcaagttctggaaaagcctcgtagctcaacacattcttcctgccagtgcctgatgtagagtctttggatttatgcagaccccccaggttccttctggctcaaaaataaataaataaaaaataaattaaaaaaagctttaaggggctcagaagggggtttccagattaaactccacacaggtgtgtagaaatgcaaccagtcccaatggtaaacaagcatatctcctgtctcagaagcacccaggaactacaggcataaatatgcaataaagatgcactgacgggaggcaagctcatgttttataatgcatttctgtcttactcaacatctgagattccaggcacagtccagatcgtggctgtttgggttttgctaggaagaaagcacctttttta

SEQ ID NO: 53508 - DNA, 309 bp, Homo sapiens
tttgggaacagcaatttagctgaagagtagagctactctgctagaacaaaaatgggagataaaccaaaattaaggtgaatgtggagagccctgaatcccagtcgaggcaggagaagttcctggaaggcttctgagcaagggagagcaaggctcagagctaggcttgatgagggggattctggcaccagcaactggctgagtaggaggaagaagagcaggaagtgggaaccttccaggaaggcagtgaagacctgactacaggggcagtcagtgaagagtaggaaggatacaggagaccaagaagagggg

SEQ ID NO: 53509 - DNA, 371 bp, Homo sapiens
gtaccgggaatgaggtaagctttgacatgagggaaatgagtagctttgacacttaacatattgcttgaaaccttttttccatttgttgagtacatattaaaatctaaacacccccttaggtactagggatacaaatacctagaagttcaaatatttgcccttcaagagctcacattagggaagtcaacatgaacactaatagtccccatataacatgctaaatgctatatagttaaggtgtggacaacatgttaaaggatcacagaggaagttgttatactgcttggagtagggaaaaagccgacggacaaaatgacttttgaaaacatagaataaagaactgaggtatgtctggccaaccaatgtgtccc

SEQ ID NO: 53510 - DNA, 189 bp, Homo sapiens
aaatttcatgccaaatgaatgacgggcctataagtaaggtataatcctaaaaaatcttaatactttaagcaacagtattttgaattttgttcaacaaacctttataaatgatttttctgctttacaactatggctcaagaaaaaccataaaaataaagggttaactgaatggaagtgactactgaatgt

SEQ ID NO: 53511 - DNA, 220 bp, Homo sapiens
attttaagaacatttattgaattccaatataaatattcagtttaaccatataacactgttgatattttactatttttcacctattaaaaaatagcacatttggccgggcgcggtggctcatgcctgcaatcccagcactctgggaggccgaggcgggtggatcacgaggtcaggagatcaagaccatcctggctaacacagtgaaaccctgtctctacta

SEQ ID NO: 53512 - DNA, 2109 bp, Homo sapiens
gcgaggaatccgggggaatgtagtccctccgtgtcagtgacccgatgacatgcgctggttcttctaggactacatttcccagtgcgcttcgcgccccgccccggcgccccacccacggtcgcgcgcgatggtaccaccaggcgagggcggctctcgcgcgggccgccgggagtgtagttttctttgggagctgcggggcctggcgccggggccggggcggaagaaagactacaagtcccagggggcgcggcgccatcgcctgagggcggggtgtacgaaagagaaacccggagggcgccggggactgggccggggtctgcagggctcagctgagcccatgagctcccagagctaacccctgaacacccaggcgggcaaagggctgatgtcggtagtccccatcctggaggggcaggctctgcgcatctgctcctggcatggcgctgcggcacctcgccctcctggctggccttctcgtgggagtcgccagcaagtccatggagaacacggcccagctgcccgagtgctgtgtggatgtggtgggcgtcaacgccagctgcccaggcgcaagtctgtgtggtccaggctgttacaggcgctggaacgcggacgggagcgccagctgcgtccgctgtgggaacggaaccctcccagcctacaacggctccgagtgtagaagctttgctggcccgggtgcgccattccccatgaacagaagctcagggacccccgggcggccacatcctggggctccgcgcgtggccgcctccctcttcctgggcacgttcttcattagctccggcctcatcctctccgtagctgggttcttctacctcaagcgctccagtaaactccccagggcctgctacagaagaaacaaagctccggccctgcagcctggcgaagccgctgcaatgatccccccgccacagtcctcagtacggaagccgcgctacgtcaggcgggagcggcccctggacagggccacggatcccgctgccttcccgggggaggcccgtatcagcaatgtctgacctggaggccgagaccacgccacgcacttggcggcagggacccggaggccgaccccttggcgggaaccagcacaaagtgttggcatcgcccggcgcccgggacagtcctgggcacagcctcggctctgagtccctccgcctcccagcgacggacgccaaagggtcccgggccgcctgaggctcctccccaccacagccatctcgtttatcggaccaggagcaggcatccatgagacctcagagcttcagatcgaggccttggggggtccgggcccccccaggaaacacggtgaggccccagcgcctgcagccaaagctggcacgatctatggggcaggtgccgctctgcctagaaaagccaggggctctgctgccgtgccctccagagcccacagcgggcaggactcctccagcaccaccacacccagtggcccgagacccctctgagaacagtgaggctggtcctcgtgccgttccagccggtgcccggccagtggggaggacacagcctaggaaccagctgcctgagaccagggtgcctctgggctgtcctcccgcgtggcggagaccccaagcacgcagccacccatttccggagctgcaggatagagcttcctcttgatctctgtttttaagcagaaattcattgtgcagaaaagtcctccagagctctgtggccccgctcggatccgctggacccccatgcctggctgatccctgcccacgtggggcaggcccacatctaacccccacaagtcactgcctcactgcacctgccaaggctgccctggcgctgagtcctggggtccctcccggagttcctgggagaaaggcgccgtcgtggccgcctcccgcacgccaggcccgggctccaccgtgggtctcagacgccctgcggcaccggcaccgtctgctttagcatgggacccccatctgaggggtggcctggccttcggggtccccacgctcctttgcgaagtccactgtgggtgccatcatggtctccgggacctgggccagcgggaacgtgggggcactgggtgtgctgatataaagtcggcattactcaagctgc

SEQ ID NO: 53513 - DNA, 3056 bp, Homo sapiens
  misc_feature (1318)..(1318): n is a, c, g, or t
  misc_feature (1343)..(1343): n is a, c, g, or t
  misc_feature (1483)..(1483): n is a, c, g, or t
  misc_feature (1641)..(1641): n is a, c, g, or t
  misc_feature (1850)..(1850): n is a, c, g, or t
  misc_feature (1976)..(1976): n is a, c, g, or t
  misc_feature (2159)..(2159): n is a, c, g, or t
  misc_feature (2178)..(2178): n is a, c, g, or t
gctcaagcgatcctcccaccttggcctcccaaaatgatgggattgcaggcctgagcctccacacctgccctgaaaccagttcttctaagggaaaataagagtggtcaaagagtgtatagcacaatttaaattctcactaaatttttcattgccttgtagaaattttcatcccattatttagctttttggctccaatgagattttcaaaatagaaaatgcatgtgtttagttactaaggcataatttacatgcagtgaaacacacagagcttgtgtccagttcaattgttttgacaaaggattcaccagactcctgtcgtgatgtagaatctgcctgtgatccatggagattgcctcgcaggctgctccagcgcccgcctgccgcgccagacaggagcgctgctgtgattttaccgacactctgagtgttaggagtcacacgtgcgggcggttttgcgtctgccacggctcacgcagagaactgttgttgagcttcctctgaggtgctgcacaaggagtgggtgtgggatgcactgttgcgtgctcgtcgtctctgagggcgcccgggtgggtttccgctgtctgaagagttgggcctatttttgtgcacgtgtttggcgggcttgtgttgtttctcttgggaacgtgcccggggggaaggctgcatcccaggagttcaagatggcggtgagctatgattgcaccactgcactccagcctgggcaacagagcaaacccatctctaaaagaaagaaagaaattttaaaaaggaggaaaggaaagaaaggagaaaagaggaaaggaaaaaggaaaggaaactgttcccattaaacactaactccccattcctccctgccccccagcccctggcaaccaccgttgtcttttctgtctctatgaattcgacaaccctgggaacctcatgagtagaatcatacagtatttgtcctgttgtgatgagctgctttcacttagcatagtgttttcaaggttcattcctgttgtagcatgcgtccaaaatttcttttcaggactgtagaatattccacggtctgtatagaccaccttttgtttatccattcatctgtggtgaacaatgctgctgcagacatggtggctgtggtgaacggtgccgagacatggtggctgtggtgaacggtgctgccgagacatggtggctgtggtggacggtgctgctgagacatggtggccgtggtggatggtgctgagacatggtggctgtggtgaacggtgctgccgagacatggtggctgtggtggacggtgctgctgagacatggtggctgtggtggacggtgntgctgagacatggtggctgtggtgnacggtgctgagacatggtggctgtggtggacggtgctgctgagacatggtggctgtggtgaacagtgctgagacatggggctgtggtgaatggtgctgccgagacatggtggctgtggtgaatggtgctgctaatgtgtntagaattggtggattcttggtctcactgacttcaagaatgaagccgcagaccctcgcagtgagtgttacagttcttaaagatggtgtgtccggagtttgttccttctgatgttcagatgtgtttggagtttcttccttctggtgggttcgtggtctcnctggcttcaggagtgaagctgcagacctttgcagtgagtgttacagctcataaaggcagtgcagacccaaagagtgagcagcagcaagatttattgcaaagagcgaaagaacaaagcttccatagtgtggaaggggacccgagtgggttgctgctgctggctccggcagcctgcttttattcccttatctgaccccacccacatcctgntgattggcccattttacagacagctgattggtccattttatagagagctgattggtctgttttgacagggtgctgattagtgcgtttacgatccctgagctagacacagaatgatatttacagtcntctagctagacgtaaaagttctccaagtccccactagattaactagacacagagcagcgattggtgcatttacaaaccttgagctagacacaaggtgctgattggtgcgtttacaaaccttgagctagacacagagtgctgattggtgtatttacaatcctgtagctagacataaaggttctncaagtccccaccggattanctagatacagagagtgctgattggtggacggtgctgctgagacatggtggctgtggtggacggtgctgctgagacatggtggctgtggtggacggtgccgagacatggtggctgtggtggacggtgccgagacatggtggctgtggtgaatggtgccgagacatggtggctgtggtgaacggtgctgccgagacatggtggctgtggtggacggtgctgctgagacatggtggctgtggtgaacggtgccgagacatggtggctgtggtggacggtgctgctgagacatggtggctgtggtgaacggtgccgagacatggtggctgtggtgaacggtgccaagacatggtggctgtggtggacggtgctgctgagacatggtggctgtggtgaacggtgccgagacatggtggctgtggtggacggtgctgctgagacatggtggctgtggtggatggtgcggagacatggtctctgtggccccgctcggatccgctggacccccatgcctggctgatccctgcccacgtggggcaggcccacatctaacccccacaagtcactgcctcactgcacctgccaaggctgccctggcgctgagtcctggggtccctcccggagttcctgggagaaaggcgccgtcgtggccgcctcccgcacgccaggcccgggctccaccgtgggtctcagacgccctgcggcaccggcaccgtctgctttagcatgggacccccatctgaggggtggcctggccttcggggtccccacgctcctttgcgaagtccactgtgggtgccatcatggtctccgggacctgggccagcgggaacgtgggggcactgggtgtgctgatataaagtcggcattactcaagctgc

SEQ ID NO: 53514 - DNA, 2266 bp, Homo sapiens
gcgaggaatccgggggaatgtagtccctccgtgtcagtgacccgatgacatgcgctggttcttctaggactacatttcccagtgcgcttcgcgccccgccccggcgccccacccacggtcgcgcgcgatggtaccaccaggcgagggcggctctcgcgcgggccgccgggagtgtagttttctttgggagctgcggggcctggcgccggggccggggcggaagaaagactacaagtcccagggggcgcggcgccatcgcctgagggcggggtgtacgaaagagaaacccggagggcgccggggactgggccggggtctgcagggctcagctgagcccatgagctcccagagctaacccctgaacacccaggcgggcaaagggctgatgtcggtagtccccatcctggaggggcaggctctgcgcatctgctcctggcatggcgctgcggcacctcgccctcctggctggccttctcgtgggagtcgccagcaagtccatggagaacacggcccagctgcccgagtgctgtgtggatgtggtgggcgtcaacgccagctgcccaggcgcaagtctgtgtggtccaggctgttacaggcgctggaacgcggacgggagcgccagctgcgtccgctgtgggaacggaaccctcccagcctacaacggctccgagtgtagaagctttgctggcccgggtgcgccattccccatgaacagaagctcagggacccccgggcggccacatcctggggctccgcgcgtggccgcctccctcttcctgggcacgttcttcattagctccggcctcatcctctccgtagctgggttcttctacctcaagcgctccagtaaactccccagggcctgctacagaagaaacaaagggccggcccccgcagggtccctgccaggcagatggtccagccagcagttcggaccccaagctccggccctgcagcctggcgaagccgtaagtaacccacatcatccgggctgagcgtccctggccgcgtgtgcctgtgccaggccatcccgagtcctcactctgcctttctctccttttcaaggctgcaatgatccccccgccacagtcctcagtacggaagccgcgctacgtcaggcgggagcggcccctggacagggccacggatcccgctgccttcccgggggaggcccgtatcagcaatgtctgacctggaggccgagaccacgccacgcacttggcggcagggacccggaggccgaccccttggcgggaaccagcacaaagtgttggcatcgcccggcgcccgggacagtcctgggcacagcctcggctctgagtccctccgcctcccagcgacggacgccaaagggtcccgggccgcctgaggctcctccccaccacagccatctcgtttatcggaccaggagcaggcatccatgagacctcagagcttcagatcgaggccttggggggtccgggcccccccaggaaacacggtgaggccccagcgcctgcagccaaagctggcacgatctatggggcaggtgccgctctgcctagaaaagccaggggctctgctgccgtgccctccagagcccacagcgggcaggactcctccagcaccaccacacccagtggcccgagacccctctgagaacagtgaggctggtcctcgtgccgttccagccggtgcccggccagtggggaggacacagcctaggaaccagctgcctgagaccagggtgcctctgggctgtcctcccgcgtggcggagaccccaagcacgcagccacccatttccggagctgcaggatagagcttcctcttgatctctgtttttaagcagaaattcattgtgcagaaaagtcctccagagctctgtggccccgctcggatccgctggacccccatgcctggctgatccctgcccacgtggggcaggcccacatctaacccccacaagtcactgcctcactgcacctgccaaggctgccctggcgctgagtcctggggtccctcccggagttcctgggagaaaggcgccgtcgtggccgcctcccgcacgccaggcccgggctccaccgtgggtctcagacgccctgcggcaccggcaccgtctgctttagcatgggacccccatctgaggggtggcctggccttcggggtccccacgctcctttgcgaagtccactgtgggtgccatcatggtctccgggacctgggccagcgggaacgtgggggcactgggtgtgctgatataaagtcggcattactcaagctgc

SEQ ID NO: 53515 - DNA, 2281 bp, Homo sapiens
gcgaggaatccgggggaatgtagtccctccgtgtcagtgacccgatgacatgcgctggttcttctaggactacatttcccagtgcgcttcgcgccccgccccggcgccccacccacggtcgcgcgcgatggtaccaccaggcgagggcggctctcgcgcgggccgccgggagtgtagttttctttgggagctgcggggcctggcgccggggccggggcggaagaaagactacaagtcccagggggcgcggcgccatcgcctgagggcggggtgtacgaaagagaaacccggagggcgccggggactgggccggggtctgcagggctcagctgagcccatgagctcccagagctaacccctgaacacccaggcgggcaaagggctgatgtcggtagtccccatcctggaggggcaggctctgcgcatctgctcctggcatggcgctgcggcacctcgccctcctggctggccttctcgtgggagtcgccagcaagtccatggagaacacggcccagctgcccgagtgctgtgtggatgtggtgggcgtcaacgccagctgcccaggcgcaagtctgtgtggtccaggctgttacaggcgctggaacgcggacgggagcgccagctgcgtccgctgtgggaacggaaccctcccagcctacaacggctccgagtgtagaagctttgctggcccgggtgcgccattccccatgaacagaagctcagggacccccgggcggccacatcctggggctccgcgcgtggccgcctccctcttcctgggcacgttcttcattagctccggcctcatcctctccgtagctgggttcttctacctcaagcgctccagtaaactccccagggcctgctacagaagaaacaaagctccggccctgcagcctggcgaagccgctgcaatgatccccccgccacagtcctcagacgtggggtctgcaggaaaggaggacccaccacgacagggcagacccccaatacctgctcctccttgaagtccagctccacccgaggacagacgcagccggcctccgccaggccctcctgagcagccatcgcttcagtggtgctgggtcaggcggacccaagagtcagcccgtacggaagccgcgctacgtcaggcgggagcggcccctggacagggccacggatcccgctgccttcccgggggaggcccgtatcagcaatgtctgacctggaggccgagaccacgccacgcacttggcggcagggacccggaggccgaccccttggcgggaaccagcacaaagtgttggcatcgcccggcgcccgggacagtcctgggcacagcctcggctctgagtccctccgcctcccagcgacggacgccaaagggtcccgggccgcctgaggctcctccccaccacagccatctcgtttatcggaccaggagcaggcatccatgagacctcagagcttcagatcgaggccttggggggtccgggcccccccaggaaacacggtgaggccccagcgcctgcagccaaagctggcacgatctatggggcaggtgccgctctgcctagaaaagccaggggctctgctgccgtgccctccagagcccacagcgggcaggactcctccagcaccaccacacccagtggcccgagacccctctgagaacagtgaggctggtcctcgtgccgttccagccggtgcccggccagtggggaggacacagcctaggaaccagctgcctgagaccagggtgcctctgggctgtcctcccgcgtggcggagaccccaagcacgcagccacccatttccggagctgcaggatagagcttcctcttgatctctgtttttaagcagaaattcattgtgcagaaaagtcctccagagctctgtggccccgctcggatccgctggacccccatgcctggctgatccctgcccacgtggggcaggcccacatctaacccccacaagtcactgcctcactgcacctgccaaggctgccctggcgctgagtcctggggtccctcccggagttcctgggagaaaggcgccgtcgtggccgcctcccgcacgccaggcccgggctccaccgtgggtctcagacgccctgcggcaccggcaccgtctgctttagcatgggacccccatctgaggggtggcctggccttcggggtccccacgctcctttgcgaagtccactgtgggtgccatcatggtctccgggacctgggccagcgggaacgtgggggcactgggtgtgctgatataaagtcggcattactcaagctgc

SEQ ID NO: 53516 - DNA, 2029 bp, Homo sapiens
cagaacctcagcgagcggactccagttatattccgtgctcttgtcggcacgcatttcacttctaggactgggccggggtctgcagggctcagctgagcccatgagctcccagagctaacccctgaacacccaggcgggcaaagggctgatgtcggtagtccccatcctggaggggcaggctctgcgcatctgctcctggcatggcgctgcggcacctcgccctcctggctggccttctcgtgggagtcgccagcaagtccatggagaacacggcccagctgcccgagtgctgtgtggatgtggtgggcgtcaacgccagctgcccaggcgcaagtctgtgtggtccaggctgttacaggcgctggaacgcggacgggagcgccagctgcgtccgctgtgggaacggaaccctcccagcctacaacggctccgagtgtagaagctttgctggcccgggtgcgccattccccatgaacagaagctcagggacccccgggcggccacatcctggggctccgcgcgtggccgcctccctcttcctgggcacgttcttcattagctccggcctcatcctctccgtagctgggttcttctacctcaagcgctccagtaaactccccagggcctgctacagaagaaacaaagggccggcccccgcagggtccctgccaggcagatggtccagccagcagttcggaccccaagctccggccctgcagcctggcgaagccgtaagtaacccacatcatccgggctgagcgtccctggccgcgtgtgcctgtgccaggccatcccgagtcctcactctgcctttctctccttttcaaggctgcaatgatccccccgccacagtcctcagtacggaagccgcgctacgtcaggcgggagcggcccctggacagggccacggatcccgctgccttcccgggggaggcccgtatcagcaatgtctgacctggaggccgagaccacgccacgcacttggcggcagggacccggaggccgaccccttggcgggaaccagcacaaagtgttggcatcgcccggcgcccgggacagtcctgggcacagcctcggctctgagtccctccgcctcccagcgacggacgccaaagggtcccgggccgcctgaggctcctccccaccacagccatctcgtttatcggaccaggagcaggcatccatgagacctcagagcttcagatcgaggccttggggggtccgggcccccccaggaaacacggtgaggccccagcgcctgcagccaaagctggcacgatctatggggcaggtgccgctctgcctagaaaagccaggggctctgctgccgtgccctccagagcccacagcgggcaggactcctccagcaccaccacacccagtggcccgagacccctctgagaacagtgaggctggtcctcgtgccgttccagccggtgcccggccagtggggaggacacagcctaggaaccagctgcctgagaccagggtgcctctgggctgtcctcccgcgtggcggagaccccaagcacgcagccacccatttccggagctgcaggatagagcttcctcttgatctctgtttttaagcagaaattcattgtgcagaaaagtcctccagagctctgtggccccgctcggatccgctggacccccatgcctggctgatccctgcccacgtggggcaggcccacatctaacccccacaagtcactgcctcactgcacctgccaaggctgccctggcgctgagtcctggggtccctcccggagttcctgggagaaaggcgccgtcgtggccgcctcccgcacgccaggcccgggctccaccgtgggtctcagacgccctgcggcaccggcaccgtctgctttagcatgggacccccatctgaggggtggcctggccttcggggtccccacgctcctttgcgaagtccactgtgggtgccatcatggtctccgggacctgggccagcgggaacgtgggggcactgggtgtgctgatataaagtcggcattactcaagctgc

SEQ ID NO: 53517 - DNA, 2553 bp, Homo sapiens
  misc_feature (2156)..(2156): n is a, c, g, or t
gcgaggaatccgggggaatgtagtccctccgtgtcagtgacccgatgacatgcgctggttcttctaggactacatttcccagtgcgcttcgcgccccgccccggcgccccacccacggtcgcgcgcgatggtaccaccaggcgagggcggctctcgcgcgggccgccgggagtgtagttttctttgggagctgcggggcctggcgccggggccggggcggaagaaagactacaagtcccagggggcgcggcgccatcgcctgagggcggggtgtacgaaagagaaacccggagggcgccggggactgggccggggtctgcagggctcagctgagcccatgagctcccagagctaacccctgaacacccaggcgggcaaagggctgatgtcggtagtccccatcctggaggggcaggctctgcgcatctgctcctggcatggcgctgcggcacctcgccctcctggctggccttctcgtgggagtcgccagcaagtccatggagaacacggcccagctgcccgagtgctgtgtggatgtggtgggcgtcaacgccagctgcccaggcgcaagtctgtgtggtccaggctgttacaggcgctggaacgcggacgggagcgccagctgcgtccgctgtgggaacggaaccctcccagcctacaacggctccgagtgtagaagctttgctggcccgggtgcgccattccccatgaacagaagctcagggacccccgggcggccacatcctggggctccgcgcgtggccgcctccctcttcctgggcacgttcttcattagctccggcctcatcctctccgtagctgggttcttctacctcaagcgctccagtaaactccccagggcctgctacagaagaaacaaagctccggccctgcagcctggcgaagccgctgcaatgatccccccgccacagtcctcagtacggaagccgcgctacgtcaggcgggagcggcccctggacagggccacggatcccgctgccttcccgggggaggcccgtatcagcaatgtctgacctggaggccgagaccacgccacgcacttggcggcagggacccggaggccgaccccttggcgggaaccagcacaaagtgttggcatcgcccggcgcccgggacagtcctgggcacagcctcggctctgagtccctccgcctcccagcgacggacgccaaagggtcccgggccgcctgaggctcctccccaccacagccatctcgtttatcggaccaggagcaggcatccatgagacctcagagcttcagatcgaggccttggggggtccgggcccccccaggaaacacggtgaggccccagcgcctgcagccaaagctggcacgatctatggggcaggtgccgctctgcctagaaaagccaggggctctgctgccgtgccctccagagcccacagcgggcaggactcctccagcaccaccacacccagtggcccgagacccctctgagaacagtgaggctggtcctcgtgccgttccagccggtgcccggccagtggggaggacacagcctaggaaccagctgcctgagaccagggtgcctctgggctgtcctcccgcgtggcggagaccccaagcacgcagccacccatttccggagctgcaggatagagcttcctcttgatctctgtttttaagcagaaattcattgtgcagaaaagtcctccagagctctgtggccccgctcggatccgctggacccccatgcctggctgatccctgcccacgtggggcaggcccacatctaacccccacaagtcactgcctcactgcacctgccaaggctgccctggcgctgagtcctggggtccctcccggagttcctgggagaaaggcgccgtcgtggccgcctcccgcacgccaggcccgggctccaccgtgggtctcagacgccctgcggcaccggcaccgtctgctttagcatgggacccccatctgaggggtggcctggccttcggggtccccacgctcctttgcgaagtccactgtgggtgccatcatggtctccgggacctgggccagcgggaacgtgggggcactgggtgtgctgatataaagtcggcattactcaagctgcaaaaaaaaaaaaaaaaaaaaaaaaaaaaaaaaaaaaaaaaaaaaaanaaaaaaaaaaaaaaaggggggggggccaaaaaaaaaccccgggggggccccaaaaacaccaagaaattataagaagaaggaggggtcgccaacaagagaggagagcgcgaataaaaaaaacaaggaagccacggcgcggcccaacaataaaaaagcaagtgcataggtgggaaaaaacgtgtagagccattggaacatatttatagggaagaacaacacaatatagaaggggggggcaagaaaatattggggaaaaacaaactcaccaagacattatataaaggcttcaagaggaaaaaaaaaaaatatacagtatatagatggttgaaaaaacaggaggaataatggcgcgagtaaaaaataaacaaaaggagatataattaaaaataaaatcccg

SEQ ID NO: 53518 - DNA, 2378 bp, Homo sapiens
gcgaggaatccgggggaatgtagtccctccgtgtcagtgacccgatgacatgcgctggttcttctaggactacatttcccagtgcgcttcgcgccccgccccggcgccccacccacggtcgcgcgcgatggtaccaccaggcgagggcggctctcgcgcgggccgccgggagtgtagttttctttgggagctgcggggcctggcgccggggccggggcggaagaaagactacaagtcccagggggcgcggcgccatcgcctgagggcggggtgtacgaaagagaaacccggagggcgccggggactgggccggggtctgcagggctcagctgagcccatgagctcccagagctaacccctgaacacccaggcgggcaaagggctgatgtcggtagtccccatcctggaggggcaggctctgcgcatctgctcctggcatggcgctgcggcacctcgccctcctggctggccttctcgtgggagtcgccagcaagtccatggagaacacggacactgatgtcccagccccagaggtgctgaccaggtccactgctggggtcagaggggcctgtgcctcgcagaggggagccctccgctgcctgctgggcccagctgcccgagtgctgtgtggatgtggtgggcgtcaacgccagctgcccaggcgcaagtctgtgtggtccaggctgttacaggcgctggaacgcggacgggagcgccagctgcgtccgctgtgggaacggaaccctcccagcctacaacggctccgagtgtagaagctttgctggcccgggtgcgccattccccatgaacagaagctcagggacccccgggcggccacatcctggggctccgcgcgtggccgcctccctcttcctgggcacgttcttcattagctccggcctcatcctctccgtagctgggttcttctacctcaagcgctccagtaaactccccagggcctgctacagaagaaacaaagctccggccctgcagcctggcgaagccgctgcaatgatccccccgccacagtcctcagacgtggggtctgcaggaaaggaggacccaccacgacagggcagacccccaatacctgctcctccttgaagtccagctccacccgaggacagacgcagccggcctccgccaggccctcctgagcagccatcgcttcagtggtgctgggtcaggcggacccaagagtcagcccgtacggaagccgcgctacgtcaggcgggagcggcccctggacagggccacggatcccgctgccttcccgggggaggcccgtatcagcaatgtctgacctggaggccgagaccacgccacgcacttggcggcagggacccggaggccgaccccttggcgggaaccagcacaaagtgttggcatcgcccggcgcccgggacagtcctgggcacagcctcggctctgagtccctccgcctcccagcgacggacgccaaagggtcccgggccgcctgaggctcctccccaccacagccatctcgtttatcggaccaggagcaggcatccatgagacctcagagcttcagatcgaggccttggggggtccgggcccccccaggaaacacggtgaggccccagcgcctgcagccaaagctggcacgatctatggggcaggtgccgctctgcctagaaaagccaggggctctgctgccgtgccctccagagcccacagcgggcaggactcctccagcaccaccacacccagtggcccgagacccctctgagaacagtgaggctggtcctcgtgccgttccagccggtgcccggccagtggggaggacacagcctaggaaccagctgcctgagaccagggtgcctctgggctgtcctcccgcgtggcggagaccccaagcacgcagccacccatttccggagctgcaggatagagcttcctcttgatctctgtttttaagcagaaattcattgtgcagaaaagtcctccagagctctgtggccccgctcggatccgctggacccccatgcctggctgatccctgcccacgtggggcaggcccacatctaacccccacaagtcactgcctcactgcacctgccaaggctgccctggcgctgagtcctggggtccctcccggagttcctgggagaaaggcgccgtcgtggccgcctcccgcacgccaggcccgggctccaccgtgggtctcagacgccctgcggcaccggcaccgtctgctttagcatgggacccccatctgaggggtggcctggccttcggggtccccacgctcctttgcgaagtccactgtgggtgccatcatggtctccgggacctgggccagcgggaacgtgggggcactgggtgtgctgatataaagtcggcattactcaagctgc

SEQ ID NO: 53519 - DNA, 2422 bp, Homo sapiens
gcgaggaatccgggggaatgtagtccctccgtgtcagtgacccgatgacatgcgctggttcttctaggactacatttcccagtgcgcttcgcgccccgccccggcgccccacccacggtcgcgcgcgatggtaccaccaggcgagggcggctctcgcgcgggccgccgggagtgtagttttctttgggagctgcggggcctggcgccggggccggggcggaagaaagactacaagtcccagggggcgcggcgccatcgcctgagggcggggtgtacgaaagagaaacccggagggcgccggggactgggccggggtctgcagggctcagctgagcccatgagctcccagagctaacccctgaacacccaggcgggcaaagggctgatgtcggtagtccccatcctggaggggcagccccactccatctctttggctccgcatgctcctccctgtggcaggctctgcgcatctgctcctggcatggcgctgcggcacctcgccctcctggctggccttctcgtgggagtcgccagcaagtccatggagaacacggcccagctgcccgagtgctgtgtggatgtggtgggcgtcaacgccagctgcccaggcgcaagtctgtgtggtccaggctgttacaggcgctggaacgcggacgggagcgccagctgcgtccgctgtgggaacggaaccctcccagcctacaacggctccgagtgtagaagctttgctggcccgggtgcgccattccccatgaacagaagctcagggacccccgggcggccacatcctggggctccgcgcgtggccgcctccctcttcctgggcacgttcttcattagctccggcctcatcctctccgtagctgggttcttctacctcaagcgctccagtaaactccccagggcctgctacagaagaaacaaagctccggccctgcagcctggcgaagccgtaagtaacccacatcatccgggctgagcgtccctggccgcgtgtgcctgtgccaggccatcccgagtcctcactctgcctttctctccttttcaaggctgcaatgatccccccgccacagtcctcagacgtggggtctgcaggaaaggaggacccaccacgacagggcagacccccaatacctgctcctccttgaagtccagctccacccgaggacagacgcagccggcctccgccaggccctcctgagcagccatcgcttcagtggtgctgggtcaggcggacccaagagtcagcccgtacggaagccgcgctacgtcaggcgggagcggcccctggacagggccacggatcccgctgccttcccgggggaggcccgtatcagcaatgtctgacctggaggccgagaccacgccacgcacttggcggcagggacccggaggccgaccccttggcgggaaccagcacaaagtgttggcatcgcccggcgcccgggacagtcctgggcacagcctcggctctgagtccctccgcctcccagcgacggacgccaaagggtcccgggccgcctgaggctcctccccaccacagccatctcgtttatcggaccaggagcaggcatccatgagacctcagagcttcagatcgaggccttggggggtccgggcccccccaggaaacacggtgaggccccagcgcctgcagccaaagctggcacgatctatggggcaggtgccgctctgcctagaaaagccaggggctctgctgccgtgccctccagagcccacagcgggcaggactcctccagcaccaccacacccagtggcccgagacccctctgagaacagtgaggctggtcctcgtgccgttccagccggtgcccggccagtggggaggacacagcctaggaaccagctgcctgagaccagggtgcctctgggctgtcctcccgcgtggcggagaccccaagcacgcagccacccatttccggagctgcaggatagagcttcctcttgatctctgtttttaagcagaaattcattgtgcagaaaagtcctccagagctctgtggccccgctcggatccgctggacccccatgcctggctgatccctgcccacgtggggcaggcccacatctaacccccacaagtcactgcctcactgcacctgccaaggctgccctggcgctgagtcctggggtccctcccggagttcctgggagaaaggcgccgtcgtggccgcctcccgcacgccaggcccgggctccaccgtgggtctcagacgccctgcggcaccggcaccgtctgctttagcatgggacccccatctgaggggtggcctggccttcggggtccccacgctcctttgcgaagtccactgtgggtgccatcatggtctccgggacctgggccagcgggaacgtgggggcactgggtgtgctgatataaagtcggcattactcaagctgc

SEQ ID NO: 53520 - DNA, 1062 bp, Homo sapiens
gcgaggaatccgggggaatgtagtccctccgtgtcagtgacccgatgacatgcgctggttcttctaggactacatttcccagtgcgcttcgcgccccgccccggcgccccacccacggtcgcgcgcgatggtaccaccaggcgagggcggctctcgcgcgggccgccgggagtgtagttttctttgggagctgcggggcctggcgccggggccggggcggaagaaagactacaagtcccagggggcgcggcgccatcgcctgagggcggggtgtacgaaagagaaacccggagggcgccggggactgggccggggtctgcagggctcagctgagcccatgagctcccagagctaacccctgaacacccaggcgggcaaagggctgatgtcggtagtccccatcctggaggggcaggctctgcgcatctgctcctggcatggcgctgcggcacctcgccctcctggctggccttctcgtgggagtcgccagcaagtccatggagaacacggcccagctgcccgagtgctgtgtggatgtggtgggcgtcaacgccagctgcccaggcgcaagtctgtgtggtccaggctgttacaggcgctggaacgcggacgggagcgccagctgcgtccgctgtgggaacggaaccctcccagcctacaacggctccgagtgtagaagctttgctggcccgggtgcgccattccccatgaacagaagctcagggacccccgggcggccacatcctggggctccgcgcgtggccgcctccctcttcctgggcacgttcttcattagctccggcctcatcctctccgtagctgggttcttctacctcaagcgctccagtaaactccccagggcctgctacagaagaaacaaagctccggccctgcagcctggcgaagccgtaagtaacccacatcatccgggctgagcgtccctggccgcgtgtgcctgtgccaggccatcccgagtcctcactctgcctttctctccttttcaaggctgcaatgatccccccgccacagtcctcaggtaacagcagctgtcgcatccccctg

SEQ ID NO: 53521 - DNA, 339 bp, Homo sapiens
gcaccgtaggccacggcccacctgggttgccctcgcgtgaccacggcctcacctgctgtcttcatctgcaggactgggccggggtctgcagggctcagctgagcccatgagctcccagagctaacccctgaacacccaggcgggcaaagggctgatgtcggtagtccccatcctggaggggcaggtaaggccctgcctacacctcgccccacccgtgcctccaaaggccccaagccttcactctttcaccccacctccatttggctccaccttccctgtcgtggccctgcacccctgccacggccctgccccatctccatttaactcagtcatctgccg

SEQ ID NO: 53522 - DNA, 482 bp, Homo sapiens
caaggttcattcctgttgtagcatgcgtccaaaatttcttttcaggactgtagaatattccacggtctgtatagaccaccttttgtttatccattcatctgtggccgtggtggattgtgccgataactggtggctgtggtgaacaatgctgctgcagacatggtggctgtggtgaacggtgccgagacatggtggctgtggtgaacggtgctgccgagacatggtggctgtggtggacggtgctgctgagacatggtggccgtggtggatggtgctgagacatggtggctgtggtgaacggtgctgccgagacatggtggctgtggtggacggtgctgctgagacatggtggctgtggtggacggtgccgagacatggtggccgtggtggatggtgccgagacatggtggctgtggtgaacaatgctgctgcagacatggtggctgtggtgaacggtgctgccgagacatggtggctgtggt

SEQ ID NO: 53523 - DNA, 720 bp, Homo sapiens
gttcttctaagggaaaataagagtggtcaaagagtgtatagcacaatttaaattctcactaaatttttcattgccttgtagaaattttcatcccattatttagctttttggctccaatgagattttcaaaatagaaaatgcatgtgtttagttactaaggcataatttacatgcagtgaaacacacagagcttgtgtccagttcaattgttttgacaaaggattcaccagactcctgtcgtgatgtagaatctgcctgtgatccatggagattgcctcgcaggctgctccagcgcccgcctgccgcgccagacaggagcgctgctgtgattttaccgacactctgagtgttaggagtcacacgtgcgggcggttttgcgtctgccacggctcacgcagagaactgttgttgagcttcctctgaggtgctgcacaaggagtgggtgtgggatgcactgttgcgtgctcgtcgtctctgagggcgcccgggtgggtttccgctgtctgaagagttgggcctatttttgtgcacgtgtttggcgggcttgtgttgtttctcttgggaacgtgcccggggggaaggctgcatcccaggtgtggaagtcccagcggttctgtgtgtccccacagccgagaggctgagtgccgtttggtcgtggaggctttagtttgcatttccctgacgctcacccgtgttgagcactgtccactcatctgttgc

SEQ ID NO: 53524 - DNA, 732 bp, Homo sapiens
ccactctgacctcgcctgtctctgacccgtttcagtacggaagccgcgctacgtcaggcgggagcggcccctggacagggccacggatcccgctgccttcccgggggaggcccgtatcagcaatgtctgacctggaggccgagaccacgccacgcacttggcggcagggacccggaggccgaccccttggcgggaaccagcacaaagtgttggcatcgcccggcgcccgggacagtcctgggcacagcctcggctctgagtccctccgcctcccagcgacggacgccaaagggtcccgggccgcctgaggctcctccccaccacagccatctcgtttatcggaccaggagcaggcatccatgagacctcagagcttcagatcgaggccttggggggtccgggcccccccaggaaacacggtgaggccccagcgcctgcagccaaagctggcacgatctatggggcaggtgccgctctgcctagaaaagccaggggctctgctgccgtgccctccagagcccacagcgggcaggactcctccagcaccaccacacccagtggcccgagacccctctgagaacagtgaggctggtcctcgtgccgttccagccggtgcccggccagtggggaggacacagcctaggaaccagctgcctgagaccagggtgcctctgggctgtcctcccgcgtggcggagaccccaagcacgcagccacccatttccggagctgc

SEQ ID NO: 53525 - DNA, 478 bp, Homo sapiens
accttaagaatacgacaagttggattggtttttatgttgcagtgctctgatttctccctgatgtccaagagttgaaacgtgaccaaaagggaaataaagtggtcttttgtttccagaagtcctaaatggcgattcccccggcaagaatcctagggcctatgagggccgtgaccttttccttaaagcagcagttgtgatcagtgaggctggccctaggtttacaagaacaggccctgaaaggtaacccattttctcctttgaaaagcttactagactgataagttaggggaaagtggtatttgaggaatcctctcatgagaacagagtagaaaagtacaagctgggccagcgccgctaagtagattagttgactctttggactgtgatatttataacatgccaattaaagtaggaaagggcttctgctgatgtgccacagggctgtttttctactgattttgccaataatttggatgaa

SEQ ID NO: 53526 - DNA, 153 bp, Homo sapiens
ctgaacaggttggaacacgttttctggaggatgggacattgaaactgaatcacctacaatgttgaaggcagatggtaacctaagaaaggtaaagccttgttaatcaaatcaattcttttcactttaactgtattggaaagatactttaaaaaa

SEQ ID NO: 53527 - DNA, 271 bp, Homo sapiens
tattcacgttattaaaaaacattcctcagttcggtaaagtatttggtagcaagctcctataagtagagagagtttctgatgtatttgagtacagatcaattacaacttgaaggagaggttggtgcattgctgaagaacttttaataaagttgcaggtgctgtcagaaatggaaccatacctgaaaaataataactgaaatttcttcagttccatagcattgcaaaacttacttccgcatttgctcatgtgatatatgggatttccatctct

SEQ ID NO: 53528 - DNA, 396 bp, Homo sapiens
aaatatcctaaatgcatttattggcactctcagaaactattaagaaaatttaaaaatagatacattaatatcatggtaggctaatactacatagattgtctccagctcatgaacccagtggaagaaactgggcaagagataagtttaagtgttttagaaagcagaactaatagaacatggtctttggccagtaaagtctatacacacacatgttatggtggcttccacgtgtgagcaggcctggtgaagctgggaaaggagtagagggcccttcagacctggcctggagagctggtggagcaaccggtcagtcgtcttcggtagttagtggtgggttaccaggtcagtctctcccagggacctgaggacccgggttatgagaaacatggcttttca

SEQ ID NO: 53529 - DNA, 430 bp, Homo sapiens
catatccccgttttctgagggggctggtgagaccattatcccggtagcagtgtaaaggggcctcagaagccgtgcggtgcctgagatcctcctcctcctcccatccgggaaaccacctctgctgctctgactgtctgaagctaacctcctgggcttcctgcttgaggcagaccttcatgaacaggcttaagccacccatcccgccttgggacacacatgccgccctctcggggaccttggactgggaccttgccattctgctcctgctggggaggtcgtgccgcctgtttctctctgtgtgtgagtttgcaggttcccagaggcagagactgggctttgcgacagctcccctcccccaaccctcgatggacaaggagggcccttgtcattcctcagacattttgttccaaagctgaaaggtcccctccac

SEQ ID NO: 53530 - DNA, 336 bp, Homo sapiens
tatttttcagatatggataaaaattgcttaggagagtaaagagagacaaagttgaaagcaggtttatagtaggtgttgttttagtgttgatccctttttgctccaataatcaaagtgataaatattgaaaattgattcatgcagcattacttactccattctaatttttatatatgtcaaaagtgccatctcccaaactgtgctatccccttcaggagaagagactctgctgaagtttataaggttgacatattgccagcttcaataatgtaaagatgaagtgtatactgaattcttaatgcaaataacaactctattggaaagtaatccagttat

SEQ ID NO: 53531 - DNA, 207 bp, Homo sapiens
atattacagattaaaagccattataattattttctatagataacgtttgcttaaatttacctcatgtttatcagttccttaccattccttcttgcatctcagactttccttctgtgatcattttccttctccccagagtatatcctttagaagttcctttattgtatatagacctgagggtaataaacattttcattgttttcctgt

SEQ ID NO: 53532 - DNA, 669 bp, Homo sapiens
aactctagccctagaagaaactgtatatgagagggggacggctagcctccaagggatttgggaatgatgcatgattctacaggttgcatcttctaagctgcaagtcaagagctcagcatctcccagaaatgcctgttctgagctccatggaagtcctacgtgagtgccttgtccaaaatattggctcagttcaaagtttatgtctcagtgtttccttcctgagagtatccaaagaagatctcagccttctgtgattttgctctcccctccttgatatcacatccactatgaatgtctcacccaggccagtgaacagaccctattgccacattattcatgtttatgtttgctctagggcagtggttatcaagcttgagcacacatcagaatcatctggaagacttattaacacagatttctgggtcccactcccagagtttctgatttagtaggtctgggataggccctacattcccaataatacccaggagatgctgattctgctggctccaggatcacactttgagaacccctgctctaaagcaatgttcacaagtgtatttttagatcaaagacccattggagaatctgtcgaaaagcttttctaccacttcccagtaaataatacacaaatgctaaaaaatcattaaaatttctttacaatttcag

SEQ ID NO: 53533 - DNA, 918 bp, Homo sapiens
aaaccagcctcatgtgacaaagcgcaggacccctcactgccccaactgcttgctgttctctctttcttgggctctaaggacccaggagtctgggtgcacagcctccttctctctgagattcaagagtctgatcagcagcctcttcctcctccaggacccagaagccctgagcttatccccatggagctctgccggtccctggccctgctggggggctccctgggcctgatgttctgcctgattgctttgagcaccgatttctggtttgaggctgtgggtcccacccactcagctcactcgggcctctggccaacagggcatggggacatcatatcaggctacatccacgtgacgcagaccttcagcattatggctgttctgtgggccctggtgtccgtgagcttcctggtcctgtcctgcttcccctcactgttccccccaggccacggcccgcttgtctcaaccaccgcagcctttgctgcagccatctccatggtggtggccatggcggtgtacaccagcgagcggtgggaccagcctccacacccccagatccagaccttcttctcctggtccttctacctgggctgggtctcagctatcctcttgctctgtacaggtgccctgagcctgggtgctcactgtggcggtccccgtcctggctatgaaaccttgtgagcagaaggcaagagcggcaagatgagttttgagcgttgtattccaaaggcctcatctggagcctcgggaaagtctggtcctacatctgcccgcccttccagcccttccccagcccctcctcttgtttcttcattcattcaacaaaatttggctggaaaaaaaaaaaaaaaaaaaaaaaaaaaaaaaacatattaaaaaacaaaaaaaaacacaaaggggagcgcaaaaaaaaaacacgtg

SEQ ID NO: 53534 - DNA, 842 bp, Homo sapiens
aaaccagcctcatgtgacaaagcgcaggacccctcactgccccaactgcttgctgttctctctttcttgggctctaaggacccaggagtctgggtgcacagcctccttctctctgagattcaagagtctgatcagcagcctcttcctcctccaggacccagaagccctgagcttatccccatggagctctgccggtccctggccctgctggggggctccctgggcctgatgttctgcctgattgctttgagcaccgatttctggtttgaggctgtgggtcccacccactcagctcactcgggcctctggccaacagggcatggggacatcatatcaggccacggcccgcttgtctcaaccaccgcagcctttgctgcaggtaaggactctggactggactggggcatcgcgagccagcgaattcctgccgaggagctgagccatctctcttgtccttgtccccagccatctccatggtggtggccatggcggtgtacaccagcgagcggtgggaccagcctccacacccccagatccagaccttcttctcctggtccttctacctgggctgggtctcagctatcctcttgctctgtacaggtgccctgagcctgggtgctcactgtggcggtccccgtcctggctatgaaaccttgtgagcagaaggcaagagcggcaagatgagttttgagcgttgtattccaaaggcctcatctggagcctcgggaaagtctggtcctacatctgcccgcccttccagcccttccccagcccctcctcttgtttcttcattcattcaacaaaatttggctggaactggaatctggttattttgagattaa

SEQ ID NO: 53535 - DNA, 756 bp, Homo sapiens
aaaccagcctcatgtgacaaagcgcaggacccctcactgccccaactgcttgctgttctctctttcttgggctctaaggacccaggagtctgggtgcacagcctccttctctctgagattcaagagtctgatcagcagcctcttcctcctccaggacccagaagccctgagcttatccccatggagctctgccggtccctggccctgctggggggctccctgggcctgatgttctgcctgattgctttgagcaccgatttctggtttgaggctgtgggtcccacccactcagctcactcgggcctctggccaacagggcatggggacatcatatcaggccacggcccgcttgtctcaaccaccgcagcctttgctgcagccatctccatggtggtggccatggcggtgtacaccagcgagcggtgggaccagcctccacacccccagatccagaccttcttctcctggtccttctacctgggctgggtctcagctatcctcttgctctgtacaggtgccctgagcctgggtgctcactgtggcggtccccgtcctggctatgaaaccttgtgagcagaaggcaagagcggcaagatgagttttgagcgttgtattccaaaggcctcatctggagcctcgggaaagtctggtcctacatctgcccgcccttccagcccttccccagcccctcctcttgtttcttcattcattcaacaaaatttggctggaactggaatctggttattttgagattaa

SEQ ID NO: 53536 - DNA, 714 bp, Homo sapiens
aaaccagcctcatgtgacaaagcgcaggacccctcactgccccaactgcttgctgttctctctttcttgggctctaaggacccaggagtctgggtgcacagcctccttctctctgagattcaagagtctgatcagcagcctcttcctcctccaggacccagaagccctgagcttatccccatggagctctgccggtccctggccctgctggggggctccctgggcctgatgttctgcctgattgctttgagcaccgatttctggtttgaggctgtgggtcccacccactcagctcactcgggcctctggccaacagggcatggggacatcatatcagccatctccatggtggtggccatggcggtgtacaccagcgagcggtgggaccagcctccacacccccagatccagaccttcttctcctggtccttctacctgggctgggtctcagctatcctcttgctctgtacaggtgccctgagcctgggtgctcactgtggcggtccccgtcctggctatgaaaccttgtgagcagaaggcaagagcggcaagatgagttttgagcgttgtattccaaaggcctcatctggagcctcgggaaagtctggtcctacatctgcccgcccttccagcccttccccagcccctcctcttgtttcttcattcattcaacaaaatttggctggaactggaatctggttattttgagattaa

SEQ ID NO: 53537 - DNA, 640 bp, Homo sapiens
aaaccagcctcatgtgacaaagcgcaggacccctcactgccccaactgcttgctgttctctctttcttgggctctaaggacccaggagtctgggtgcacagcctccttctctctgagattcaagagtctgatcagcagcctcttcctcctccaggacccagaagccctgagcttatccccatggagctctgccggtccctggccctgctggggggctccctgggcctgatgttctgcctgattgctttgagcaccgatttctggtttgaggctgtgggtcccacccactcagctcactcgggcctctggccaacagggcatggggacatcatatcagaccttcttctcctggtccttctacctgggctgggtctcagctatcctcttgctctgtacaggtgccctgagcctgggtgctcactgtggcggtccccgtcctggctatgaaaccttgtgagcagaaggcaagagcggcaagatgagttttgagcgttgtattccaaaggcctcatctggagcctcgggaaagtctggtcctacatctgcccgcccttccagcccttccccagcccctcctcttgtttcttcattcattcaacaaaatttggctggaactggaatctggttattttgagattaa

SEQ ID NO: 53538 - DNA, 325 bp, Homo sapiens
tagcagggttactggccttgctgcggcccaagggaaaactctgcaggccctattacttggcggcctttaactcttatagaattgggagagaacactgacaaaagcgaggacatgattttacggttacaaatgatttttcttgcttgctttcttctcaccctttttaatttttcttttcttcttttcctgtctatcttaccttccctccgtgatccctgccagcccctcctttcttattatagctgatcatggcagtattgtttttttctgggtaaaaatcagagtggattagagaaagcttagcaggcctagcatgaggcctgag

SEQ ID NO: 53539 - DNA, 295 bp, Homo sapiens
aatagggctccctttgattgtcatccttagacaaaatttgatactctttgcactaccatatgattatatcccctgattttctaagattaaagtccattagagttagaaattggaactctcaagccgaagtcaagaaaacaaatcatgtctggttttagaggtgccagaatgatacaatggactttggagacttcggggaaagggtgggaggcgggtgagggataaaatactacaaattggggctgcgcgtggtggcttacgcctgtaatcccagcactttgggaggacaaggtgg

SEQ ID NO: 53540 - DNA, 209 bp, Homo sapiens
  misc_feature (64)..(65): n is a, c, g, or t
  misc_feature (187)..(187): n is a, c, g, or t
  misc_feature (196)..(196): n is a, c, g, or t
tatgcagacaattatgattacatggggtaaaaatactccaagatagtattcagttctcaagatnnttcatcacatttgccaagtttttctaccataaaattccccaccaatccatttatgtatagagttgatagttaacagagatcggaaatggccattgcatctttagtctggatttcctgagacntttggtttntttctagggctgc

SEQ ID NO: 53541 - DNA, 542 bp, Homo sapiens
ttgcgatagtttgctgagaatgatggtttccagcttcatccatgtccctacaaaggacatgaactgaggctttcatttattgtgtttatcactgaaaacaaatacatatttgttgcaaacaaattttgttcacattatacaaaaaggaataaacttggaagcaaatgtagctataatttccttctagatatttttctctagttattcaatgtaacctggggtcatatataacaaaaactaacatctactgagaatttgccaagtgctgtgctctgttccagtacttcacatgtgttagttaatgtaactcttacaaggcaccattcagataattacagccgaggaaactatagaacagagagaagtcttggtgttgtttagtggcaaagacagaccatgagcctacatagttcagacccacagtccattagtctgcaatgcctccctctagtgcttagtaaatgcttgttgaatcaacaaatgtttctcattgttcagaagtttgacatttttataataaaaattgacagtattttctttgt

SEQ ID NO: 53542 - DNA, 456 bp, Homo sapiens
cttagactgctcaagaattaaagcttcaattcgaacaaccaccctaaaactgagttgacatgttaggtatttgtggatcacactacatacaatgaccaaaccagttagtcatatacatatgattgctatttgttaaatcattcatgctcagagtctttgcttaaccagaggctgccccttctggctctgggatgtcctatcatcaccttttctgtagacacgaccctgtcagattttcctcctttagtcctggaaagggagaaaagatttgccaagaagagaagagcctgtttacgtgccctaggtcatccactgcagctaacttttggggtatctgtttgttttgttttttgaggcagggtctcgctctgttgcccaggctggagtgcagtggtgcaatcatgactcactgcagccttaacctcctgggctcaagtgatccttccacctcagcct

SEQ ID NO: 53543 - DNA, 327 bp, Homo sapiens
gacagaaaacaaaatagtgttctagtatctcaaatatttagagcattattttttaataagaccccttattttatctgtcttgttcctattgtttccacaaaacctggataaacctcttagaaaccatttcatccaacccctgtctccaggttaagactttatctattggtccctataggtaaaagaagttgactaaaacataaagcctatagtatctctctttaacatgttatagtctaaaaatgtttctcatctttaatccaagctttccctttcatatacttagcacattttcactttcctcttttttcaatgaagtaagcttct

SEQ ID NO: 53544 - DNA, 772 bp, Homo sapiens
taatactgtattatatttagccaattgtttattaatgtctctgcctcacatcctttcttccatgttaccctttattctgaagtaaatcctttagaagttcttttagcaagtatggtaaatttacatgaaaacttctttattttactattttgaattatagtttaatattgtgaagaattcaactctttgaaaacattacttttctgtctcctggtttctgcattgctttgaaaagtcttttgtcaatataattaacatttattttgttttgtttttattttctcttattggtttgtaagtgtttcctctggttttggtgttctgaagtttcgttgtgatatgcttaggtatgaaatttttaattctgcctgagactcttctataattcctaaatcttaagattcatctctttcataaataatgaaaaattatcacacatgttccctttgaatattatgtctctcaaatttactctattttctcctataggaaccccaaatagctgtgtgttagattgtctattctagacttcgtgcctttttaactgtttttattttacaccttttatttctcagtgcttctttctgaataatttcttcaaataagttttccagtgtaataaatctctctttacctgtgtccaacatatgctctttaatgtatccactgagttttaaatttcaataatggtattttccatgtctagaatttctatttggttctcattaaaacctctctgttctttttccaaaatacaggatttttaaatatg

SEQ ID NO: 53545 - DNA, 228 bp, Homo sapiens
gggccaggtagggcctgagcaccctgttctctgagtcctgctgccccagcagcccaaactcaaactcagctccaaggctacactgagacgtgtcagggacgggtgtatccggggagaagggcgcagtgtcagagcaccctgggaggggcttgtccgagcgaccgagcaggtagggcggggcactggtggctgacagacatgacaggcccagggtagggaggcctgagt

SEQ ID NO: 53546 - DNA, 519 bp, Homo sapiens
tgggctgtgagggcctggaggttggatgctttgcctcatcttctctttagcttgtctctaaaccaggcgcgaggtcagcactcactggatatttggttgggttgcctttgttcctttcactgatgaagggaacagtaagtgagcatcctccttaggtgtcaaagtgtggtgctgggcactagcatgcccacgatcccaccttcaggaggcttcccattcctaacaaggagacacagagtcagctccctgaatcctcacaagagcctccaaaaggtaactactgtgatcttcattctgcagggtaataagtagaggctccagcagtagggaggcttcctccagaccctctcacctactcattaccctcccatttaaataaatagtggggccggatgaggtgctcatgcctgtaatcccagcactttgggaggctgaggcgggtggatcacctgagatcaggagttcaagaccagcctggccacccatggtaaaactcatctctactaaatactaaaaaaa

SEQ ID NO: 53547 - DNA, 1319 bp, Homo sapiens
cccggggcccggcccgttccctctggcctctgatactccgcgctccggagtgtgccgccggatcctcgctccaacctcgtcgcgtcctagccccccgggatagaccgggccggcccacaaacggtgtgcccgcaccccgactcctgctccatgcttttggcagtcatgggagcggggggttgtgtatgggacagtgggcaactcgctgcaaagccaaccgtgtgctcccccgccgcgcccgtgagcttcacgcctcggacagctcctggtgcactttcccgctcttcctgtcaggaggtggtgccctctgggtaccaggccgctcgtcccgggccaatcgcaaagcgcttagagccgaatggggcgggacagaggcaagaaagggtcgtcccaattggagcgttcgaaaggttctgggcagaggcggggaagcggcgagtgggggcctcgccccgcctgcggtcgccatggtaaccgagagggcgcagctcagcgttggcgccagcaccggggtcttgtgctgtccctcaatgggtgaccagttaaggtgggaacctgtggtctcacatacttgaagtctgagctgagtggacctgactgccatagactttccattgaaaggggaaatgtgtcagagagaagcgagtctgggaggagggaaagtgccttcagtccaggactaatttcaaggtttacaacactttacacactctgcaactcctgataatccagggactactcctttggcagcgtttgctattcgatgcctccagatgtactgaagctgcaaaaacgagctcttcattacaaagatacgtttgtttaggaagagactggatttcacttgtcaacttaccccatcaccacgagtcatttaatgttggtaacgccagccacgatttttcgtatctataacaccccttcttccattgaattctacctacaaataactgaaggctcacattattttggaatatggacctccgcctcttgtggagacttgagattgctcttaagctgatttcccaaacaggggctgcaatgtgtgttcccgattttagattcattgagctcaccctagatgagtcctttggttcggtggttcggaaaagtctctttgttccttctccaaactcaatgttccaggatctcttggtgctcgtgccagtgtctcatgtagaatgttgcgtgatctctgctcaagaatctgagtcacaaggttgatgccttcacagatgacagaacagaagttccctgagtacccgagtctgtctttgctgtttctaaggtagtgattattaaaatgtcaagggaaatga

SEQ ID NO: 53548 - DNA, 2176 bp, Homo sapiens
cccggggcccggcccgttccctctggcctctgatactccgcgctccggagtgtgccgccggatcctcgctccaacctcgtcgcgtcctagccccccgggatagaccgggccggcccacaaacggtgtgcccgcaccccgactcctgctccatgcttttggcagtcatgggagcggggggttgtgtatgggacagtgggcaactcgctgcaaagccaaccgtgtgctcccccgccgcgcccgtgagcttcacgcctcggacagctcctggtgcactttcccgctcttcctgtcaggaggtggtgccctctgggtaccaggccgctcgtcccgggccaatcgcaaagcgcttagagccgaatggggcgggacagaggcaagaaagggtcgtcccaattggagcgttcgaaaggttctgggcagaggcggggaagcggcgagtgggggcctcgccccgcctgcggtcgccatggtaaccgagagggcgcagctcagcgttggcgccagcaccggggtcttgtgctgtccctcaatgggtgaccagttaaggtgggaacctgtggtctcacatacttgaagtctgagctgagtggacctgactgccatagactttccattgaaaggggaaatgtgtcagagagaagcgagtctgggaggagggaaagtgccttcagtccaggactaatttcaaggtttacaacactttacacactctgcaactcctgataatccagggactactcctttggcagcgtttgctattcgatgcctccagatgtactgaagctgcaaaaacgagctcttcattacaaagatacgtttgtttaggaagagactggatttcacttgtcaacttaccccatcaccacgagtcatttaatgttggtaacgccagccacgatttttcgtatctataacaccccttcttccattgaattctacctacaaataactgaaggctcacattattttggaatatggacctccgcctcttgtggagacttgagattgctcttaagctgatttcccaaacaggggctgcaatgtgtgttcccgattttagattcattgagctcaccctagatgagtcctttggttcggtggttcggaaaagtctctttgttccttctccaaactcagtaagctgtcttacctgaaaccaaaaataggggtatgaggatatgaaaaatggctcttactctgcagggtttaatgtaggacaagcagttctttaaatgccagatggattcttggaatgaagcaggctactcggttccaggttctttccttcatatgttgtgtgtacttttaaatactccccactgcaaagctaatagctaagcttacagttaggcaagctaaaatccttacaaactgcacagctgctgaggagggagttccaaaaaatccactctgcttacttacctccaaagaagaacccccttcatgttcattaatattctccgctcttctataccccattgatatgtcaagtttccaattcttctttgaagcccccattatgggttacttataatcgtcattgattgggttttttctttattcttaatttgttttttaaagctgtcaccaaattcttaagcatttttgccaaaaggcgcaggagcaagcggtcaacctttcataattctccaacgctgaggatgcaaaaccacagaattctaactgaaagatgccttaaattctaagattccttccagctgtaaaattcaataatcctgtgactcactattaggactcctctctgccctccttctagactcataatcttgactaatcagtcatgaggatgaggctaattagcaatggggatttatggttatttctagcccactccgaacaatgagttatgtaagcaaagcaacatatataaaaatgtaaataggccggtggctcatgcctgtaatctcagaactttgggaggccgaggcaggtggatcacaaggtcaggagttgagaccagcctggccaacatggtgaaaccccatctctactaaaaatacaaaaaattagctgggcttggtggcaggcgcctgtaatcccagctactcaggaggctgaggcaggagaatcacttgtacccaggaggtggaggttgcggtgaactgagattgtgccactcccctccagcctgggcgacagagtgagacttctttt

SEQ ID NO: 53549 - DNA, 389 bp, Homo sapiens
caaaattgctgccataagtgttaatgctatgctacaatctcaaatatataaaatttcttcctgtgatgtctaccagttccaataacattcacatgtaaaaatgcctacaaattgcagggtgctcatagtatgtgtgccttgtgtataaatatgttacttatacatatacccatatacatacacattttaattctaaattaatctaaattaatctctcaagttatagttaagatagaaactaaaagttccacttttagtgaactgaatcgtcatgtcatatctgttaattaagtcctatatctactagttagatgcttgcatttaatatgcaaacatacctactagttatattatatgcatattatattatttgcatattaaatgcaaac

SEQ ID NO: 53550 - DNA, 232 bp, Homo sapiens
cagcttctttctttctttcctcccatttctcctctcttcccctcccttttgcctttgctctgcagagacactggtgccgtgacacacatctgagcatggctggtggggctgaccagtggtcaccagtgcaggatttaagtggttggagcttaatagtagctacaagtctttaatttcttcagcaggtttttaatggcctttgatgcacgttagaaaagacatggaaagtcct

SEQ ID NO: 53551 - DNA, 389 bp, Homo sapiens
acttcagtttcctagtgatttaaactactaatttccaacttatttttttttatagtgaaaactaaatattccttttgtagatgtaaccatttctggaagccctaagtatttttgaatgagtataattcatgcacactttaagagatttcaagcatgacaagcacagtgaataacatatatccatgtgattaccactgaggtttaagaaatgttaacatatgatatctgcttcagatatttatctttttaaaaatagaacattacagctgggcatggtggctcacacttgtaatcccagcactttgggaggctgaggctggtggatcacctgaggtcgggagttcgagaccagcctggctgacatggagaaaccccgtctctactaaaaa

SEQ ID NO: 53552 - DNA, 514 bp, Homo sapiens
caagcatggctcactgcagcctcaacctcctggactcaagtgatcctcctgcctcagcctcccatgtagctgggatcacaggcacatgccaccacacctggctaattttttattttttgtagagacaggggcctcacttcattgcccaggcggatctcgaacacctgggctcaagcagtcctgcctcagcctcccaaagttctgggattacaggcataagccactgtgcctggccttgaatatattttttaaccaaagtaatttatgaatataaattgtttctatataacccaaagtcactctcattgacattaagaaactcagagagtgggttctaaatgtaatattaccacacacccaagtcacttagcctctacaagtaccacgtaactagcagccgttaaaagatggccaccgctagtccagtcggccacagacatggttttgtttggccaatacaagtttttgaaagttttaaaaaattgacaacattaaagatcagaaacttgaccta

SEQ ID NO: 53553 - DNA, 190 bp, Homo sapiens
cccgagctctgtggggccccggaaacttccaggaatgcgtggaagaccagcatcatgtcggtgctctcctttccagttttcaaacaggctatattggagactccccactttgcaggaaacaagaatccatcgtcaggccgtgatgtacgggatgtttcttttctctgtggtttcgctctcgttgtctacg

SEQ ID NO: 53554 - DNA, 375 bp, Homo sapiens
aacaagaaactgaaagctgtcaacaaaatgtgtttaaaactttgccctgagtgggcatcagactggctgtttttaagcctgaagtccagccgcattgattaggcacgttggccatcagcatcttccagcagagcagatctgcagagaaaggcaggacccaggttttagtgctgattctggatggcccttgaatatagacagaatatagacagcttataacaaagccattccaaggcagttttattttacaaatctaaaactttcggtagttcttttgaactaccgtgtttctgtaaatttcttcagtgaactctatgaaccgttttttttgtttttgtttttgtttttaaatagcagcggttcagctgttgggaa

SEQ ID NO: 53555 - DNA, 115 bp, Homo sapiens
ccaatgccaagtgagaacctgatctactctaccagagagactaagtggaggagaacccagctgatagcaccagtgaactgccagatatttgagtgatgtcactttggactatgta

SEQ ID NO: 53556 - DNA, 360 bp, Homo sapiens
atataatacacagattgccctcaaagtcatatttccaactgctcatcaatctaaaaatccaaaattttgaataattttttgatgaaataatttatttcattgtttctcaattttggctgcacagtggaaccacctgggctgtttgaaaaaacctaggcctagccaggcacggtggctcatgcctgtaatcccagcacttagggagaccagcctggccaacatggtgaaaccctgtctctgctaaaaatacaaaatcacctgggcgtagttgtgcattcctgtaatcccagccacgccagaagctgaggcagaatcgttcgaatccaggaagtggaggctgcagtgagttgagatcttgcc

SEQ ID NO: 53557 - DNA, 327 bp, Homo sapiens
ctgtctcagcctcctgagtagctgggactacaggctcacgccaccacaccccgctaatttttgtatttatggttgagatggggtttcaccatgttggtcaggctggtctcgaactcctgacctcaggtgatccacatgcctcggcctcccaaagtgttgggattataggcgtgagccactgtgcctggcccaaccacaaatgtttctgacgatgtcattccgtgtccaaaatcctttgctatcttcccatcaagtccaggcctttttcctctttttccctttagcttggacttcgttcaccgttctcctcctggcccctccctcctt

SEQ ID NO: 53558 - DNA, 340 bp, Homo sapiens
cagagatggggtttcgccttgctgcccaggctggtcctgaactcctgagctcaggtgatccacccacctcggcctcccatagtgctgggattacaggtacgagccaccacgccttgccatgagcagcctcttctgatatccgtggtgtgttctgtacactttttttttgtctgaatgcacctttcctttctcctcccttgcactccagaaccgtggatactcaagtctatcctgaaccatatagagggggagctttgagtgctatatgaaattcatttatgatatcattcttcattccttcacagaagtaactcagagttcaattagggattcacatggt

SEQ ID NO: 53559 - DNA, 667 bp, Homo sapiens
gtctcctctggacactgtgggtcaaaccttttgagagacaacaacaacctctgaaaccctcttgccatgacagcaagcaaggaggagggaccagaagaccctcgacgccccttttcagcaggaagtagctacagaagaatgacctccaccctatttcccaaaagatttctgggtcccaactccttaaggaataaacgtgaaagggggcagttagtcagatattagcaggcaggaggggaggtacccatgttggaaggaacagcccagaccacctcttaagatgcccagtactcactttatggtcaaactcaaaatgtggctaactagatcctgataagggagaaaaaaggcaaaagcagaattcttgagagccacacaggtgcaatgagtacaaatttgatggctatatgaccttcccgggtggcagtaatgagcaacgtccccatcgggtggaatttgtattgatcactgcgtccagtgcatgtacatgaaccacagtaagggatgatccccccaagccttggtgagaactggacaaggaaagaagcaagaccatagaatatcgaatgcagaatgtcccggggctgtttccagcagggtcagcccactcctctgttggagtgtacttttacttccccaataaaacttttgcctgctttactaaaag

SEQ ID NO: 53560 - DNA, 433 bp, Homo sapiens
gcagtcaggatggacacattagaaagaaacattttagtttcaatgttaccataaaaccagaacgaaaagcagcatgctgtattatattttacaatttaggttccatttctaactccacctaaaatgaatatgaacaaactcatttttaagtgtttgtcagtcaaatacaataatagtctaagtttattcacatatgtaccaaccaaagcccaataaagctaaaaggaagccaagtgtaataaaaaggcagctataaggtcttgtgtttgaatttttacccagcaagaaataaatgatacttagtaatccatctttcccccccactgccatccctgcacacatctaaaataggctaacttcacctattctaacttctgaaattgttttggaattcctgttttaattttttttttttaagactggatggttaagt

SEQ ID NO: 53561 - DNA, 229 bp, Homo sapiens
ttgattttaatataatttttctttatattataactgacatcaaatatcagaaaaaataaactttaaatatttctccaaagtttctgcataaattcttaacatgaaaattaaaatgtagtatgtatttgtactcaacattttatatccacaactctctgtattttaatgctaaaataagccatcaatacaattatagcattctttaaaatttttttacataaatagcaaa

SEQ ID NO: 53562 - DNA, 517 bp, Homo sapiens
gggaaggaggactgattctaaggggacacacagtgatgtctcaagatatttttggttgtcacgacttgggggtgctcctggcccggagtgggtggaggccaggggcgctgctcagcaccccgcagtgcccaggacggccccaccacggagaacaatccagccccagatgtcaacagtgccgacggagggggagaaatcccgctccagtgtgatctccaagcaatgaaaaacacagcacacaggattctgtggcatatgctatcacagggtacgtgtttttaaaggaaaggcacacacgtatcttaggaaagggacatacggagtcgatgacagtcgcttgtctctggggagaagggctggctgcccgaggagcagagaggggaaactgacttcttcctctaccttttcaactttgtaccttgcccatccagaggattttgaacgtaactgctctagacgcaacttttccctggctctgggttatctggcaagagtcctgtgtcgacagcctcgggac

SEQ ID NO: 53563 - DNA, 258 bp, Homo sapiens
aagtaggaagctaaattaaagtcatcatctcttcttcacttgttcctcagtgtagctaagaagacttgacttctgggactttagctctgatagaggagtttagatacgtgtctcacctcctgaactttctgccttcatccccttttcattctcataatctgtcatgaccagaaagaggggacgccttttctgggctgatgtggaactacatggcctcttattctcctctttttggattggtattgcaataaggtaaaa

SEQ ID NO: 53564 - DNA, 602 bp, Homo sapiens
tgagttttcatccattggtgacaagatggtcagacttctagagaaataaggtagttttgtggtagaacaaactcttccttgtgggaggtatagtgggatttggggaatagggtttatgaaatggtccccagagtgggatggcttgccttttcaaactgggtttcccacccagcaagttaagttgacccattgcagtggattgagtggagggcaggtgaagggcaggtgttttcaagtcaaaggagttcaggtgaagggcaggtgcttttagtcaaaggagttccttagcattatttcctcctttatttggagatcagattgaagatgtaggggactagaatgcagttgtagtttgtggtgtttactttttatggaaaagtgcctcttatgtgaaaagtcttctgtgcttgatcctgggggtaggggggttataaaaatgtcatacctgggatcctgcccttaaggagttgatggtaggtaatgctttcctttggctttttgttcatcttgagtctgtgtatgttcagttatcttcagccatttcctgggcaatgggaaacatttctgttaaaacaaacttctgactttgatctgtgacttat

SEQ ID NO: 53565 - DNA, 397 bp, Homo sapiens
gagacggagtctcgctctgtcgccaggctggagtgcagtggcacgatcttggttcactgcaagcttcacctcccaggttcacaccattctcctgcctcagcctcctgagtagctgggactacaggcgcccaccaccacgcccagctaattttttatatttttagtagagacgggggtttcaccgtgttagccaggatggtctcgatttcctgacctcgtgatccgcccgccttggtgtcccaaagtgctgggattacaggcgtgagccaccatgcccagcctttggagacacttttgattgccacaactcagggtagggagggctgggaaatattactggtgtgtagtgcatcgaggccagggatgctgctagacatcctgcaatgcacaggacagg

SEQ ID NO: 53566 - DNA, 350 bp, Homo sapiens
aaaagttgaggtttctggatacacactgtcaagtcactgcccaaggaggtcttggaagtttacagtctcattaacagggtttgagaatgaccattttctgacaggatttccaactctgaggattctttatttccccatttgctgttgactctaaagatgagagggtgagtgacgaatataaatatgggagaaaaataaaacgatgtgtttctgctttcgattggagagctccccagagccgtctttggaattgctgttccctgaggggatatggtagccagagcatgttggcccagctgatgttttctaggattggtctttgagtgtggcatttgctgtctctgtgtccc

SEQ ID NO: 53567 - DNA, 145 bp, Homo sapiens
gatttgccgggctgtgtgtgctctgtttggaggaagagactggcggtacattggccctgatcaacaaggaacttaagtttccttgaaggagatcagagctcgcatgctggctggctgacggcaacacaccctgtggctttgtgag

SEQ ID NO: 53568 - DNA, 232 bp, Homo sapiens
gtttattaattccattatgagtaaaataaggggtaataatatacctgcctcatacagtcactgtgaagatcaccaaggttaatagatgtaaagcagttagcagtgtctggtacacagtaagacccaatacacatgagtagaataaacacattcgttgagagaagagggagcagcaagggaagtgacagcaacgctcttatagcaggagttaatgtgaagagacgagctatag

SEQ ID NO: 53569 - DNA, 249 bp, Homo sapiens
tttacaggttattgatcagaattgtcccatggtcatccttagctgaaagtgagcctggatcatcaaggctttcagtggcacacacatcttcctgaaatgtatccttttgtctcatccatcacaacttcccagggctcttttcctttctccaaagaggaaactacatctggcagaagatgaaaagcccagtgagatcatgctgtagtcctctaaaatcacatctatgcacaaatcattctgtgcaggatc

SEQ ID NO: 53570 - DNA, 198 bp, Homo sapiens
caacagtaaagactcacatgccaccacttgaaagacatggctgaaatagtcctttgatggaaatgtaagataaaatgaccaggacacagagagtttgaaaatgaataagctaaatattcaatccaaaaagttcgaaatgcaacagagaaaatccaaagaaaccaattgaaagcaacaagaaaggaggaattaataaca

SEQ ID NO: 53571 - DNA, 611 bp, Homo sapiens
gtcacacaaaataagaagtataaaagaagcataaaataaagttaaaaatgaaatgaaacactaataaatgaaaaaacaaacattgcggaggatcaaaacacatgaaaaacaggttatttgaaaatacttctgcaagatggctcaagaaaaggagaaaaggcacaactgaaaaacagtaatatggatatacaggctgggcgcggtggctcacgtttgtaatcccagcactttacaaggctgcggcaggcggatcacttgaggccaggagttcgagaccagcctagccaacaaggtgaaacccgtctctactaaaaacataaaaacacaaaaattagccaggcgtggtggtacacgcctgtaatcccaactacttgggagactgaggcacaagaattgcttgagcctgggagacggacattgcagtgagctgagattgtgccactgcactccagcctggatgaaagagcaagactctgtctcaaataataagtaaataaatagtaaatataaacaaaaataaaaatgggtataggccgagtgcagtgactcacttctgcatactcagcactttgggaggccaggagtttgagaccagcctgggaaacacagca

SEQ ID NO: 53572 - DNA, 271 bp, Homo sapiens
gcatgccaccgcgcccgactaatttttatatttttagtagagacggggtttcacctcattggccaggctggtgtcgaacttctgacctcatgatccgcttgccttggcctcccaaggtgccgtgattgcaggcgtgagcactgcacccggccgctaaatctcattttgagtctgagttaagcagtttaccttttttctgatctttatttgaaaaaaaaattaatcagcatgtccatatgctagctgtctaaagaaaatattgatttttttg

SEQ ID NO: 53573 - DNA, 270 bp, Homo sapiens
gctggtctcaaactcctgacctcatgatccacccgcctcagcctcacaaattgctgggattacagctgtaagccaccgtgcccggcccaaaattcattcttttacatgcacaaggaaggaacatttatcatatgtgaacacttaacatatgactgagccataaaaaaggccttaacaaatttccaaagatttaaatttcttagcatggaaatggatattgaccaatacagattaagccagaaatcatacaaaataaaaatagcttacaaa

SEQ ID NO: 53574 - DNA, 388 bp, Homo sapiens
ctgggttccccaggttgcttttgaattcctgcccttagacgatccttgcacttggcctcccaaaagtgttggcattacagacatgagcttccgtgcccaacctgttttctacttttaaataacatttctgtgtttatagaacttcagcaatctcgctcccattttacctaagtaaaactcaaattctcaacatttgcttatacagtgtatgttttcattatgacattcttactaggaacaaaattgagatagcacattaactgggttgagcgaggtggcttacatctataatcccaacactttaggaggctgaggtaggaggatgcttgagcccaggagatcaaggcttcagtgagccatgattgcaccactgcactccagcctgggc

SEQ ID NO: 53575 - DNA, 602 bp, Homo sapiens
taaaaaaatacacattcctagtagacatttcttattgacagtgtacggtattctgtgagctggggaagacagatacccttttattgggggcagggggaggatgtagcaaaggaccaattttcctggagatcctattacgtgaagggacttatactggacacatcatggagaaaatcagaaagaaggctgcttaataagacccactcctggatgcggccactctcaattctcagtgtctttgggaagcaaggttcgccatccacttgtctaaacagatgatgatagcagaggtgctgcacaccttctccctgtgacttgtgaatgcctttcgtgctcccaaataaggaactcctctcactgctgtctgctctgagctgtatttcattttgatagccatttgcaggggacacctttgaactccatgcaatgtaaaagatgtggttgagaaattcttcaatggaatttcttccccttttcccccaccctcattttcctctgggtgatttacagcttgaacattaggtacttagagacagtatgtctgacctacctttaaaaatacacattaagacacacacaatttgaagaaaaaagaagccaaa

SEQ ID NO: 53576 - DNA, 2873 bp, Homo sapiens
aatagcaatagctttatagcagctccggttacctgttttaaacatggaaggagagtcgctcccagatagccctcacgagtggccctggagcagggagtggtggagcagatcttccttgtttgggaggagcctgaggtggacctcgcgtcctgagtctggaaggcacctatggggacctgctggggtgatatctcagaaaatgtgagagtagaagttcccaatacagactgcagcctacctaccaaagtcttctggattgctggaattgtaaaattagcaggttacaatgcccttttaagatatgaaggatttgaaaatgactctggtctggacttctggtgcaatatatgtggttctgatatccatccagttggttggtgtgcagccagcggaaaacctcttgttcctcctagaactattcagcataaatatacaaactggaaagcttttctagtgaaacgacttactggtgccaaaacactgcctcctgatttctcccaaaaggtttcagagagtatgcagtatcctttcaaaccttgcatgagagtagaagtggttgacaagaggcatttgtgtcgaacacgagtagcagtggtggaaagtgtaattggaggaagattaagactagtgtatgaagaaagcgaagatagaacagatgacttctggtgccatatgcacagcccattaatacatcatattggttggtctcgaagcataggtcatcgattcaaaagatctgatattacaaagaaacaggatggacattttgatacaccaccacatttatttgctaaggtaaaagaagtagaccagagtggggaatggttcaaggaaggaatgaaattggaagctatagacccattaaatctttctacaatatgtgtcgcaaccattagaaaggtgctagctgacggattcctgatgattgggatcgatggctcagaagcagcagacggatctgactggttctgttaccatgcaacctctccttctattttccctgtcggtttctgtgaaattaacatgattgaacttactccacccagaggttacacaaaacttccttttaaatggtttgactacctcagggaaactggctccattgcagcaccagtaaaactatttaataaggatgttccaaatcacggatttcgtgtaggaatgaaattagaagcagtagatctcatggagccacgtttaatatgtgtagccacagtaactcgaattattcatcgtctcttgaggatacattttgatggatgggaagaagagtatgatcagtgggtagactgtgagtcacctgacctctatcctgtagggtggtgtcagttaactggatatcaactacagcctccagcatcacagtgtaagttggtatacagaaaaggtgtccttttgtaaaaatcagcaattctccagaggactatctcacataagtcatcttatgagctcacaggacaagaatatacctatgtctgattggttgccaggtaagacattaagactcaacaacaatatcacagaatcagaccatgtgtcccatggcaatgtgaatccaatagtcaattacataatgactatagaaacacaacagtcaccaaattaaactagacttactattttagtgagttaaaaattacatactaaaagtttattggtaggtaataaatgcttttgagtaaatagtggaaaatgtctcatgttgaggctatggttttgtaggaacaagtacccttattttcagagcatcatgtacttaagtataatggtcttggtaaagatagttcatataagttgtatctagacaactgtatcgtctaaattgtaaacaattatctagtaccaattttccctttttatttttcagcatcaagagaaaaccaatcagcttcatcaaaacagaagaaaaaggctaagtcccagcaatacaaaggacataagaaaagtgggtcaccacgtggtgttcacatacattttctaattgttaactaattggagtcacagtattcttggacagaaaatgatatatcttgtgagaactgatgattgtgcattatgtattatgcttaaaggtgcagtatgccataaaaggcaaacccttgcaataatgagaaacactgatattttactaacaggagaaatgattaccacagtatttaaagtatacgtggtaaagaatagagtctgtgaatgattcttgaaataatatgtaaaacctactgaaagttaatcctttttaaaaactttatttaaaaagaaaaattagcagccaggtgcagtggctcacgcctgtagtcccggcactttgggaggccgaggctggcagatcacaaggtcaggagatcgagaccatcctggctaacacggtgaaaccctgtctccaccaaaaatacaaaaaatctgccgggcgtggtggcacacgcctgaagtcccagctactcaggaggctgaggcaagagaatcacttgaacccaggaggcagaggttgcagtgagccaagatcacgcccctgcattccagctgggcaacacagcaagactctgtctcaaaaaaaaaaaaaaaaaattagcagatgcttgatgcttacagtagatgtgaagcctaataaacccatttttcctagaaagcaaaactttctagagtgatactggtaagaaatccaagttgatggcaaacaagctttaccaaatttttctagaaatgctttctatactaaaaaattagccgggtgtggtggtgcacgcctgtaatcccagctacttgggaggctgaggcaggagaattgcttgaacccaggaggcggaggttgaggtgagccgagatcgtgccattgcactctagcctgggcaacaagagcaaaactccatctcgaa

SEQ ID NO: 53577 - DNA, 634 bp, Homo sapiens
cctgagtgacagagcgagaccttgtctcaaaaagggagagttgggtacttgttacaacagtctctgaggcgtgaagaaatgaacaagaggacccttaatgtggaccagccttagcatctgccatagaggagtatggttatctgtagcataaaagagatcaagttggagcttgaagaaggtagagaccgtttgtaaaaactctgtatgtgataaatcagaaagaaagaagtcaaagtgttaccaagtaggatttggagcctagctgaaactagataggtaaatagtaagcactcagcccagtttcatgatgccgtgacagcaggcagctatagctatggtcaaacgcactgcttttcccagacctctgaggtcagttataggtaatcctgcttttgtttctggaacacactagaatttacatagatttttttcattagaacttctgttatttaacataactcaatagagaagcatgtttcactttgaagagacctttatataatagattttcctttcttttagaatgtcaaagtattatttttataatagtggtatctaatttcaagtacttagaattctcttcattgaaaaggtgctagctgacggattcctgatgattgggatcgatggctca

SEQ ID NO: 53578 - DNA, 447 bp, Homo sapiens
tggcatgcacctgtagtcccagatgctcgggaggctgaggcaggagaatcacttgaacctgggaagcagaagttccagtgagccaagatcatgccactgcactccagcctaggtgtcagagggagactcagtctcaaaaacataaagaaactcctgtttgtttgcaaatatgatataagccaaagctcatgctatttagagaagttatttgatctttacataaagaaaacgttctttaaatgggataaattaattttatgtcctttcacacattttaacaatgataaccttcttataaataaaagatttgagaattataatacatctaaatttgtttcattttagcagtctccatggaaggtttcagctggggtaactacatcaatagcaatagctttatagcagctccggttacctgttttaaacatgtaagtacagaatttctca

SEQ ID NO: 53579 - DNA, 288 bp, Homo sapiens
cttcattcctccttccccaggtccccttccaggccgccaggtcccctccccgacctggagcccacagccttgtaattaaattgtaaacgtccttgtaattaaattcatgtaatatccattattattattactgttttagactaaattacttagagcacattgactggatcaaaggctaccatgaacgttttcaagggtttttatagttattgacaaattcttctccagaaatttgaccactttacactctggggtaagattcagactaagtgtgtctagaaagggtga

SEQ ID NO: 53580 - DNA, 409 bp, Homo sapiens
ggtggcttccccagggcctatgcctacccttgtccaggtcagcctcatgctgagcccccagggtccctgagcctttctgtccacgtcccatgcccttcctcccttccccagccttcacgcacacagtgagaatttctggagcacctactgcagactcacaaacagcagtgcctgcggtgagcaggtctatgcaaacctacccccaaaggctgagggaaaaaagctaacagatccagtttctcagaaggaaacacttaacagggactcataaacagaagccatgtctcagggccgggtgcggtggctcacgcctgtaattccagcacttggggaggctgaggtgggcggatcacttgaggtcaggagttcgagaccagcctggccaacatggtgaaaccccgtctctact

SEQ ID NO: 53581 - DNA, 343 bp, Homo sapiens
aaaaatacaaaaattagccaggcgtggtggtgcctgcctgtaatcccagttacttggatactgacatgggagaatagcttgaacccaggaggtggaggttgcagtgagccgagaccacaccactgcataccagcctgggggacagagcaagattctgtctcaaatatatgtgtgtgtgcgtgtgtgtaagtattaggagatacgataaggaaatttccccaagtaaaggaagaactgaatccgcaaaaagaaaagagagtgggttgtatggaaacccagtagggggacccattgggaaaaattggtccaaaataatagacaccccaaaaaaaataccctggtg

SEQ ID NO: 53582 - DNA, 283 bp, Homo sapiens
taatgttatttgaaagtaggcttaggtaatttgaacaggtatattgcagactctagggcaacaagtaaaaacatttgtttaaaaataagcataattggtatgctaatagacatcataggaatgggctggaggagaagaagtagcaagtaccttacaggccttggtaagacacatacactatgagtgttaggagaaaaaaaacataaatactcaaggtcctgcactaacagtaaaacttttaggttcccagtggactttgtcatgccagaagaactccttcaga

SEQ ID NO: 53583 - DNA, 278 bp, Homo sapiens
cagctaaagggtaggttggatctggcatcagtcaagaaggctaggggccaggtgtgatggctcatgcctgtaattccagcaccttgggaggccaaggtgggaggattacttgagcctgggagatagaagctgcagtaagccgtgatcccacacaccactgcactccagcctgggtgagagcaagaccctgtcttaaaaaacaaacaaacagaaaaacagctgagaacctcctggaggccacagccagtccctcccctgtgcccggccccgcaccagct

SEQ ID NO: 53584 - DNA, 248 bp, Homo sapiens
  misc_feature (8)..(8): n is a, c, g, or t
  misc_feature (12)..(13): n is a, c, g, or t
  misc_feature (69)..(69): n is a, c, g, or t
  misc_feature (73)..(73): n is a, c, g, or t
  misc_feature (101)..(101): n is a, c, g, or t
ttaaaccntaannacatatgggaaaaaaatctgtagtctcatatctgaaatatttttaaatcaagattntcanatatcacaatataggaaataatattttnctaaggaacttatgttcttgttacatagatattactgtaataaatgtcatgaattttcttcatgatgtgacccaagtccacctttttattgctaaatcaagtaaaatttaaaaagaaaactgtcacctagattttcaaaacagcctc

SEQ ID NO: 53585 - DNA, 443 bp, Homo sapiens
atgtctcagtcacagcaccgctgacagcgaagaacaccaagagccagcgtggggccgaacacaaggtcagtcctccatcggtggcgtgatgacaaccaccgcctcagccaaggctgttattaccactcccatccaaactaagcgtgtttcccccaggccggtagaaatggcaggtgctgatacctttcagctctcagtcgggtcctgggctgaatgctttacttgcattatctcatttcgaccccccaccccggcacggggagtcattagcatcaccattttgcagatgaagagactgaggcttggagaggttagggaacatatccagggtcacccagttaacaatgttcatttaattcattttacactcatttcacagcttgtgtctgctggccactaggcacaagacggtgcataagacacacttagtccctgtgaagctg

SEQ ID NO: 53586 - DNA, 753 bp, Homo sapiens
cagctgtgggggcaggatcaggcatgtactccttggtggccccagcgctggctctgcacccgatgcatagtaggtgcctagcaagtgcatctggaggctcgttcgatggccctgcagggctctctgggtctggcgggagacattgggagtcaaggtcagtgcctcacaccatctcctcggcagcatgtgtctttctaccgtttgccgtggcccttcccatggccagtgactaacagctttcacgcacactctggggtgggctgaaaggccccggaagcagccctctttccctggaagatgggagatgaatgacagcaccctagcttcctgccttctctggggacgccctgagcacggtccgttctgtctcccaggtggccccagcaggactgagagcagcagcagtccacagccatgacaactcaaccacctgccctgtgtcagctgctgtcccctcctttattcctccccactccccttctgcagcatcctggagtcacttcccgaataaacccctcacatcacctccttgtctcagggtttgcttctggggggacccagcctgagacgggatgaacattcattcgacaaaatattgcggctgggcgcagtggctcacgcctgtaatcctagcactttgagaggccgaggcgggcggatcacttaagttcaggggttcgagaccagcctggtcaacatggtgaaaccctgtttctactaaaaatacaaaaattagctgggcgtggtggtgca

SEQ ID NO: 53587 - DNA, 284 bp, Homo sapiens
aggttccttatcccagttaagtctcaatattttcacacgtaaattttaagtataatatgagttattgggaaacatgttaccttattctgataagtttaaattacgggcctattaagcactattttgttttaagagcaataaaaataatagaaaaaaaaaagaacataatccctaatcacaacaggaaagtattttaatatttagatatgaagcatgatatatacatttatatacagcaatgattccagaaagacctagtgtgtaatactcttaccatttttctg

SEQ ID NO: 53588 - DNA, 425 bp, Homo sapiens
ctgtcgcccagactcccaggctacggtgcaatggcacaatctcggttcactgcaacctccgcctctcaggttcaagtgattctcctgcctcagccccccgagtagctgggattacaggcgcttgccaccatgcctggctattttttgtatttttagtagagatggggtttcgccatgttggccaggctggtcttgaactcctgatctcatgatccacctgccccggcctcccaaagtgctgggattacaggcgtgagtcaccacgcctggccctgagtcaccatgcctggccctgagtgtccttttaatacactggtttgggggtttttttttagagtttgggtcttgctctgtcacccaggatggatggagtgcagtgatgcaatcatggctcactgaagcctcgaactcttaggctcaagcgt

SEQ ID NO: 53589 - DNA, 816 bp, Homo sapiens
atgcactttctttgccaaaggcaaacgcagaacgtttcagagccatgaggatgcttctgcatttgagtttgctagctcttggagctgcctacgtgtatgccatccccacagaaattcccacaagtgcattggtgaaagagaccttggcactgctttctactcatcgaactctgctgatagccaatgagactctgaggattcctgttcctgtacataaaaatcaccaactgtgcactgaagaaatctttcagggaataggcacactggagagtcaaactgtgcaagggggtactgtggaaagactattcaaaaacttgtccttaataaagaaatacattgacggccaaaaaaaaaagtgtggagaagaaagacggagagtaaaccaattcctagactacctgcaagagtttcttggtgtaatgaacaccgagtggataatagaaagttgagactaaactggtttgttgcagccaaagattttggaggagaaggacattttactgcagtgagaatgagggccaagaaagagtcaggccttaattttcaatataatttaacttcagagggaaagtaaatatttcaggcatactgacactttgccagaaagcataaaattcttaaaatatatttcagatatcagaatcattgaagtattttcctccaggcaaaattgatatacttttttcttatttaacttaacattctgtaaaatgtctgttaacttaatagtatttatgaaatggttaagaatttggtaaattagtatttatttaatgttatgttgtgttctaataaaacaaaaatagacaactgttc

SEQ ID NO: 53590 - DNA, 1600 bp, Homo sapiens
gcagaggcgcggcaggggggcgggagccgcggaacccctaccccaggtctgcgcaggtgaggagggggcggggcaggaccgacctcccttgccatgataaccaccttcgcagccggctcccagaccgttggcaccgattgcctagaaaatagggggtctcaggagctccgttttagcgtttatatatcccaattccaattaagccacttccagtattttttggccattgtcagtgtacaagtcttcctcctcttcgagaccatgttattgcaatagcagcaaacgtgttgggaggcctcacaattcatcatggtttttctggcctctggcagatagctccttcctagcgagctgtggagctcaaagtcttttggacacttgattctattcaatccagtatcagaccaggtcattgctaggaagaactctgggtacaataatgaatacaatgtatgtgatgatggctcagatcttaagatctcacctgataaaggctacagtgattcctaatcgagtgaaaatgcttccatattttggtatcattagaaatagaatgatgtcaacccataaatccaaaaagaagatcagagaatattatagactgctgaacgtggaggaaggatgctctgcagatgaagtcagggaatcttttcataagcttgccaagcaatatcatcctgacagtggctctaatactgctgattctgcaacatttataaggattgaaaaagcttatagaaaggtgctctcccatgtgatagaacaaacaaatgccagtcagagtaaaggtgaagaagaagaagatgtagaaaaattcaaatataaaacaccccaacaccgacattatttaagttttgaaggtattggttttgggactccaactcaacgagagaagcattataggcaatttagggcagaccgtgctgctgaacaagtgatggaatatcaaaagcagaaactacaaagccagtattttcctgatagtgtaattgttaaaaatataagacagagcaaacagcaaaagataacgcaagctatagaacgtttagtggaggacctcattcaagaatccatggcaaaaggagactttgacaatctcagtgggaaaggaaaacctctgaaaaagttttctgactgttcttacattgatcccatgactcacaacctgaaccgaatactgatcgataatggataccaaccagaatggatccttaagcaaaaggaaataagcgatactattgagcaactcagagaggcaattttagtgtctaggaaaaaacttgggaatccaatgacaccaactgaaaagaaacagtggaaccatgtttgtgagcagtttcaagaaaacatcagaaaattaaacaagcgaattaatgattttaattgttcccatcctgaccaggcaaaaagtccattttgatgctcagaaagaaattgtcagagcccagaaaatatacgagacccttataaaaacaaaagaagtcacagatagaaacccaaataaccttgatcaaggagaaggagagaaaacacctgaaatcaagaaaggttttttaaactggatgaatctgtggaaatttattaaaatacgatcattttg

SEQ ID NO: 53591 - DNA, 2253 bp, Homo sapiens
tacttgaattaataaaagggcaggttttaagcctcatgtatctgcgcaggtgactccttctgtgaccccgaataaacctgttccggtcccgttccggggaaacagccttgccttcccctgcccccagaaagttaccctcgccctccgagccacaactccccacgccgccaactcggtctttacatcattttcgacgccccctaagtccctcccgagaggcgcaggcgcacatcgccccttctagcgaactacatctcccacaatcccaatcggccggaccacctccgctcggggcggggacggaggtggagctggtggtccccggtcgggacgaaggctcccgaggtgccctgcctgggtcctccggggtaaagttcgtttggcggaagattgtccgttttcctggtaaggtcacctgtcccaatcaggtcattgctaggaagaactctgggtacaataatgaatacaatgtatgtgatgatggctcagatcttaagatctcacctgataaaggctacagtgattcctaatcgagtgaaaatgcttccatattttggtatcattagaaatagaatgatgtcaacccataaatccaaaaagaagatcagagaatattatagactgctgaacgtggaggaaggatgctctgcagatgaagtcagggaatcttttcataagcttgccaagcaatatcatcctgacagtggctctaatactgctgattctgcaacatttataaggattgaaaaagcttatagaaaggtgctctcccatgtgatagaacaaacaaatgccagtcagagtaaaggtgaagaagaagaagatgtagaaaaattcaaatataaaacaccccaacaccgacattatttaagttttgaaggtattggttttgggactccaactcaacgagagaagcattataggcaatttagggcagaccgtgctgctgaacaagtgatggaatatcaaaagcagaaactacaaagccagtattttcctgatagtgtaattgttaaaaatataagacagagcaaacagcaaaagataacgcaagctatagaacgtttagtggaggacctcattcaagaatccatggcaaaaggagactttgacaatctcagtgggaaaggaaaacctctgaaaaagttttctgactgttcttacattgatcccatgactcacaacctgaaccgaatactgatcgataatggataccaaccagaatggatccttaagcaaaaggaaataagcgatactattgagcaactcagagaggcaattttagtgtctaggaaaaaacttgggaatccaatgacaccaactgaaaagaaacagtggaaccatgtttgtgagcagtttcaagaaaacatcagaaaattaaacaagcgaattaatgattttaattgttcccatcctgaccaggcaaaaagtccattttgatgctcagaaagaaattgtcagagcccagaaaatatacgagacccttataaaaacaaaagaagtcacagatagaaacccaaataaccttgatcaaggagaaggagagaaaacacctgaaatcaagaaaggttttttaaactggatgaatctgtggaaatttattaaaatacgatcattttgatgtttactatcataaatcattcttagttccactgacactttacatggaaaatgagatttattgctataatacaagaatttaagaattgtgccattgtacttatcacaaaactaatcacatagccaatgatgtgtgagtgagaaacctatcaggtttgtcctgaggatatagcaagaaaagaaaataactgaaactcctttttttttgagacggcgtctcgctctgtcacccaggctggagtgcaatggcgcgatctgggctcactgcaacctctgcttcccaggttcaagtgattatcctgcctcagactcccgaatagctgggattataggcacacaccaccatacccggctatttttgtattttgttttctttttttttgagacagagtctcactccagcctgggtgacagagcaagactccgtcttaaaaaaaaaaaaaaagtgggaattagacgtaagaggcttaactgcattacagcaacatagatgaacaaaaccattttccatattggtcaatgagaaggtaaggttaccagaaaatgtcagtaaatttttaatttcagcacagtgcactttatgtttgtaaatgttgtctatgttaataaagttactataataattaattcaat

SEQ ID NO: 53592 - DNA, 2153 bp, Homo sapiens
tacttgaattaataaaagggcaggttttaagcctcatgtatctgcgcaggtgactccttctgtgaccccgaataaacctgttccggtcccgttccggggaaacagccttgccttcccctgcccccagaaagttaccctcgccctccgagccacaactccccacgccgccaactcggtctttacatcattttcgacgccccctaagtccctcccgagaggcgcaggcgcacatcgccccttctagcgaactacatctcccacaatcccaatcggccggaccacctccgctcggggcggggacggaggtggagctggtggtccccggtcgggacgaaggctcccgaggtgccctgcctgggtcctccggggtaaagttcgtttggcggaagattgtccgttttcctggtaaggtcacctgtcccaatcaggtcattgctaggaagaactctgggtacaataatgaatacaatgtatgtgatgatggctcagatcttaagatctcacctgataaaggctacagtgattcctaatcgagtgaaaatgcttccatattttggtatcattagaaatagaatgatgtcaacccataaatccaaaaagaagatcagagaatattatagactgctgaacgtggaggaaggatgctctgcagatgaagtcagggaatcttttcataagcttgccaagcaatatcatcctgacagtggctctaatactgctgattctgcaacatttataaggattgaaaaagcttatagaaaggtgctctcccatgtgatagaacaaacaaatgccagtcagagtaaaggtgaagaagaagaagatgtagaaaaattcaaatataaaacaccccaacaccgacattatttaagttttgaaggtattggttttgggactccaactcaacgagagaagcattataggcaatttagggcagaccgtgctgctgaacaagtgatggaatatcaaaagcagaaactacaaagccagtattttcctgatagtgtaattgttaaaaatataagacagagcaaacagcaaaagataacgcaagctatagaacgtttagtggaggacctcattcaagaatccatggcaaaaggagactttgacaatctcagtgggaaaggaaaacctctgaaaaagttttctgactgttcttacattgatcccatgactcacaacctgaaccgaatactgatcgataatggataccaaccagaatggatccttaagcaaaaggaaataagcgatactattgagcaactcagagaggcaattttagtgtctaggaaaaaacttgggaatccaatgacaccaactgaaaagaaacagtggaaccatgtttgtgagcagtttcaagaaaacatcagaaaattaaacaagcgaattaatgattttaattgttcccatcctgaccaggcaaaaagtccattttgatgctcagaaagaaattgtcagagcccagaaaatatacgagacccttataaaaacaaaagaagtcacagatagaaacccaaataaccttgatcaaggagaaggagagaaaacacctgaaatcaagaaaggttttttaaactggatgaatctgtggaaatttattaaaatacgatcattttgatgtttactatcataaatcattcttagttccactgacactttacatggaaaatgagatttattgctataatacaagaatttaagaattgtgccattgtacttatcacaaaactaatcacatagccaatgatgtgtgagtgagaaacctatcaggtttgtcctgaggatatagcaagaaaagaaaataactgaaactcctttttttttgagacggcgtctcgctctgtcacccaggctggagtgcaatggcgcgatctgggctcactgcaacctctgcttcccaggttcaagtgattatccagcctgggtgacagagcaagactccgtcttaaaaaaaaaaaaaaagtgggaattagacgtaagaggcttaactgcattacagcaacatagatgaacaaaaccattttccatattggtcaatgagaaggtaaggttaccagaaaatgtcagtaaatttttaatttcagcacagtgcactttatgtttgtaaatgttgtctatgttaataaagttactataataattaattcaat

SEQ ID NO: 53593 - DNA, 167 bp, Homo sapiens
gggcagcgatatggggacactgagggaggaacagatttggggagggattgaattaagagttctcttatagctatgtgaagtttgagatgcctattagatatcaaagcagacatggctagtaaacagctagatagttccaggaagagttagagttggagatagaaatt

SEQ ID NO: 53594 - DNA, 403 bp, Homo sapiens
gtggctcatgcctgtaatcccagcactttgggaggccgaggcgggcagatcacaaggtcaggagatggagaccatcctggctaacacggtgaaaccccgtctctactaaaaacacaaaaaattagctgggcgcggtggcgggcgcctgtagtccaagctactcaggaggctgaggcaggagaatggcgtgaacccaggaggcggagcttgcagtgagccgagatagcactactgcactccagcctgggagacaggcgagactctgtctcaaaaaaacaaaaacaaaaacaaaaaaaaaaccatatatatatatatatatataaaatcagttgtaacatacatgaactaattgaatttttgaacaatgacttggtatttggtgatattagggcctaatcatttt

SEQ ID NO: 53595 - DNA, 713 bp, Homo sapiens
ttttataatttattcctttatgatgaatgaatatttacaaatgatcataatgtgactggctgtgttgtagaatatgaggatacaattctcaaggaggcagcctgctgtcagagagcttacagtcaacttctgggagaaagaaaacacatttaaaacaaaaaaaattcatatggatgtgatggagagaatgtatgcgagcgagggcagggtatgaggcagttactttgggtaaatataatttatatcaaggtctaaaagatgagaagagaaagagccctagacttgaacatgtgggaaaacatttggattttgccacagcttagcctgagcaagtcatttatccttttttggtttgtgtttctcatctgtaaaatggagcttctaatagcagctccccactacgactagtttacaaggttgttgctgagcaaacggcaggatgccatcaagtacttcctgtaaggagtgtgccgaggtggctgtggttgccctatgtgcatcacctcaaccccatcacattaaattttctcctgcctcttgcatcttttctctgtaatctacatctgaaggcaaagctggaggagagacagaggtcgaactacctgttgctatgctgtaagacttaaaatgttgatattggttttcgaaatacaaatatcaattctccctcttctacacacactgactcctcacccttatgcatgagagtttcg

SEQ ID NO: 53596 - DNA, 352 bp, Homo sapiens
aaaactcctgtctgaaaaacaaaaatgaagtattttaataacatgttctctgttcctatcacaatgattaagaaacacagttttaaaaaattgtttaaaggcatctgtcaaagaatatttcggtaaacatctggtcagtcagcgacccagggcattcagaactaggggtcagtgtcacaactactggcagcatagttgaattttgcagacttatgttagtcattgtaattttaaatatcacatattaggttcacctggattcccaactctgctggtcctaatttgactgccaacagtcatttatcaattgtaagagtggaggaagtctaccaacttagatttctagctgaga

SEQ ID NO: 53597 - DNA, 627 bp, Homo sapiens
gtatcttgaggtagggagatgggtgggtgagaacctcaggtttaatttggaaatagaagagagggatctgccctaacgctttaaactaggtgcagattgggaatttatcctgtatgtatgtcataaaggtataaaggtccaactctgccatttgtttaaaagaaaaacaaacttgatagaatcttgacagatttttaacaattttaaattatttaaaaagttgttataaatcagactgttttttaaaatagcagtaaacatttggggcttttttgttcagatatgtactcatgttaaaatgagtatccatattggcagctagtaatagaggaaaaagtgtatactctcctaatacattaaatgctggcactatatatgaaactgaaagtaaataatattatttaaatcagtgtgctatacttttaatgtggatatggaaaaaaggctcattttaaaaactgcaagaataaatatattttaaatgctgacatgttaggtttttattttttgttttattttgaaaatatgtatacactaaattaggtttttgattaatggttaagaatagtgaataaacaaacatggatttaaaaattaaattgaattaggaattataagactttgata

SEQ ID NO: 53598 - DNA, 271 bp, Homo sapiens
ctgccatggccctgagggcacacttagtactcctgattccaagtgaagaatgcagtgtgcctgcctgccctctggactgagagctcctcaaagacagagataattttctcatttctttattgcactagctaactagtgcaatgcctggtacacctagtgaccgctctgtgtatgtttatttaacaatagtttttatttattgagggctccttatgtgcttggcactttatatttagaaacttttaattctaactctaacctattacatagg

SEQ ID NO: 53599 - DNA, 4253 bp, Homo sapiens
agcggacttccggggcggaggaggctgagtggtgcagtgagggacaaacaaaaggaggcgccggagcagcgctgcggccggcggcgggacggagcggccggggcctggggctgcctgccgggcggccgggcgcggcgagcccaggttgaaccatgattccggtgacagagctccgctactttgcggacacgcagccagcataccggatcctgaagccgtggtgggatgtgttcacagactacatctctatcgtcatgctgatgattgccgtcttcggggggacgctgcaggtcacccaagacaagatgatctgcctgccttgtaagtgggtcaccaaggactcctgcaatgattcgttccggggctgggcagcccctggcccggagcccacctaccccaactccaccattctgccgacccctgacacgggccccacaggcatcaagtatgacctggaccggcaccagtacaactacgtggacgctgtgtgctatgagaaccgactgcactggtttgccaagtacttcccctacctggtgcttctgcacacgctcatcttcctggcctgcagcaacttctggttcaaattcccgcgcaccagctcgaagctggagcactttgtgtctatcctgctgaagtgcttcgactcgccctggaccacgagggccctgtcggagacagtggtggaggagagcgaccccaagccggccttcagcaagatgaatgggtccatggacaaaaagtcatcgaccgtcagtgaggacgtggaggccaccgtgcccatgctgcagcggaccaagtcacggatcgagcagggtatcgtggaccgctcagagacgggcgtgctggacaagaaggagggggagcaagccaaggcgctgtttgagaaggtgaagaagttccggacccatgtggaggagggggacattgtgtaccgcctctacatgcggcagaccatcatcaaggtgatcaagttcatcctcatcatctgctacaccgtctactacgtgcacaacatcaagttcgacgtggactgcaccgtggacattgagagcctgacgggctaccgcacctaccgctgtgcccaccccctggccacactcttcaagatcctggcgtccttctacatcagcctagtcatcttctacggcctcatctgcatgtatacactgtggtggatgctacggcgctccctcaagaagtactcgtttgagtcgatccgtgaggagagcagctacagcgacatccccgacgtcaagaacgacttcgccttcatgctgcacctcattgaccaatacgacccgctctactccaagcgcttcgccgtcttcctgtcggaggtgagtgagaacaagctgcggcagctgaacctcaacaacgagtggacgctggacaagctccggcagcggctcaccaagaacgcgcaggacaagctggagctgcacctgttcatgctcagtggcatccctgacactgtgtttgacctggtggagctggaggtcctcaagctggagctgatccccgacgtgaccatcccgcccagcattgcccagctcacgggcctcaaggagctgtggctctaccacacagcggccaagattgaagcgcccgcgctggccttcctgcgcgagaacctgcgggcgctgcacatcaagttcaccgacatcaaggagatcccgctgtggatctatagcctgaagacactggaggagctgcacctgacgggcaacctgagcgcggagaacaaccgctacatcgtcatcgacgggctgcgggagctcaaacgcctcaaggtgctgcggctcaagagcaacctaagcaagctgccacaggtggtcacagatgtgggcgtgcacctgcagaagctgtccatcaacaatgagggcaccaagctcatcgtcctcaacagcctcaagaagatggcgaacctgactgagctggagctgatccgctgtgacctggagcgcatcccccactccatcttcagcctccacaacctgcaggagattgacctcaaggacaacaacctcaagaccatcgaggagatcatcagcttccagcacctgcaccgcctcacctgccttaagctgtggtacaaccacatcgcctacatccccatccagatcggcaacctcaccaacctggagcgcctctacctgaaccgcaacaagatcgagaagatccccacccagctcttctactgccgcaagctgcgctacctggacctcagccacaacaacctgaccttcctccctgccgacatcggcctcctgcagaacctccagaacctagccatcacggccaaccggatcgagacgctccctccggagctcttccagtgccggaagctgcgggccctgcacctgggcaacaacgtgctgcagtcactgccctccagggtgggcgagctgaccaacctgacgcagatcgagctgcggggcaaccggctggagtgcctgcctgtggagctgggcgagtgcccactgctcaagcgcagcggcttggtggtggaggaggacctgttcaacacactgccacccgaggtgaaggagcggctgtggagggctgacaaggagcaggcctgagcgaggccggcccagcacagcaagcagcaggaccgctgcccagtcctcaggcccggaggggcaggcctagcttctcccagaactcccggacagccaggacagcctcgtggctgggcaggagcctggggccgcttgtgagtcaggccagagcgagaggacagtatctgtggggctggccccttttctccctctgagactcacgtcccccagggcaagtgcttgtggaggagagcaagtctcaagagcgcagtatttggataatcagggtctcctccctggaggccagctctgccccaggggctgagctgccaccagaggtcctgggaccctcactttagttcttggtatttatttttctccatctcccacctccttcatccagataacttatacattcccaagaaagttcagcccagatggaaggtgttcagggaaaggtgggctgccttttccccttgtccttatttagcgatgccgccgggcatttaacacccacctggacttcagcagagtggtccggggcgaaccagccatgggacggtcacccagcagtgccgggctgggctctgcggtgcggtccacgggagagcaggcctccagctggaaaggccaggcctggagcttgcctcttcagtatttgtggcagttttagttttttgtttttttttttttaatcaaaaaacaatttttttaaaaaaaaagctttgaaaatggatggtttgggtattaaaaagaaaaaaaaaacttaaaaaaaaaaagacactaacggccagtgagttggagtctcagggcagggtggcagtttcccttgagcaaagcagccagacgttgaactgtgtttcctttccctgggcgcagggtgcagggtgtcttccggatctggtgtgaccttggtccaggagttctatttgttcctggggagggaggtttttttgtttgttttttgggtttttttggtgtcttgttttctttctcctccatgtgtcttggcaggcactcatttctgtggctgtcggccagagggaatgttctggagctgccaaggagggaggagactcgggttggctaatccccggatgaacggtgctccattcgcacctcccctcctcgtgcctgccctgcctctccacgcacagtgttaaggagccaagaggagccacttcgcccagactttgtttccccaccgcctgcggcatgggtgtgtccagtgccaccgctggcctccgctgcttccatcagccttgtcgccacctggtccttcatgaagagcagacacttagaggctggtcgggaatggggaggtcgcccctgggagggcaggcgttggttccaagccggttcccgtccctggcgcctggagtgcacacagcccagtcggcacctggtggctggaagccaccctgctttagatcactcgggtccccaccttagaagggtccccgccttagatcaatcacgtggacactaaggcacgttttagagtctcttgtcttaatgattatgtccatccgtctgtccgtccatttgtgttttctgcgtcgtgtcattggatataatcctcagaaataatgcacactagcctctgacaaccatgaagcaaaaatccgttacatgtgggtctgaacttgtagactcggtcacagtatcaaataaaatctataacagaaa

SEQ ID NO: 53600 - DNA, 1607 bp, Homo sapiens
  misc_feature (2)..(2): n is a, c, g, or t
  misc_feature (5)..(8): n is a, c, g, or t
gncannnngcctgcctcagcctcgcgagcagctgggactacaggtgcccgccaccacgcccggctaattttttgtatttttagtagagacggggtttcaccgtgttagccaggatggtctcgatttcctgacctcgtgatccgcgcgcctctgcctccaaagtgctgggattacaggcccgagccgccgcacccggcctgcaggtgttgttctgaccccagctccactgtgccagcccgacttgagatgccaagtatcttgggcctgaggattgaggcctagagagaggcaggcgttcctcagagtcacagggaatggcggcgcctggactgggactcagcccagctgcttggcctgaccctctcacagcataatttcccggcacctggaggccgcgcttagaagccgcccagtgccctgagcgtctccatggcctgcctgagcccctcgcagctccagaagttccaacaggatggattcctggtgctggaaggattcttgtctgcggaagagtgtgtggccatgcaacaaaggattggcgagatagtggctgaaatggatgttcctctccactgccgcacagaattctccacccaggaagaggagcagcttcgagcccagggcagcacagactatttcttgagcagtggtgacaagattcgattcttctttgagaaaggcgtttttgatgagaaaggaaatttcctggtccctccggagaaatccatcaacaaaattggccacgctctgcacgcccacgaccccgtcttcaagagcatcacacactccttcaaggtgcagaccttggccagaagtctgggcctccagatgcccgtggtggtgcagagcatgtacatctttaagtctcccctcatcaggacgcctccttcctgtacacggagcccctgggccgggtgctgggcgtgtggatcgcagtggaggatgccacgctggagaacggctgtctctggttcatccctggctcccacaccagtggtgtgtcaagaaggatggtccgggcccctgttggctcagcgcctggtaccagcttccttgggtcagagccagcccgggataacagcctctttgtgcccaccccagtgcagagaggggccctggtcctcatccatggagaagtggtacacaagagcaagcagaacctctctgaccgctcgcgccaggcctacactttccacctcatggaggcctctggcaccacctggagcccggagaactggctccagccaacagctgaactgccctttccccaactgtacacctaaaggctctcgcagggcaggagccctcgcccctcccgggtgaagctgtgggctgtaaacaccagtgccttgctcagcctcctggttgcaacagggaggtcttgtctcccctcctgggctttcctcctgccctgtgggcagcagcctaggctgggtcaggggcttccctaagatcttcacctctctgcctccctactgccccaacatagccttgaggaggcttctcagccaccaaagggttctggccccttctcactctcctctcctctcagatggaactctggttattatggtgttagttatcgaataaaaacgacttcagaatgc

SEQ ID NO: 53601 - DNA, 4360 bp, Homo sapiens
agcggacttccggggcggaggaggctgagtggtgcagtgagggacaaacaaaaggaggcgccggagcagcgctgcggccggcggcgggacggagcggccggggcctggggctgcctgccgggcggccgggcgcggcgagcccagggaggcagcgtccatggagcaaaaggaatgccaggatcctgcacaggcagacgcgggccagcctcagcaccgacagccgacgcgcagatagcagagccatccttggggttgaaccatgattccggtgacagagctccgctactttgcggacacgcagccagcataccggatcctgaagccgtggtgggatgtgttcacagactacatctctatcgtcatgctgatgattgccgtcttcggggggacgctgcaggtcacccaagacaagatgatctgcctgccttgtaagtgggtcaccaaggactcctgcaatgattcgttccggggctgggcagcccctggcccggagcccacctaccccaactccaccattctgccgacccctgacacgggccccacaggcatcaagtatgacctggaccggcaccagtacaactacgtggacgctgtgtgctatgagaaccgactgcactggtttgccaagtacttcccctacctggtgcttctgcacacgctcatcttcctggcctgcagcaacttctggttcaaattcccgcgcaccagctcgaagctggagcactttgtgtctatcctgctgaagtgcttcgactcgccctggaccacgagggccctgtcggagacagtggtggaggagagcgaccccaagccggccttcagcaagatgaatgggtccatggacaaaaagtcatcgaccgtcagtgaggacgtggaggccaccgtgcccatgctgcagcggaccaagtcacggatcgagcagggtatcgtggaccgctcagagacgggcgtgctggacaagaaggagggggagcaagccaaggcgctgtttgagaaggtgaagaagttccggacccatgtggaggagggggacattgtgtaccgcctctacatgcggcagaccatcatcaaggtgatcaagttcatcctcatcatctgctacaccgtctactacgtgcacaacatcaagttcgacgtggactgcaccgtggacattgagagcctgacgggctaccgcacctaccgctgtgcccaccccctggccacactcttcaagatcctggcgtccttctacatcagcctagtcatcttctacggcctcatctgcatgtatacactgtggtggatgctacggcgctccctcaagaagtactcgtttgagtcgatccgtgaggagagcagctacagcgacatccccgacgtcaagaacgacttcgccttcatgctgcacctcattgaccaatacgacccgctctactccaagcgcttcgccgtcttcctgtcggaggtgagtgagaacaagctgcggcagctgaacctcaacaacgagtggacgctggacaagctccggcagcggctcaccaagaacgcgcaggacaagctggagctgcacctgttcatgctcagtggcatccctgacactgtgtttgacctggtggagctggaggtcctcaagctggagctgatccccgacgtgaccatcccgcccagcattgcccagctcacgggcctcaaggagctgtggctctaccacacagcggccaagattgaagcgcccgcgctggccttcctgcgcgagaacctgcgggcgctgcacatcaagttcaccgacatcaaggagatcccgctgtggatctatagcctgaagacactggaggagctgcacctgacgggcaacctgagcgcggagaacaaccgctacatcgtcatcgacgggctgcgggagctcaaacgcctcaaggtgctgcggctcaagagcaacctaagcaagctgccacaggtggtcacagatgtgggcgtgcacctgcagaagctgtccatcaacaatgagggcaccaagctcatcgtcctcaacagcctcaagaagatggcgaacctgactgagctggagctgatccgctgtgacctggagcgcatcccccactccatcttcagcctccacaacctgcaggagattgacctcaaggacaacaacctcaagaccatcgaggagatcatcagcttccagcacctgcaccgcctcacctgccttaagctgtggtacaaccacatcgcctacatccccatccagatcggcaacctcaccaacctggagcgcctctacctgaaccgcaacaagatcgagaagatccccacccagctcttctactgccgcaagctgcgctacctggacctcagccacaacaacctgaccttcctccctgccgacatcggcctcctgcagaacctccagaacctagccatcacggccaaccggatcgagacgctccctccggagctcttccagtgccggaagctgcgggccctgcacctgggcaacaacgtgctgcagtcactgccctccagggtgggcgagctgaccaacctgacgcagatcgagctgcggggcaaccggctggagtgcctgcctgtggagctgggcgagtgcccactgctcaagcgcagcggcttggtggtggaggaggacctgttcaacacactgccacccgaggtgaaggagcggctgtggagggctgacaaggagcaggcctgagcgaggccggcccagcacagcaagcagcaggaccgctgcccagtcctcaggcccggaggggcaggcctagcttctcccagaactcccggacagccaggacagcctcgtggctgggcaggagcctggggccgcttgtgagtcaggccagagcgagaggacagtatctgtggggctggccccttttctccctctgagactcacgtcccccagggcaagtgcttgtggaggagagcaagtctcaagagcgcagtatttggataatcagggtctcctccctggaggccagctctgccccaggggctgagctgccaccagaggtcctgggaccctcactttagttcttggtatttatttttctccatctcccacctccttcatccagataacttatacattcccaagaaagttcagcccagatggaaggtgttcagggaaaggtgggctgccttttccccttgtccttatttagcgatgccgccgggcatttaacacccacctggacttcagcagagtggtccggggcgaaccagccatgggacggtcacccagcagtgccgggctgggctctgcggtgcggtccacgggagagcaggcctccagctggaaaggccaggcctggagcttgcctcttcagtatttgtggcagttttagttttttgtttttttttttttaatcaaaaaacaatttttttaaaaaaaaagctttgaaaatggatggtttgggtattaaaaagaaaaaaaaaacttaaaaaaaaaaagacactaacggccagtgagttggagtctcagggcagggtggcagtttcccttgagcaaagcagccagacgttgaactgtgtttcctttccctgggcgcagggtgcagggtgtcttccggatctggtgtgaccttggtccaggagttctatttgttcctggggagggaggtttttttgtttgttttttgggtttttttggtgtcttgttttctttctcctccatgtgtcttggcaggcactcatttctgtggctgtcggccagagggaatgttctggagctgccaaggagggaggagactcgggttggctaatccccggatgaacggtgctccattcgcacctcccctcctcgtgcctgccctgcctctccacgcacagtgttaaggagccaagaggagccacttcgcccagactttgtttccccaccgcctgcggcatgggtgtgtccagtgccaccgctggcctccgctgcttccatcagccttgtcgccacctggtccttcatgaagagcagacacttagaggctggtcgggaatggggaggtcgcccctgggagggcaggcgttggttccaagccggttcccgtccctggcgcctggagtgcacacagcccagtcggcacctggtggctggaagccaccctgctttagatcactcgggtccccaccttagaagggtccccgccttagatcaatcacgtggacactaaggcacgttttagagtctcttgtcttaatgattatgtccatccgtctgtccgtccatttgtgttttctgcgtcgtgtcattggatataatcctcagaaataatgcacactagcctctgacaaccatgaagcaaaaatccgttacatgtgggtctgaacttgtagactcggtcacagtatcaaataaaatctataacagaaa

SEQ ID NO: 53602 - DNA, 4614 bp, Homo sapiens
tagatcagtccaggtgtctttgtctacccccgccctcctccttcctgggtaactcctgctgatcctttggctctctctggtggctgggccactctcccagctcctggctccccgaaacccgtgtcgtagtgatcacagctttccctaccctgccactcccatgcacagttctgcacagtgtctggcgcatatggagtagatgctcaccagaggctggttgactgtcggagatgatgggtggatttggtgtttaagttggagtctgggcactggctggtctctgcctgacccagccaccccactgtggctcatctcttgccacttcccctctctggctctggatctcgccatgccgagcccgcaagccttctccagatgccatgtactctctcctccagggaggcagcgtccatggagcaaaaggaatgccaggatcctgcacaggcagacgcgggccagcctcagcaccgacagccgacgcgcagatagcagagccatccttggggttgaaccatgattccggtgacagagctccgctactttgcggacacgcagccagcataccggatcctgaagccgtggtgggatgtgttcacagactacatctctatcgtcatgctgatgattgccgtcttcggggggacgctgcaggtcacccaagacaagatgatctgcctgccttgtaagtgggtcaccaaggactcctgcaatgattcgttccggggctgggcagcccctggcccggagcccacctaccccaactccaccattctgccgacccctgacacgggccccacaggcatcaagtatgacctggaccggcaccagtacaactacgtggacgctgtgtgctatgagaaccgactgcactggtttgccaagtacttcccctacctggtgcttctgcacacgctcatcttcctggcctgcagcaacttctggttcaaattcccgcgcaccagctcgaagctggagcactttgtgtctatcctgctgaagtgcttcgactcgccctggaccacgagggccctgtcggagacagtggtggaggagagcgaccccaagccggccttcagcaagatgaatgggtccatggacaaaaagtcatcgaccgtcagtgaggacgtggaggccaccgtgcccatgctgcagcggaccaagtcacggatcgagcagggtatcgtggaccgctcagagacgggcgtgctggacaagaaggagggggagcaagccaaggcgctgtttgagaaggtgaagaagttccggacccatgtggaggagggggacattgtgtaccgcctctacatgcggcagaccatcatcaaggtgatcaagttcatcctcatcatctgctacaccgtctactacgtgcacaacatcaagttcgacgtggactgcaccgtggacattgagagcctgacgggctaccgcacctaccgctgtgcccaccccctggccacactcttcaagatcctggcgtccttctacatcagcctagtcatcttctacggcctcatctgcatgtatacactgtggtggatgctacggcgctccctcaagaagtactcgtttgagtcgatccgtgaggagagcagctacagcgacatccccgacgtcaagaacgacttcgccttcatgctgcacctcattgaccaatacgacccgctctactccaagcgcttcgccgtcttcctgtcggaggtgagtgagaacaagctgcggcagctgaacctcaacaacgagtggacgctggacaagctccggcagcggctcaccaagaacgcgcaggacaagctggagctgcacctgttcatgctcagtggcatccctgacactgtgtttgacctggtggagctggaggtcctcaagctggagctgatccccgacgtgaccatcccgcccagcattgcccagctcacgggcctcaaggagctgtggctctaccacacagcggccaagattgaagcgcccgcgctggccttcctgcgcgagaacctgcgggcgctgcacatcaagttcaccgacatcaaggagatcccgctgtggatctatagcctgaagacactggaggagctgcacctgacgggcaacctgagcgcggagaacaaccgctacatcgtcatcgacgggctgcgggagctcaaacgcctcaaggtgctgcggctcaagagcaacctaagcaagctgccacaggtggtcacagatgtgggcgtgcacctgcagaagctgtccatcaacaatgagggcaccaagctcatcgtcctcaacagcctcaagaagatggcgaacctgactgagctggagctgatccgctgtgacctggagcgcatcccccactccatcttcagcctccacaacctgcaggagattgacctcaaggacaacaacctcaagaccatcgaggagatcatcagcttccagcacctgcaccgcctcacctgccttaagctgtggtacaaccacatcgcctacatccccatccagatcggcaacctcaccaacctggagcgcctctacctgaaccgcaacaagatcgagaagatccccacccagctcttctactgccgcaagctgcgctacctggacctcagccacaacaacctgaccttcctccctgccgacatcggcctcctgcagaacctccagaacctagccatcacggccaaccggatcgagacgctccctccggagctcttccagtgccggaagctgcgggccctgcacctgggcaacaacgtgctgcagtcactgccctccagggtgggcgagctgaccaacctgacgcagatcgagctgcggggcaaccggctggagtgcctgcctgtggagctgggcgagtgcccactgctcaagcgcagcggcttggtggtggaggaggacctgttcaacacactgccacccgaggtgaaggagcggctgtggagggctgacaaggagcaggcctgagcgaggccggcccagcacagcaagcagcaggaccgctgcccagtcctcaggcccggaggggcaggcctagcttctcccagaactcccggacagccaggacagcctcgtggctgggcaggagcctggggccgcttgtgagtcaggccagagcgagaggacagtatctgtggggctggccccttttctccctctgagactcacgtcccccagggcaagtgcttgtggaggagagcaagtctcaagagcgcagtatttggataatcagggtctcctccctggaggccagctctgccccaggggctgagctgccaccagaggtcctgggaccctcactttagttcttggtatttatttttctccatctcccacctccttcatccagataacttatacattcccaagaaagttcagcccagatggaaggtgttcagggaaaggtgggctgccttttccccttgtccttatttagcgatgccgccgggcatttaacacccacctggacttcagcagagtggtccggggcgaaccagccatgggacggtcacccagcagtgccgggctgggctctgcggtgcggtccacgggagagcaggcctccagctggaaaggccaggcctggagcttgcctcttcagtatttgtggcagttttagttttttgtttttttttttttaatcaaaaaacaatttttttaaaaaaaaagctttgaaaatggatggtttgggtattaaaaagaaaaaaaaaacttaaaaaaaaaaagacactaacggccagtgagttggagtctcagggcagggtggcagtttcccttgagcaaagcagccagacgttgaactgtgtttcctttccctgggcgcagggtgcagggtgtcttccggatctggtgtgaccttggtccaggagttctatttgttcctggggagggaggtttttttgtttgttttttgggtttttttggtgtcttgttttctttctcctccatgtgtcttggcaggcactcatttctgtggctgtcggccagagggaatgttctggagctgccaaggagggaggagactcgggttggctaatccccggatgaacggtgctccattcgcacctcccctcctcgtgcctgccctgcctctccacgcacagtgttaaggagccaagaggagccacttcgcccagactttgtttccccaccgcctgcggcatgggtgtgtccagtgccaccgctggcctccgctgcttccatcagccttgtcgccacctggtccttcatgaagagcagacacttagaggctggtcgggaatggggaggtcgcccctgggagggcaggcgttggttccaagccggttcccgtccctggcgcctggagtgcacacagcccagtcggcacctggtggctggaagccaccctgctttagatcactcgggtccccaccttagaagggtccccgccttagatcaatcacgtggacactaaggcacgttttagagtctcttgtcttaatgattatgtccatccgtctgtccgtccatttgtgttttctgcgtcgtgtcattggatataatcctcagaaataatgcacactagcctctgacaaccatgaagcaaaaatccgttacatgtgggtctgaacttgtagactcggtcacagtatcaaataaaatctataacagaaa

SEQ ID NO: 53603 - DNA, 4730 bp, Homo sapiens
  misc_feature (2)..(2): n is a, c, g, or t
  misc_feature (5)..(8): n is a, c, g, or t
gncannnngcctgcctcagcctcgcgagcagctgggactacaggtgcccgccaccacgcccggctaattttttgtatttttagtagagacggggtttcaccgtgttagccaggatggtctcgatttcctgacctcgtgatccgcgcgcctctgcctccaaagtgctgggattacaggcccgagccgccgcacccggcctgcaggtgttgttctgaccccagctccactgtgccagcccgacttgagatgccaagtatcttgggcctgaggattgaggcctagagagaggcaggcgttcctcagagtcacagggaatggcggcgcctggactgggactcagcccagctgcttggcctgaccctctcacagcataatttcccggcacctggaggccgcgcttagaagccgcccagtgccctgagcgtctccatggcctgcctgagcccctcgcagctccagaagttccaacaggatggattcctggtgctggaaggattcttgtctgcggaagagtgtgtggccatgcaacaaaggattggcgagatagtggctgaaatggatgttcctctccactgccgcacagaattctccacccaggaagaggagcagcttcgagcccaggttgaaccatgattccggtgacagagctccgctactttgcggacacgcagccagcataccggatcctgaagccgtggtgggatgtgttcacagactacatctctatcgtcatgctgatgattgccgtcttcggggggacgctgcaggtcacccaagacaagatgatctgcctgccttgtaagtgggtcaccaaggactcctgcaatgattcgttccggggctgggcagcccctggcccggagcccacctaccccaactccaccattctgccgacccctgacacgggccccacaggcatcaagtatgacctggaccggcaccagtacaactacgtggacgctgtgtgctatgagaaccgactgcactggtttgccaagtacttcccctacctggtgcttctgcacacgctcatcttcctggcctgcagcaacttctggttcaaattcccgcgcaccagctcgaagctggagcactttgtgtctatcctgctgaagtgcttcgactcgccctggaccacgagggccctgtcggagacagtggtggaggagagcgaccccaagccggccttcagcaagatgaatgggtccatggacaaaaagtcatcgaccgtcagtgaggacgtggaggccaccgtgcccatgctgcagcggaccaagtcacggatcgagcagggtatcgtggaccgctcagagacgggcgtgctggacaagaaggagggggagcaagccaaggcgctgtttgagaaggtgaagaagttccggacccatgtggaggagggggacattgtgtaccgcctctacatgcggcagaccatcatcaaggtgatcaagttcatcctcatcatctgctacaccgtctactacgtgcacaacatcaagttcgacgtggactgcaccgtggacattgagagcctgacgggctaccgcacctaccgctgtgcccaccccctggccacactcttcaagatcctggcgtccttctacatcagcctagtcatcttctacggcctcatctgcatgtatacactgtggtggatgctacggcgctccctcaagaagtactcgtttgagtcgatccgtgaggagagcagctacagcgacatccccgacgtcaagaacgacttcgccttcatgctgcacctcattgaccaatacgacccgctctactccaagcgcttcgccgtcttcctgtcggaggtgagtgagaacaagctgcggcagctgaacctcaacaacgagtggacgctggacaagctccggcagcggctcaccaagaacgcgcaggacaagctggagctgcacctgttcatgctcagtggcatccctgacactgtgtttgacctggtggagctggaggtcctcaagctggagctgatccccgacgtgaccatcccgcccagcattgcccagctcacgggcctcaaggagctgtggctctaccacacagcggccaagattgaagcgcccgcgctggccttcctgcgcgagaacctgcgggcgctgcacatcaagttcaccgacatcaaggagatcccgctgtggatctatagcctgaagacactggaggagctgcacctgacgggcaacctgagcgcggagaacaaccgctacatcgtcatcgacgggctgcgggagctcaaacgcctcaaggtgctgcggctcaagagcaacctaagcaagctgccacaggtggtcacagatgtgggcgtgcacctgcagaagctgtccatcaacaatgagggcaccaagctcatcgtcctcaacagcctcaagaagatggcgaacctgactgagctggagctgatccgctgtgacctggagcgcatcccccactccatcttcagcctccacaacctgcaggagattgacctcaaggacaacaacctcaagaccatcgaggagatcatcagcttccagcacctgcaccgcctcacctgccttaagctgtggtacaaccacatcgcctacatccccatccagatcggcaacctcaccaacctggagcgcctctacctgaaccgcaacaagatcgagaagatccccacccagctcttctactgccgcaagctgcgctacctggacctcagccacaacaacctgaccttcctccctgccgacatcggcctcctgcagaacctccagaacctagccatcacggccaaccggatcgagacgctccctccggagctcttccagtgccggaagctgcgggccctgcacctgggcaacaacgtgctgcagtcactgccctccagggtgggcgagctgaccaacctgacgcagatcgagctgcggggcaaccggctggagtgcctgcctgtggagctgggcgagtgcccactgctcaagcgcagcggcttggtggtggaggaggacctgttcaacacactgccacccgaggtgaaggagcggctgtggagggctgacaaggagcaggcctgagcgaggccggcccagcacagcaagcagcaggaccgctgcccagtcctcaggcccggaggggcaggcctagcttctcccagaactcccggacagccaggacagcctcgtggctgggcaggagcctggggccgcttgtgagtcaggccagagcgagaggacagtatctgtggggctggccccttttctccctctgagactcacgtcccccagggcaagtgcttgtggaggagagcaagtctcaagagcgcagtatttggataatcagggtctcctccctggaggccagctctgccccaggggctgagctgccaccagaggtcctgggaccctcactttagttcttggtatttatttttctccatctcccacctccttcatccagataacttatacattcccaagaaagttcagcccagatggaaggtgttcagggaaaggtgggctgccttttccccttgtccttatttagcgatgccgccgggcatttaacacccacctggacttcagcagagtggtccggggcgaaccagccatgggacggtcacccagcagtgccgggctgggctctgcggtgcggtccacgggagagcaggcctccagctggaaaggccaggcctggagcttgcctcttcagtatttgtggcagttttagttttttgtttttttttttttaatcaaaaaacaatttttttaaaaaaaaagctttgaaaatggatggtttgggtattaaaaagaaaaaaaaaacttaaaaaaaaaaagacactaacggccagtgagttggagtctcagggcagggtggcagtttcccttgagcaaagcagccagacgttgaactgtgtttcctttccctgggcgcagggtgcagggtgtcttccggatctggtgtgaccttggtccaggagttctatttgttcctggggagggaggtttttttgtttgttttttgggtttttttggtgtcttgttttctttctcctccatgtgtcttggcaggcactcatttctgtggctgtcggccagagggaatgttctggagctgccaaggagggaggagactcgggttggctaatccccggatgaacggtgctccattcgcacctcccctcctcgtgcctgccctgcctctccacgcacagtgttaaggagccaagaggagccacttcgcccagactttgtttccccaccgcctgcggcatgggtgtgtccagtgccaccgctggcctccgctgcttccatcagccttgtcgccacctggtccttcatgaagagcagacacttagaggctggtcgggaatggggaggtcgcccctgggagggcaggcgttggttccaagccggttcccgtccctggcgcctggagtgcacacagcccagtcggcacctggtggctggaagccaccctgctttagatcactcgggtccccaccttagaagggtccccgccttagatcaatcacgtggacactaaggcacgttttagagtctcttgtcttaatgattatgtccatccgtctgtccgtccatttgtgttttctgcgtcgtgtcattggatataatcctcagaaataatgcacactagcctctgacaaccatgaagcaaaaatccgttacatgtgggtctgaacttgtagactcggtcacagtatcaaataaaatctataacagaaa

SEQ ID NO: 53604 - DNA, 4634 bp, Homo sapiens
ggatgcgttaattcccttccataatcctcccaggaccgagagggtttcagatcggtgctgggaggggcccagatagttctccccaggacctcttccacctttggaatgcccattacctggagaaggggggtgccgcacatcccccagaccaaccctgcatcccattctatccagattgaggcctagagagaggcaggcgttcctcagagtcacagggaatggcggcgcctggactgggactcagcccagctgcttggcctgaccctctcacagcataatttcccggcacctggaggccgcgcttagaagccgcccagtgccctgagcgtctccatggcctgcctgagcccctcgcagctccagaagttccaacaggatggattcctggtgctggaaggattcttgtctgcggaagagtgtgtggccatgcaacaaaggattggcgagatagtggctgaaatggatgttcctctccactgccgcacagaattctccacccaggaagaggagcagcttcgagcccaggttgaaccatgattccggtgacagagctccgctactttgcggacacgcagccagcataccggatcctgaagccgtggtgggatgtgttcacagactacatctctatcgtcatgctgatgattgccgtcttcggggggacgctgcaggtcacccaagacaagatgatctgcctgccttgtaagtgggtcaccaaggactcctgcaatgattcgttccggggctgggcagcccctggcccggagcccacctaccccaactccaccattctgccgacccctgacacgggccccacaggcatcaagtatgacctggaccggcaccagtacaactacgtggacgctgtgtgctatgagaaccgactgcactggtttgccaagtacttcccctacctggtgcttctgcacacgctcatcttcctggcctgcagcaacttctggttcaaattcccgcgcaccagctcgaagctggagcactttgtgtctatcctgctgaagtgcttcgactcgccctggaccacgagggccctgtcggagacagtggtggaggagagcgaccccaagccggccttcagcaagatgaatgggtccatggacaaaaagtcatcgaccgtcagtgaggacgtggaggccaccgtgcccatgctgcagcggaccaagtcacggatcgagcagggtatcgtggaccgctcagagacgggcgtgctggacaagaaggagggggagcaagccaaggcgctgtttgagaaggtgaagaagttccggacccatgtggaggagggggacattgtgtaccgcctctacatgcggcagaccatcatcaaggtgatcaagttcatcctcatcatctgctacaccgtctactacgtgcacaacatcaagttcgacgtggactgcaccgtggacattgagagcctgacgggctaccgcacctaccgctgtgcccaccccctggccacactcttcaagatcctggcgtccttctacatcagcctagtcatcttctacggcctcatctgcatgtatacactgtggtggatgctacggcgctccctcaagaagtactcgtttgagtcgatccgtgaggagagcagctacagcgacatccccgacgtcaagaacgacttcgccttcatgctgcacctcattgaccaatacgacccgctctactccaagcgcttcgccgtcttcctgtcggaggtgagtgagaacaagctgcggcagctgaacctcaacaacgagtggacgctggacaagctccggcagcggctcaccaagaacgcgcaggacaagctggagctgcacctgttcatgctcagtggcatccctgacactgtgtttgacctggtggagctggaggtcctcaagctggagctgatccccgacgtgaccatcccgcccagcattgcccagctcacgggcctcaaggagctgtggctctaccacacagcggccaagattgaagcgcccgcgctggccttcctgcgcgagaacctgcgggcgctgcacatcaagttcaccgacatcaaggagatcccgctgtggatctatagcctgaagacactggaggagctgcacctgacgggcaacctgagcgcggagaacaaccgctacatcgtcatcgacgggctgcgggagctcaaacgcctcaaggtgctgcggctcaagagcaacctaagcaagctgccacaggtggtcacagatgtgggcgtgcacctgcagaagctgtccatcaacaatgagggcaccaagctcatcgtcctcaacagcctcaagaagatggcgaacctgactgagctggagctgatccgctgtgacctggagcgcatcccccactccatcttcagcctccacaacctgcaggagattgacctcaaggacaacaacctcaagaccatcgaggagatcatcagcttccagcacctgcaccgcctcacctgccttaagctgtggtacaaccacatcgcctacatccccatccagatcggcaacctcaccaacctggagcgcctctacctgaaccgcaacaagatcgagaagatccccacccagctcttctactgccgcaagctgcgctacctggacctcagccacaacaacctgaccttcctccctgccgacatcggcctcctgcagaacctccagaacctagccatcacggccaaccggatcgagacgctccctccggagctcttccagtgccggaagctgcgggccctgcacctgggcaacaacgtgctgcagtcactgccctccagggtgggcgagctgaccaacctgacgcagatcgagctgcggggcaaccggctggagtgcctgcctgtggagctgggcgagtgcccactgctcaagcgcagcggcttggtggtggaggaggacctgttcaacacactgccacccgaggtgaaggagcggctgtggagggctgacaaggagcaggcctgagcgaggccggcccagcacagcaagcagcaggaccgctgcccagtcctcaggcccggaggggcaggcctagcttctcccagaactcccggacagccaggacagcctcgtggctgggcaggagcctggggccgcttgtgagtcaggccagagcgagaggacagtatctgtggggctggccccttttctccctctgagactcacgtcccccagggcaagtgcttgtggaggagagcaagtctcaagagcgcagtatttggataatcagggtctcctccctggaggccagctctgccccaggggctgagctgccaccagaggtcctgggaccctcactttagttcttggtatttatttttctccatctcccacctccttcatccagataacttatacattcccaagaaagttcagcccagatggaaggtgttcagggaaaggtgggctgccttttccccttgtccttatttagcgatgccgccgggcatttaacacccacctggacttcagcagagtggtccggggcgaaccagccatgggacggtcacccagcagtgccgggctgggctctgcggtgcggtccacgggagagcaggcctccagctggaaaggccaggcctggagcttgcctcttcagtatttgtggcagttttagttttttgtttttttttttttaatcaaaaaacaatttttttaaaaaaaaagctttgaaaatggatggtttgggtattaaaaagaaaaaaaaaacttaaaaaaaaaaagacactaacggccagtgagttggagtctcagggcagggtggcagtttcccttgagcaaagcagccagacgttgaactgtgtttcctttccctgggcgcagggtgcagggtgtcttccggatctggtgtgaccttggtccaggagttctatttgttcctggggagggaggtttttttgtttgttttttgggtttttttggtgtcttgttttctttctcctccatgtgtcttggcaggcactcatttctgtggctgtcggccagagggaatgttctggagctgccaaggagggaggagactcgggttggctaatccccggatgaacggtgctccattcgcacctcccctcctcgtgcctgccctgcctctccacgcacagtgttaaggagccaagaggagccacttcgcccagactttgtttccccaccgcctgcggcatgggtgtgtccagtgccaccgctggcctccgctgcttccatcagccttgtcgccacctggtccttcatgaagagcagacacttagaggctggtcgggaatggggaggtcgcccctgggagggcaggcgttggttccaagccggttcccgtccctggcgcctggagtgcacacagcccagtcggcacctggtggctggaagccaccctgctttagatcactcgggtccccaccttagaagggtccccgccttagatcaatcacgtggacactaaggcacgttttagagtctcttgtcttaatgattatgtccatccgtctgtccgtccatttgtgttttctgcgtcgtgtcattggatataatcctcagaaataatgcacactagcctctgacaaccatgaagcaaaaatccgttacatgtgggtctgaacttgtagactcggtcacagtatcaaataaaatctataacagaaa

SEQ ID NO: 53605 - DNA, 4355 bp, Homo sapiens
agcggacttccggggcggaggaggctgagtggtgcagtgagggacaaacaaaaggaggcgccggagcagcgctgcggccggcggcgggacggagcggccggggcctggggctgcctgccgggcggccgggcgcggcgagcccagggaggcagcgtccatggagcaaaaggaatgccaggatcctgcacaggcagacgcgggccagcctcagcaccgacagccgacgcgcagatagcagagccatccttggggttgaaccatgattccggtgacagagctccgctactttgcggacacgcagccagcataccggatcctgaagccgtggtgggatgtgttcacagactacatctctatcgtcatgctgatgattgccgtcttcggggggacgctgcaggtcacccaagacaagatgatctgcctgccttgtaagtgggtcaccaaggactcctgcaatgattcgttccggggctgggcagcccctggcccggagcccacctaccccaactccaccattctgccgacccctgacacgggccccacaggcatcaagtatgacctggaccggcaccagtacaactacgtggacgctgtgtgctatgagaaccgactgcactggtttgccaagtacttcccctacctggtgcttctgcacacgctcatcttcctggcctgcagcaacttctggttcaaattcccgcgcaccagctcgaagctggagcactttgtgtctatcctgctgaagtgcttcgactcgccctggaccacgagggccctgtcggagacagtggtggaggagagcgaccccaagccggccttcagcaagatgaatgggtccatggacaaaaagtcatcgaccgtcagtgaggacgtggaggccaccgtgcccatgctgcagcggaccaagtcacggatcgagcagggtatcgtggaccgctcagagacgggcgtgctggacaagaaggagggggagcaagccaaggcgctgtttgagaaggtgaagaagttccggacccatgtggaggagggggacattgtgtaccgcctctacatgcggcagaccatcatcaaggtgatcaagttcatcctcatcatctgctacaccgtctactacgtgcacaacatcaagttcgacgtggactgcaccgtggacattgagagcctgacgggctaccgcacctaccgctgtgcccaccccctggccacactcttcaagatcctggcgtccttctacatcagcctagtcatcttctacggcctcatctgcatgtatacactgtggtggatgctacggcgctccctcaagaagtactcgtttgagtcgatccgtgaggagagcagctacagcgacatccccgacgtcaagaacgacttcgccttcatgctgcacctcattgaccaatacgacccgctctactccaagcgcttcgccgtcttcctgtcggaggtgagtgagaacaagctgcggcagctgaacctcaacaacgagtggacgctggacaagctccggcagcggctcaccaagaacgcgcaggacaagctggagctgcacctgttcatgctcagtggcatccctgacactgtgtttgacctggtggagctggaggtcctcaagctggagctgatccccgacgtgaccatcccgcccagcattgcccagctcacgggcctcaaggagctgtggctctaccacacagcggccaagattgaagcgcccgcgctggccttcctgcgcgagaacctgcgggcgctgcacatcaagttcaccgacatcaaggagatcccgctgtggatctatagcctgaagacactggaggagctgcacctgacgggcaacctgagcgcggagaacaaccgctacatcgtcatcgacgggctgcgggagctcaaacgcctcaaggtgctgcggctcaagagcaacctaagcaagctgccacaggtggtcacagatgtgggcgtgcacctgcagaagctgtccatcaacaatgagggcaccaagctcatcgtcctcaacagcctcaagaagatggcgaacctgactgagctggagctgatccgctgtgacctggagcgcatcccccactccatcttcagcctccacaacctgcaggagattgacctcaaggacaacaacctcaagaccatcgaggagatcatcagcttccagcacctgcaccgcctcacctgccttaagctgtggtacaaccacatcgcctacatccccatccagatcggcaacctcaccaacctggagcgcctctacctgaaccgcaacaagatcgagaagatccccacccagctcttctactgccgcaagctgcgctacctggacctcagccacaacaacctgaccttcctccctgccgacatcggcctcctgcagaacctccagaacctagccatcacggccaaccggatcgagacgctccctccggagctcttccagtgccggaagctgcgggccctgcacctgggcaacaacgtgctgcagtcactgccctccagggtgggcgagctgaccaacctgacgcagatcgagctgcggggcaaccggctggagtgcctgcctgtggagctgggcgagtgcccactgctcaagcgcagcggcttggtggtggaggaggacctgttcaacacactgccacccgaggtgaaggagcggctgtggagggctgacaaggagcaggcctgagcgaggccggcccagcacagcaagcagcaggaccgctgcccagtcctcaggcccggaggggcaggcctagcttctcccagaactcccggacagccaggacagcctcgtggctgggcaggagcctggggccgcttgtgagtcaggccagagcgagaggacagtatctgtggggctggccccttttctccctctgagactcacgtcccccagggcaagtgcttgtggaggagagcaagtctcaagagcgcagtatttggataatcagggtctcctccctggaggccagctctgccccaggggctgagctgccaccagaggtcctgggaccctcactttagttcttggtatttatttttctccatctcccacctccttcatccagataacttatacattcccaagaaagttcagcccagatggaaggtgttcagggaaaggtgggctgccttttccccttgtccttatttagcgatgccgccgggcatttaacacccacctggacttcagcagagtggtccggggcgaaccagccatgggacggtcacccagcagtgccgggctgggctctgcggtgcggtccacgggagagcaggcctccagctggaaaggccaggcctggagcttgcctcttcagtatttgtggcagttttagttttttgtttttttttttttaatcaaaaaacaatttttttaaaaaaaaagctttgaaaatggatggtttgggtattaaaaagaaaaaaaaaacttaaaaaaaaaaagacactaacggccagtgagttggagtctcagggcagggtggcagtttcccttgagcaaagcagccagacgttgaactgtgtttcctttccctgggcgcagggtgcagggtgtcttccggatctggtgtgaccttggtccaggagttctatttgttcctggggagggaggtttttttgtttgttttttgggtttttttggtgtcttgttttctttctcctccatgtgtcttggcaggcactcatttctgtggctgtcggccagagggaatgttctggagctgccaaggagggaggagactcgggttggctaatccccggatgaacggtgctccattcgcacctcccctcctcgtgcctgccctgcctctccacgcacagtgttaaggagccaagaggagccacttcgcccagactttgtttccccaccgcctgcggcatgggtgtgtccagtgccaccgctggcctccgctgcttccatcagccttgtcgccacctggtccttcatgaagagcagacacttagaggctggtcgggaatggggaggtcgcccctgggagggcaggcgttggttccaagccggttcccgtccctggcgcctggagtgcacacagcccagtcggcacctggtggctggaagccaccctgctttagatcactcgggtccccaccttagaagggtccccgccttagatcaatcacgtggacactaaggcacgttttagagtctcttgtcttaatgattatgtccatccgtctgtccgtccatttgtgttttctgcgtcgtgtcattggatataatcctcagaaataatgcacactagcctctgacaaccatgaagcaaaaatccgttacatgtgggtctgaacttgtagactcgtcccgatacttggggtcctctaaggtc

SEQ ID NO: 53606 - DNA, 4233 bp, Homo sapiens
agcggacttccggggcggaggaggctgagtggtgcagtgagggacaaacaaaaggaggcgccggagcagcgctgcggccggcggcgggacggagcggccggggcctggggctgcctgccgggcggccgggcgcggcgagcccagggaggcagcgtccatggagcaaaaggaatgccaggatcctgcacaggcagacgcgggccagcctcagcaccgacagccgacgcgcagatagcagagccatccttggggttgaaccatgattccggtgacagagctccgctactttgcggacacgcagccagcataccggatcctgaagccgtggtgggatgtgttcacagactacatctctatcgtcatgctgatgattgccgtcttcggggggacgctgcaggtcacccaagacaagatgatctgcctgccttgtaagtgggtcaccaaggactcctgcaatgattcgttccggggctgggcagcccctggcccggagcccacctaccccaactccaccattctgccgacccctgacacgggccccacaggcatcaagtatgacctggaccggcaccagtacaactacgtggacgctgtgtgctatgagaaccgactgcactggtttgccaagtacttcccctacctggtgcttctgcacacgctcatcttcctggcctgcagcaacttctggttcaaattcccgcgcaccagctcgaagctggagcactttgtgtctatcctgctgaagtgcttcgactcgccctggaccacgagggccctgtcggagacagtggtggaggagagcgaccccaagccggccttcagcaagatgaatgggtccatggacaaaaagtcatcgaccgtcagtgaggacgtggaggccaccgtgcccatgctgcagcggaccaagtcacggatcgagcagggtatcgtggaccgctcagagacgggcgtgctggacaagaaggagggggagcaagccaaggcgctgtttgagaaggtgaagaagttccggacccatgtggaggagggggacattgtgtaccgcctctacatgcggcagaccatcatcaaggtgatcaagttcatcctcatcatctgctacaccgtctactacgtgcacaacatcaagttcgacgtggactgcaccgtggacattgagagcctgacgggctaccgcacctaccgctgtgcccaccccctggccacactcttcaagatcctggcgtccttctacatcagcctagtcatcttctacggcctcatctgcatgtatacactgtggtggatgctacggcgctccctcaagaagtactcgtttgagtcgatccgtgaggagagcagctacagcgacatccccgacgtcaagaacgacttcgccttcatgctgcacctcattgaccaatacgacccgctctactccaagcgcttcgccgtcttcctgtcggaggtgagtgagaacaagctgcggcagctgaacctcaacaacgagtggacgctggacaagctccggcagcggctcaccaagaacgcgcaggacaagctggagctgcacctgttcatgctcagtggcatccctgacactgtgtttgacctggtggagctggaggtcctcaagctggagctgatccccgacgtgaccatcccgcccagcattgcccagctcacgggcctcaaggagctgtggctctaccacacagcggccaagattgaagcgcccgcgctggccttcctgcgcgagaacctgcgggcgctgcacatcaagttcaccgacatcaaggagatcccgctgtggatctatagcctgaagacactggaggagctgcacctgacgggcaacctgagcgcggagaacaaccgctacatcgtcatcgacgggctgcgggagctcaaacgcctcaaggtgctgcggctcaagagcaacctaagcaagctgccacaggtggtcacagatgtgggcgtgcacctgcagaagctgtccatcaacaatgagggcaccaagctcatcgtcctcaacagcctcaagaagatggcgaacctgactgagctggagctgatccgctgtgacctggagcgcatcccccactccatcttcagcctccacaacctgcaggagattgacctcaaggacaacaacctcaagaccatcgaggagatcatcagcttccagcacctgcaccgcctcacctgccttaagctgtggtacaaccacatcgcctacatccccatccagatcggcaacctcaccaacctggagcgcctctacctgaaccgcaacaagatcgagaagatccccacccagctcttctactgccgcaagctgcgctacctggacctcagccacaacaacctgaccttcctccctgccgacatcggcctcctgcagaacctccagaacctagccatcacggccaaccggatcgagacgctccctccggagctcttccagtgccggaagctgcgggccctgcacctgggcaacaacgtgctgcagtcactgccctccagggtgggcgagctgaccaacctgacgcagatcgagctgcggggcaaccggctggagtgcctgcctgtggagctgggcgagtgcccactgctcaagcgcagcggcttggtggtggaggaggacctgttcaacacactgccacccgaggtgaaggagcggctgtggagggctgacaaggagcaggcctgagcgaggccggcccagcacagcaagcagcaggaccgctgcccagtcctcaggcccggaggggcaggcctagcttctcccagaactcccggacagccaggacagcctcgtggctgggcaggagcctggggccgcttgtgagtcaggccagagcgagaggacagtatctgtggggctggccccttttctccctctgagactcacgtcccccagggcaagtgcttgtggaggagagcaagtctcaagagcgcagtatttggataatcagggtctcctccctggaggccagctctgccccaggggctgagctgccaccagaggtcctgggaccctcactttagttcttggtatttatttttctccatctcccacctccttcatccagataacttatacattcccaagaaagttcagcccagatggaaggtgttcagggaaaggtgggctgccttttccccttgtccttatttagcgatgccgccgggcatttaacacccacctggacttcagcagagtggtccggggcgaaccagccatgggacggtcacccagcagtgccgggctgggctctgcggtgcggtccacgggagagcaggcctccagctggaaaggccaggcctggagcttgcctcttcagtatttgtggcagttttagttttttgtttttttttttttaatcaaaaaacaatttttttaaaaaaaaagctttgaaaatggatggtttgggtattaaaaagaaaaaaaaaacttaaaaaaaaaaagacactaacggccagtgagttggagtctcagggcagggtggcagtttcccttgagcaaagcagccagacgttgaactgtgtttcctttccctgggcgcagggtgcagggtgtcttccggatctggtgtgaccttggtccaggagttctatttgttcctggggagggaggtttttttgtttgttttttgggtttttttggtgtcttgttttctttctcctccatgtgtcttggcaggcactcatttctgtggctgtcggccagagggaatgttctggagctgccaaggagggaggagactcgggttggctaatccccggatgaacggtgctccattcgcacctcccctcctcgtgcctgccctgcctctccacgcacagtgttaaggagccaagaggagccacttcgcccagactttgtttccccaccgcctgcggcatgggtgtgtccagtgccaccgctggcctccgctgcttccatcagccttgtcgccacctggtccttcatgaagagcagacacttagaggctggtcgggaatggggaggtcgcccctgggagggcaggcgttggttccaagccggttcccgtccctggcgcctggagtgcacacagcccagtcggcacctggtggctggaagccaccctgctttagatcactcgggtccccaccttagaagggtccccgccttagatcaatcacgtggacactaaggcacgttttagagtctcttgtcttaatgattatgtccatcagcctctgtgggatcctctagatacactgata

SEQ ID NO: 53607 - DNA, 2647 bp, Homo sapiens
  misc_feature (23)..(23): n is a, c, g, or t
aacagatgaattaaaccctcgtngccgaaattcgggcacggagcaaagtttcaccgacatcaaggagatcccgctgtggatctatagcctgaagacactggaggagctgcacctgacgggcaacctgagcgcggagaacaaccgctacatcgtcatcgacgggctgcgggagctcaaacgcctcaaggtgctgcggctcaagagcaacctaagcaagctgccacaggtggtcacagatgtgggcgtgcacctgcagaagctgtccatcaacaatgagggcaccaagctcatcgtcctcaacagcctcaagaagatggcgaacctgactgagctggagctgatccgctgtgacctggagcgcatcccccactccatcttcagcctccacaacctgcaggagattgacctcaaggacaacaacctcaagaccatcgaggagatcatcagcttccagcacctgcaccgcctcacctgccttaagctgtggtacaaccacatcgcctacatccccatccagatcggcaacctcaccaacctggagcgcctctacctgaaccgcaacaagatcgagaagatccccacccagctcttctactgccgcaagctgcgctacctggacctcagccacaacaacctgaccttcctccctgccgacatcggcctcctgcagaacctccagaacctagccatcacggccaaccggatcgagacgctccctccggagctcttccagtgccggaagctgcgggccctgcacctgggcaacaacgtgctgcagtcactgccctccagggtgggcgagctgaccaacctgacgcagatcgagctgcggggcaaccggctggagtgcctgcctgtggagctgggcgagtgcccactgctcaagcgcagcggcttggtggtggaggaggacctgttcaacacactgccacccgaggtgaaggagcggctgtggagggctgacaaggagcaggcctgagcgaggccggcccagcacagcaagcagcaggaccgctgcccagtcctcaggcccggaggggcaggcctagcttctcccagaactcccggacagccaggacagcctcgtggctgggcaggagcctggggccgcttgtgagtcaggccagagcgagaggacagtatctgtggggctggccccttttctccctctgagactcacgtcccccagggcaagtgcttgtggaggagagcaagtctcaagagcgcagtatttggataatcagggtctcctccctggaggccagctctgccccaggggctgagctgccaccagaggtcctgggaccctcactttagttcttggtatttatttttctccatctcccacctccttcatccagataacttatacattcccaagaaagttcagcccagatggaaggtgttcagggaaaggtgggctgccttttccccttgtccttatttagcgatgccgccgggcatttaacacccacctggacttcagcagagtggtccggggcgaaccagccatgggacggtcacccagcagtgccgggctgggctctgcggtgcggtccacgggagagcaggcctccagctggaaaggccaggcctggagcttgcctcttcagtatttgtggcagttttagttttttgtttttttttttttaatcaaaaaacaatttttttaaaaaaaaagctttgaaaatggatggtttgggtattaaaaagaaaaaaaaaacttaaaaaaaaaaagacactaacggccagtgagttggagtctcagggcagggtggcagtttcccttgagcaaagcagccagacgttgaactgtgtttcctttccctgggcgcagggtgcagggtgtcttccggatctggtgtgaccttggtccaggagttctatttgttcctggggagggaggtttttttgtttgttttttgggtttttttggtgtcttgttttctttctcctccatgtgtcttggcaggcactcatttctgtggctgtcggccagagggaatgttctggagctgccaaggagggaggagactcgggttggctaatccccggatgaacggtgctccattcgcacctcccctcctcgtgcctgccctgcctctccacgcacagtgttaaggagccaagaggagccacttcgcccagactttgtttccccaccgcctgcggcatgggtgtgtccagtgccaccgctggcctccgctgcttccatcagccttgtcgccacctggtccttcatgaagagcagacacttagaggctggtcgggaatggggaggtcgcccctgggagggcaggcgttggttccaagccggttcccgtccctggcgcctggagtgcacacagcccagtcggcacctggtggctggaagccaccctgctttagatcactcgggtccccaccttagaagggtccccgccttagatcaatcacgtggacactaaggcacgttttagagtctcttgtcttaatgattatgtccatccgtctgtccgtccatttgtgttttctgcgtcgtgtcattggatataatcctcagaaataatgcacactagcctctgacaaccatgaagcaaaaatccgttacatgtgggtctgaacttgtagactcggtcacagtatcaaataaaatctataacagaaa

SEQ ID NO: 53608 - DNA, 4272 bp, Homo sapiens
agcggacttccggggcggaggaggctgagtggtgcagtgagggacaaacaaaaggaggcgccggagcagcgctgcggccggcggcgggacggagcggccggggcctggggctgcctgccgggcggccgggcgcggcgagcccagggaggcagcgtccatggagcaaaaggaatgccaggatcctgcacaggcagacgcgggccagcctcagcaccgacagccgacgcgcagatagcagagccatccttggggttgaaccatgattccggtgacagagctccgctactttgcggacacgcagccagcataccggatcctgaagccgtggtgggatgtgttcacagactacatctctatcgtcatgctgatgattgccgtcttcggggggacgctgcaggtcacccaagacaagatgatctgcctgccttgtaagtgggtcaccaaggactcctgcaatgattcgttccggggctgggcagcccctggcccggagcccacctaccccaactccaccattctgccgacccctgacacgggccccacaggcatcaagtatgacctggaccggcaccagtacaactacgtggacgctgtgtgctatgagaaccgactgcactggtttgccaagtacttcccctacctggtgcttctgcacacgctcatcttcctggcctgcagcaacttctggttcaaattcccgcgcaccagctcgaagctggagcactttgtgtctatcctgctgaagtgcttcgactcgccctggaccacgagggccctgtcggagacagtggtggaggagagcgaccccaagccggccttcagcaagatgaatgggtccatggacaaaaagtcatcgaccgtcagtgaggacgtggaggccaccgtgcccatgctgcagcggaccaagtcacggatcgagcagggtatcgtggaccgctcagagacgggcgtgctggacaagaaggagggggagcaagccaaggcgctgtttgagaaggtgaagaagttccggacccatgtggaggagggggacattgtgtaccgcctctacatgcggcagaccatcatcaaggtgatcaagttcatcctcatcatctgctacaccgtctactacgtgcacaacatcaagttcgacgtggactgcaccgtggacattgagagcctgacgggctaccgcacctaccgctgtgcccaccccctggccacactcttcaagatcctggcgtccttctacatcagcctagtcatcttctacggcctcatctgcatgtatacactgtggtggatgctacggcgctccctcaagaagtactcgtttgagtcgatccgtgaggagagcagctacagcgacatccccgacgtcaagaacgacttcgccttcatgctgcacctcattgaccaatacgacccgctctactccaagcgcttcgccgtcttcctgtcggaggtgagtgagaacaagctgcggcagctgaacctcaacaacgagtggacgctggacaagctccggcagcggctcaccaagaacgcgcaggacaagctggagctgcacctgttcatgctcagtggcatccctgacactgtgtttgacctggtggagctggaggtcctcaagctggagctgatccccgacgtgaccatcccgcccagcattgcccagctcacgggcctcaaggagctgtggctctaccacacagcggccaagattgaagcgcccgcgctggccttcctgcgcgagaacctgcgggcgctgcacatcaagttcaccgacatcaaggagatcccgctgtggatctatagcctgaagacactggaggagctgcacctgacgggcaacctgagcgcggagaacaaccgctacatcgtcatcgacgggctgcgggagctcaaacgcctcaaggtgctgcggctcaagagcaacctaagcaagctgccacaggtggtcacagatgtgggcgtgcacctgcagaagctgtccatcaacaatgagggcaccaagctcatcgtcctcaacagcctcaagaagatggcgaacctgactgagctggagctgatccgctgtgacctggagcgcatcccccactccatcttcagcctccacaacctgcaggagattgacctcaaggacaacaacctcaagaccatcgaggagatcatcagcttccagcacctgcaccgcctcacctgccttaagctgtggtacaaccacatcgcctacatccccatccagatcggcaacctcaccaacctggagcgcctctacctgaaccgcaacaagatcgagaagatccccacccagctcttctactgccgcaagctgcgctacctggacctcagccacaacaacctgaccttcctccctgccgacatcggcctcctgcagaacctccagaacctagccatcacggccaaccggatcgagacgctccctccggagctcttccagtgccggaagctgcgggccctgcacctgggcaacaacgtgctgcagtcactgccctccagggtgggcgagctgaccaacctgacgcagatcgagctgcggggcaaccggctggagtgcctgcctgtggagctgggcgagtgcccactgctcaagcgcagcggcttggtggtggaggaggacctgttcaacacactgccacccgaggtgaaggagcggctgtggagggctgacaaggagcaggcctgagcgaggccggcccagcacagcaagcagcaggagcctggggccgcttgtgagtcaggccagagcgagaggacagtatctgtggggctggccccttttctccctctgagactcacgtcccccagggcaagtgcttgtggaggagagcaagtctcaagagcgcagtatttggataatcagggtctcctccctggaggccagctctgccccaggggctgagctgccaccagaggtcctgggaccctcactttagttcttggtatttatttttctccatctcccacctccttcatccagataacttatacattcccaagaaagttcagcccagatggaaggtgttcagggaaaggtgggctgccttttccccttgtccttatttagcgatgccgccgggcatttaacacccacctggacttcagcagagtggtccggggcgaaccagccatgggacggtcacccagcagtgccgggctgggctctgcggtgcggtccacgggagagcaggcctccagctggaaaggccaggcctggagcttgcctcttcagtatttgtggcagttttagttttttgtttttttttttttaatcaaaaaacaatttttttaaaaaaaaagctttgaaaatggatggtttgggtattaaaaagaaaaaaaaaacttaaaaaaaaaaagacactaacggccagtgagttggagtctcagggcagggtggcagtttcccttgagcaaagcagccagacgttgaactgtgtttcctttccctgggcgcagggtgcagggtgtcttccggatctggtgtgaccttggtccaggagttctatttgttcctggggagggaggtttttttgtttgttttttgggtttttttggtgtcttgttttctttctcctccatgtgtcttggcaggcactcatttctgtggctgtcggccagagggaatgttctggagctgccaaggagggaggagactcgggttggctaatccccggatgaacggtgctccattcgcacctcccctcctcgtgcctgccctgcctctccacgcacagtgttaaggagccaagaggagccacttcgcccagactttgtttccccaccgcctgcggcatgggtgtgtccagtgccaccgctggcctccgctgcttccatcagccttgtcgccacctggtccttcatgaagagcagacacttagaggctggtcgggaatggggaggtcgcccctgggagggcaggcgttggttccaagccggttcccgtccctggcgcctggagtgcacacagcccagtcggcacctggtggctggaagccaccctgctttagatcactcgggtccccaccttagaagggtccccgccttagatcaatcacgtggacactaaggcacgttttagagtctcttgtcttaatgattatgtccatccgtctgtccgtccatttgtgttttctgcgtcgtgtcattggatataatcctcagaaataatgcacactagcctctgacaaccatgaagcaaaaatccgttacatgtgggtctgaacttgtagactcggtcacagtatcaaataaaatctataacagaaa

SEQ ID NO: 53609 - DNA, 2460 bp, Homo sapiens
agcggacttccggggcggaggaggctgagtggtgcagtgagggacaaacaaaaggaggcgccggagcagcgctgcggccggcggcgggacggagcggccggggcctggggctgcctgccgggcggccgggcgcggcgagcccagggaggcagcgtccatggagcaaaaggaatgccaggatcctgcacaggcagacgcgggccagcctcagcaccgacagccgacgcgcagatagcagagccatccttggggttgaaccatgattccggtgacagagctccgctactttgcggacacgcagccagcataccggatcctgaagccgtggtgggatgtgttcacagactacatctctatcgtcatgctgatgattgccgtcttcggggggacgctgcaggtcacccaagacaagatgatctgcctgccttgtaagtgggtcaccaaggactcctgcaatgattcgttccggggctgggcagcccctggcccggagcccacctaccccaactccaccattctgccgacccctgacacgggccccacaggcatcaagtatgacctggaccggcaccagtacaactacgtggacgctgtgtgctatgagaaccgactgcactggtttgccaagtacttcccctacctggtgcttctgcacacgctcatcttcctggcctgcagcaacttctggttcaaattcccgcgcaccagctcgaagctggagcactttgtgtctatcctgctgaagtgcttcgactcgccctggaccacgagggccctgtcggagacagtggtggaggagagcgaccccaagccggccttcagcaagatgaatgggtccatggacaaaaagtcatcgaccgtcagtgaggacgtggaggccaccgtgcccatgctgcagcggaccaagtcacggatcgagcagggtatcgtggaccgctcagagacgggcgtgctggacaagaaggagggggagcaagccaaggcgctgtttgagaaggtgaagaagttccggacccatgtggaggagggggacattgtgtaccgcctctacatgcggcagaccatcatcaaggtgatcaagttcatcctcatcatctgctacaccgtctactacgtgcacaacatcaagttcgacgtggactgcaccgtggacattgagagcctgacgggctaccgcacctaccgctgtgcccaccccctggccacactcttcaagatcctggcgtccttctacatcagcctagtcatcttctacggcctcatctgcatgtatacactgtggtggatgctacggcgctccctcaagaagtactcgtttgagtcgatccgtgaggagagcagctacagcgacatccccgacgtcaagaacgacttcgccttcatgctgcacctcattgaccaatacgacccgctctactccaagcgcttcgccgtcttcctgtcggaggtgagtgagaacaagctgcggcagctgaacctcaacaacgagtggacgctggacaagctccggcagcggctcaccaagaacgcgcaggacaagctggagctgcacctgttcatgctcagtggcatccctgacactgtgtttgacctggtggagctggaggtcctcaagctggagctgatccccgacgtgaccatcccgcccagcattgcccagctcacgggcctcaaggagctgtggctctaccacacagcggccaagattgaagcgcccgcgctggccttcctgcgcgagaacctgcgggcgctgcacatcaagttcaccgacatcaaggagatcccgctgtggatctatagcctgaagacactggaggagctgcacctgacgggcaacctgagcgcggagaacaaccgctacatcgtcatcgacgggctgcgggagctcaaacgcctcaaggtgctgcggctcaagagcaacctaagcaagctgccacaggtggtcacagatgtgggcgtgcacctgcagaagctgtccatcaacaatgagggcaccaagctcatcgtcctcaacagcctcaagaagatggcgaacctgactgagctggagctgatccgctgtgacctggagcgcatcccccactccatcttcagcctccacaacctgcaggagattgacctcaaggacaacaacctcaagaccatcgaggagatcatcagcttccagcacctgcaccgcctcacctgccttaagctgtggtacaaccacatcgcctacatccccatccagatcggcaacctcaccaacctggagcgcctctacctgaaccgcaacaagatcgagaagatccccacccagctcttctactgccgcaagctgcgctacctggacctcagccacaacaacctgaccttcctccctgccgacatcggcctcctgcagaacctccagaacctagccatcacggccaaccggcacctgcaccgcctcacctgcctaagctgtgtacgattgcggta

SEQ ID NO: 53610 - DNA, 2366 bp, Homo sapiens
agcggacttccggggcggaggaggctgagtggtgcagtgagggacaaacaaaaggaggcgccggagcagcgctgcggccggcggcgggacggagcggccggggcctggggctgcctgccgggcggccgggcgcggcgagcccagggaggcagcgtccatggagcaaaaggaatgccaggatcctgcacaggcagacgcgggccagcctcagcaccgacagccgacgcgcagatagcagagccatccttggggttgaaccatgattccggtgacagagctccgctactttgcggacacgcagccagcataccggatcctgaagccgtggtgggatgtgttcacagactacatctctatcgtcatgctgatgattgccgtcttcggggggacgctgcaggtcacccaagacaagatgatctgcctgccttgtaagtgggtcaccaaggactcctgcaatgattcgttccggggctgggcagcccctggcccggagcccacctaccccaactccaccattctgccgacccctgacacgggccccacaggcatcaagtatgacctggaccggcaccagtacaactacgtggacgctgtgtgctatgagaaccgactgcactggtttgccaagtacttcccctacctggtgcttctgcacacgctcatcttcctggcctgcagcaacttctggttcaaattcccgcgcaccagctcgaagctggagcactttgtgtctatcctgctgaagtgcttcgactcgccctggaccacgagggccctgtcggagacagtggtggaggagagcgaccccaagccggccttcagcaagatgaatgggtccatggacaaaaagtcatcgaccgtcagtgaggacgtggaggccaccgtgcccatgctgcagcggaccaagtcacggatcgagcagggtatcgtggaccgctcagagacgggcgtgctggacaagaaggagggggagcaagccaaggcgctgtttgagaaggtgaagaagttccggacccatgtggaggagggggacattgtgtaccgcctctacatgcggcagaccatcatcaaggtgatcaagttcatcctcatcatctgctacaccgtctactacgtgcacaacatcaagttcgacgtggactgcaccgtggacattgagagcctgacgggctaccgcacctaccgctgtgcccaccccctggccacactcttcaagatcctggcgtccttctacatcagcctagtcatcttctacggcctcatctgcatgtatacactgtggtggatgctacggcgctccctcaagaagtactcgtttgagtcgatccgtgaggagagcagctacagcgacatccccgacgtcaagaacgacttcgccttcatgctgcacctcattgaccaatacgacccgctctactccaagcgcttcgccgtcttcctgtcggaggtgagtgagaacaagctgcggcagctgaacctcaacaacgagtggacgctggacaagctccggcagcggctcaccaagaacgcgcaggacaagctggagctgcacctgttcatgctcagtggcatccctgacactgtgtttgacctggtggagctggaggtcctcaagctggagctgatccccgacgtgaccatcccgcccagcattgcccagctcacgggcctcaaggagctgtggctctaccacacagcggccaagattgaagcgcccgcgctggccttcctgcgcgagaacctgcgggcgctgcacatcaagttcaccgacatcaaggagatcccgctgtggatctatagcctgaagacactggaggagctgcacctgacgggcaacctgagcgcggagaacaaccgctacatcgtcatcgacgggctgcgggagctcaaacgcctcaaggtgctgcggctcaagagcaacctaagcaagctgccacaggtggtcacagatgtgggcgtgcacctgcagaagctgtccatcaacaatgagggcaccaagctcatcgtcctcaacagcctcaagaagatggcgaacctgactgagctggagctgatccgctgtgacctggagcgcatcccccactccatcttcagcctccacaacctgcaggagattgacctcaaggacaacaacctcaagaccatcgaggagatcatcagcttccagcacctgcaccgcctcacctgccttaagctgtggtacaaccacatcgcctacatccccatccagatcggcaacctcaccaacctggagcgcctctacctgaaccgcaacaagatcgagaagatccccacccagctcttctactgccgcaagctgcgctacctggacctcagcctggtctccatgggatcctctaagtcat

SEQ ID NO: 53611 - DNA, 1629 bp, Homo sapiens
  misc_feature (2)..(2): n is a, c, g, or t
  misc_feature (5)..(8): n is a, c, g, or t
gncannnngcctgcctcagcctcgcgagcagctgggactacaggtgcccgccaccacgcccggctaattttttgtatttttagtagagacggggtttcaccgtgttagccaggatggtctcgatttcctgacctcgtgatccgcgcgcctctgcctccaaagtgctgggattacaggcccgagccgccgcacccggcctgcaggtgttgttctgaccccagctccactgtgccagcccgacttgagatgccaagtatcttgggcctgaggattgaggcctagagagaggcaggcgttcctcagagtcacagggaatggcggcgcctggactgggactcagcccagctgcttggcctgaccctctcacagcataatttcccggcacctggaggccgcgcttagaagccgcccagtgccctgagcgtctccatggcctgcctgagcccctcgcagctccagaagttccaacaggatggattcctggtgctggaaggattcttgtctgcggaagagtgtgtggccatgcaacaaaggattggcgagatagtggctgaaatggatgttcctctccactgccgcacagaattctccacccaggaagaggagcagcttcgagcccagggcagcacagactatttcttgagcagtggtgacaagattcgattcttctttgagaaaggcgtttttgatgagaaaggaaatttcctggtccctccggagaaatccatcaacaaaattggccacgctctgcacgcccacgaccccgtcttcaagagcatcacacactccttcaaggtgcagaccttggccagaagtctgggcctccagatgcccgtggtggtgcagagcatgtacatctttaagcaacctcactttggcggtgaagtctcccctcatcaggacgcctccttcctgtacacggagcccctgggccgggtgctgggcgtgtggatcgcagtggaggatgccacgctggagaacggctgtctctggttcatccctggctcccacaccagtggtgtgtcaagaaggatggtccgggcccctgttggctcagcgcctggtaccagcttccttgggtcagagccagcccgggataacagcctctttgtgcccaccccagtgcagagaggggccctggtcctcatccatggagaagtggtacacaagagcaagcagaacctctctgaccgctcgcgccaggcctacactttccacctcatggaggcctctggcaccacctggagcccggagaactggctccagccaacagctgaactgccctttccccaactgtacacctaaaggctctcgcagggcaggagccctcgcccctcccgggtgaagctgtgggctgtaaacaccagtgccttgctcagcctcctggttgcaacagggaggtcttgtctcccctcctgggctttcctcctgccctgtgggcagcagcctaggctgggtcaggggcttccctaagatcttcacctctctgcctccctactgccccaacatagccttgaggaggcttctcagccaccaaagggttctggccccttctcactctcctctcctctcagatggaactctggttattatggtgttagttatcgaataaaaacgacttcagaatgc

SEQ ID NO: 53612 - DNA, 582 bp, Homo sapiens
cgagctcggtacccagaggctgaatggagaaataggaacgcttttacactgttggtgggaatgtaaattagttcaaccattgtggaagacagtatggcaattcctcaaagacctagaaccagaaataccatttgacccagcaatcccgttactgggtcccaaaggaatataaatcacccttcagcctctgttagaggctggtcgggaatggggaggtcgcccctgggagggcaggcgttggttccaagccggttcccgtccctggcgcctggagtgcacacagcccagtcggcacctggtggctggaagccaccctgctttagatcactcgggtccccaccttagaagggtccccgccttagatcaatcacgtggacactaaggcacgttttagagtctcttgtcttaatgattatgtccatccgtctgtccgtccatttgtgttttctgcgtcgtgtcattggatataatcctcagaaataatgcacactagcctctgacaaccatgaagcaaaaatccgttacatgtgggtctgaacttgtagactcggtcacagtatcaaataaaatctataacagaaa

SEQ ID NO: 53613 - DNA, 1533 bp, Homo sapiens
ggatgcgttaattcccttccataatcctcccaggaccgagagggtttcagatcggtgctgggaggggcccagatagttctccccaggacctcttccacctttggaatgcccattacctggagaaggggggtgccgcacatcccccagaccaaccctgcatcccattctatccagattgaggcctagagagaggcaggcgttcctcagagtcacagggaatggcggcgcctggactgggactcagcccagctgcttggcctgaccctctcacagcataatttcccggcacctggaggccgcgcttagaagccgcccagtgccctgagcgtctccatggcctgcctgagcccctcgcagctccagaagttccaacaggatggattcctggtgctggaaggattcttgtctgcggaagagtgtgtggccatgcaacaaaggattggcgagatagtggctgaaatggatgttcctctccactgccgcacagaattctccacccaggaagaggagcagcttcgagcccagggcagcacagactatttcttgagcagtggtgacaagattcgattcttctttgagaaaggcgtttttgatgagaaaggaaatttcctggtccctccggagaaatccatcaacaaaattggccacgctctgcacgcccacgaccccgtcttcaagagcatcacacactccttcaaggtgcagaccttggccagaagtctgggcctccagatgcccgtggtggtgcagagcatgtacatctttaagcaacctcactttggcggtgaagtctcccctcatcaggacgcctccttcctgtacacggagcccctgggccgggtgctgggcgtgtggatcgcagtggaggatgccacgctggagaacggctgtctctggttcatccctggctcccacaccagtggtgtgtcaagaaggatggtccgggcccctgttggctcagcgcctggtaccagcttccttgggtcagagccagcccgggataacagcctctttgtgcccaccccagtgcagagaggggccctggtcctcatccatggagaagtggtacacaagagcaagcagaacctctctgaccgctcgcgccaggcctacactttccacctcatggaggcctctggcaccacctggagcccggagaactggctccagccaacagctgaactgccctttccccaactgtacacctaaaggctctcgcagggcaggagccctcgcccctcccgggtgaagctgtgggctgtaaacaccagtgccttgctcagcctcctggttgcaacagggaggtcttgtctcccctcctgggctttcctcctgccctgtgggcagcagcctaggctgggtcaggggcttccctaagatcttcacctctctgcctccctactgccccaacatagccttgaggaggcttctcagccaccaaagggttctggccccttctcactctcctctcctctcagatggaactctggttattatggtgttagttatcgaataaaaacgacttcagaatgc

SEQ ID NO: 53614 - DNA, 1566 bp, Homo sapiens
  misc_feature (2)..(2): n is a, c, g, or t
  misc_feature (5)..(8): n is a, c, g, or t
gncannnngcctgcctcagcctcgcgagcagctgggactacaggtgcccgccaccacgcccggctaattttttgtatttttagtagagacggggtttcaccgtgttagccaggatggtctcgatttcctgacctcgtgatccgcgcgcctctgcctccaaagtgctgggattacaggcccgagccgccgcacccggcctgcaggtgttgttctgaccccagctccactgtgccagcccgacttgagatgccaagtatcttgggcctgaggattgaggcctagagagaggcaggcgttcctcagagtcacagggaatggcggcgcctggactgggactcagcccagctgcttggcctgaccctctcacagcataatttcccggcacctggaggccgcgcttagaagccgcccagtgccctgagcgtctccatggcctgcctgagcccctcgcagctccagaagttccaacaggatggattcctggtgctggaaggattcttgtctgcggaagagtgtgtggccatgcaacaaaggattggcgagatagtggctgaaatggatgttcctctccactgccgcacagaattctccacccaggaagaggagcagcttcgagcccagggcagcacagactatttcttgagcagtggtgacaagattcgattcttctttgagaaaggcgtttttgatgagaaaggaaatttcctggtccctccggagaaatccatcaacaaaattggccacgctctgcacgcccacgaccccgtcttcaagagcatcacacactccttcaaggtgcagcaacctcactttggcggtgaagtctcccctcatcaggacgcctccttcctgtacacggagcccctgggccgggtgctgggcgtgtggatcgcagtggaggatgccacgctggagaacggctgtctctggttcatccctggctcccacaccagtggtgtgtcaagaaggatggtccgggcccctgttggctcagcgcctggtaccagcttccttgggtcagagccagcccgggataacagcctctttgtgcccaccccagtgcagagaggggccctggtcctcatccatggagaagtggtacacaagagcaagcagaacctctctgaccgctcgcgccaggcctacactttccacctcatggaggcctctggcaccacctggagcccggagaactggctccagccaacagctgaactgccctttccccaactgtacacctaaaggctctcgcagggcaggagccctcgcccctcccgggtgaagctgtgggctgtaaacaccagtgccttgctcagcctcctggttgcaacagggaggtcttgtctcccctcctgggctttcctcctgccctgtgggcagcagcctaggctgggtcaggggcttccctaagatcttcacctctctgcctccctactgccccaacatagccttgaggaggcttctcagccaccaaagggttctggccccttctcactctcctctcctctcagatggaactctggttattatggtgttagttatcgaataaaaacgacttcagaatgc

SEQ ID NO: 53615 - DNA, 247 bp, Homo sapiens
tctcccaaaatgcaggggtaatgtgttttttcctcagacagagcacactttaatttattaggtgtttaattagagttggttttgaattagggtcaggaatttggttagggtttgaattagggtcaaggatcttgttcaggttagggttgattaatttgcagctgcagttactctaatgcaattacactttgcagtgcctggaaagtataatgcttaaaaacacagtcgctagttcctggatggggtt

SEQ ID NO: 53616 - DNA, 149 bp, Homo sapiens
ctggccagctttactgttcctcgggttgctgacacccactgcaatctctgcctcctgtgtgtctctgagtgtcaaatctcccactcctttattttataaggacaccagtcattggatttagagcccactctaaatgcagaatgatctca

SEQ ID NO: 53617 - DNA, 99 bp, Homo sapiens
ggaacatttactttgtaagctaggtcacaaacaaatctcaataaatttcaatgagttggaatcagagtatgttttctgactgcaataaaatcaagctag

SEQ ID NO: 53618 - DNA, 980 bp, Homo sapiens
acacattaatcctgtattattactaagttaatcttcctaattatatcgctttcctgatcagaaatgtttaattcctcaaaatctatcaaattaagtctaaatgtcttatccttggttctgtgtactccatactatgacccacctactcagccttttagaggggagactatttcactcctaccctaagccccaggtaacctgttcttgccacaattcattcgcagcctgtaggtctttgcacagtagcagtagcaatagttacaattatagattaactgctatatatgctgctctaagtacttttaatttttcttaacctcataacctaattcacagtgagaaaactgaggcacagtttaagttaaataattagatcaagaatacacagctagtgactatgcaagcattcaaacccaagcaacccagagcccgtgctctgaatcactacaccacacgcattaacaattccccagacaggaacccaagtgtttatccaagtgacaaggacagattataaatgtgttatagccttctctcagactatttcagagatatgtcaagcaattaaacaaaaagtataatatcataaaactaacttgtgtgtgtaccctgtaggattattctcattttatgggatactttatacatttaaatgcaagatggttgctttggtattacatctcaccgtgaggtttcttggtaggacgctatttggagtacgctatgaagacaaagggaaatgccaaataactaaaaagcaatttaagaaacaataaaatgcctctattaaaaaaaatgttaaataatggtaatgtcatgcttaatttaagccagctaacaggattctgctatttatttatttatttatttatttatttattgagatggagtcttgctgtgttgcccagcggagtgctgtggcgtgatctcagcccactgtaacctctgcctgggcaacagagcaagactctgtctaaagg

SEQ ID NO: 53619 - DNA, 1050 bp, Homo sapiens
gaatgcctggagcatcctggcactctatactctactgagtgcctctcttcagcccctcaccctgcttccacacacacacacacaaaagcaaaggcactgaccagcttggctgcagggcaagctgccttgcagctggatttgcgactttttttttgtcttaaaatttttactggatcagttgtaggggactgtacttcctaagacactgttctcaccttccaacctcacaaatctcttactagatatttggtttttataacaagggtaaagaatcccaggtccctttagcatgcagagtaatggtgatccctccagagccattggcacttcaaagtggtcccagacctgggagattctggtgggatcttccttaaaaataagcaaaaaacctgagtaccctagatgcaattggccatttgtttcaggcccatcagcgaatcagggctccctcctcaaccctactgctacagttccttagctgtatgcctcagccagatccttggggttagggcatgcactcgctgactgtccccacccatccacttgctctgtagtttctgagctttctccatttcacaagtatggtgcctaacgatctttttctttaggattgatgcagttgtttttcctgaaagctaactcagcatctattcataaaaacccttaatagtatacattaggagttttcccaagctctacagtccctcagacattgcatcctaaacagatttgaggcacacaggccaagactccaccaaggcataaatggtcccccctactcccttttgaccagggtatcacttgtgtctctgcagtaagagttggtcaagttgctctacgcaccttggtgctttccagagatctcactccagactgccccaagggtggatagagtatcctgacagccagtgtgcactcatgactgccttaattaacattcttctgctattatggagcctgtccagcaataaacagggtctaggaaggtacaagattagcttccagttaaaatcccattttatattggaatgcatgagctacagatgacag

SEQ ID NO: 53620 - DNA, 390 bp, Homo sapiens
ttgaggtgatgatgaacttggtcacaccacaagtaaagtcagaagtaaggcagaggatgctcagtaggctggtttgatcacctgagatcattaaaaatggctgactgccagctgggcgcagtggctcacacctgtaatcccagcactttgggaggctgaggcaggcagatcacgaggtcaggagatcgagaccatcttggctaacgtggtgaaacgccgtctctactaaaaatacaaaaaattagccaggcgtagtggggggcgcctgtagtcccagctactcgggaggctgaggcaggaaaatggcatgaacccgggaggcggagcttgcagtgagctgagatcgcagcactgcactccagcctgggcaacagagcgagactccatctc

SEQ ID NO: 53621 - DNA, 320 bp, Homo sapiens
aaaacatcactaccttgatgtgagaaccagaccattaagagattgagggccagtggcacaaagacaccctgtggtgaagggaaagaaaggacagtgatgaggtggctgggtcatgtgggcaggtggacaccaagagatgaaaaggccaaggttagcaaggactctagcagggaagctgcggcatcccagggggacacagagggagtagcttcctccaccagctctcatgacaggatgtcctgctcccccagctgttctgtggcacccctgtctgcagagatcttgatggagtttgcacaaggctactttcaatgggaact

SEQ ID NO: 53622 - DNA, 412 bp, Homo sapiens
gctaagtagcctttgcaaataagcaaacatacaatttcaaaaaaaaaggtttcaagggagagatggagaagaatatcgtggaactgtgaaagcagcaattttagtagacaggaagaaccattctttaccgagcactttgagcatccttccacttcagttagcaacttccttcacaaacaaaaacagtgatgttctagccatgatccctctgggttgcgcagggtaacgaggggtcactgggtactcctggcactcgttgagcaggcttgcgaagtcggagcaagcctggcctggcgctaagtaaggatagatgcacttctctgcatgaatcttcggcagctcatgttgcagatagggttaaaggttgtagcggccccgtgttccactagcaaaacatcaaaatgttccttct

SEQ ID NO: 53623 - DNA, 361 bp, Homo sapiens
gtttcggaagaaatgatcagggttagatcacataaagaaagtggtccaattttgttaactttgcatcaattggttaaagtataaaaatttgtcactccatgtagaatgtttgcattctgatttagacaacatctctccagtattttcacttgtgtgtattggaaactgtcttacacagtactgtgaagataggctaagactaaacgggaaatatctgttgaaaatctggcattggattttatctactgatagtcacatttttatatttgactctgggaacaaatctggcctatgcctaaggaggtttgaagccttgacgaaagaactgtagctgactgctgttgattaattacattttcgt

SEQ ID NO: 53624 - DNA, 231 bp, Homo sapiens
tagtagagatggggtttcaccatgttgaccgggctggtctcgaactcctgacctcaggtgatcacctgccttggcctcccaaagtgctgggattacaggcgtgagccaccgcgcctggccttttgtgacttttaatcttgaaggtcacttcgactggaggtaaaaaccttgcttgtgtttttctttcattgaatatctttatttatttttcatttttatttttagagacgg

SEQ ID NO: 53625 - DNA, 282 bp, Homo sapiens
atgtagtgagtggtcgctatgtccaaagtgctgtggacgctgagccaccatgcaaacatgaataagaacagctccttgtttaaatgtgcgcccattcaggtgtcttttctattcatcacagaaagattgagtagaaagctaccaaggtcacccctataaagaaatatttctttacatccattagaatgataacagtaagcgctgacatctcttgagctcctaccatgtgctagccatgattctagactcttgacacatattaactcacaacagccctatgag

SEQ ID NO: 53626 - DNA, 224 bp, Homo sapiens
taatttaaataattgaggaacgacattaaaaaatttaaaagcgacaaaaataaagaactcttccacaattttccagtaattcaattctgcataataattaatatgaaaaaattcatcttttatgtgcaatcataatatgcgaaagaccacaataagatttggccctctgaattgctatcttagtagttgaaaccagctcgatctttcttgtgcattcctccctg

SEQ ID NO: 53627 - DNA, 156 bp, Homo sapiens
attcagctatatgacagaaagtgttaagtgtttggaattccattcttacatttaacacattcagctatatgacagaaagtaaatctatggatatggtattttgtgaatgatcttttaaataaaagaaaaccttacgtaatatttaaaaaaaataaa

SEQ ID NO: 53628 - DNA, 613 bp, Homo sapiens
cttacgtgggagtgctaggggttaggcttttgagcttgaacgcctgcgtgtgaacagatgaaaaatccttcagtacccaagtcccagtctgtcctatggggagcagtttgggggcggccggcagcaggagcctgggaaagaggccctcgccaggtgatggcagggccagggtggcctggggcacccagcggaatgtgcttagtatttggtcaccagccgtcatcctgggcttttcctactgtgtcttgttacaaggcctcagcaatccacagaactctctctccttccttccacctgtcagcttctctgcttctgagataagaaccatttgtgtaacaccaacacttaacttcagaaagacatgcattatgtggtgtaatcaaacccgaggcttttcagatgacctacttacatcttcaatgtggataagataaagaacaaaacacatgcatctaaactgctgggcaatccagttgacttttaaatgtaagaatggaattccaaacacttaacacattcagctatatgacagaaagtaaatctatggatatggtattttgtgaatgatcttttaaataaaagaaaaccttacgtaatatttaaaaaaaataaa

SEQ ID NO: 53629 - DNA, 621 bp, Homo sapiens
cccagcattagcagaccgaaacaggagggaaggaaggagagagagttctgtggattgctgaggccttgtaacaagacacagtaggaaaagcccaggatgacggctggtgagcagtttgggggcggccggcagcaggagcctgggaaagaggccctcgccaggtgatggcagggccagggtggcctggggcacccagcggaatgtgcttagtatttggtcaccagccgtcatcctgggcttttcctactgtgtcttgttacaaggcctcagcaatccacagaactctctctccttccttccacctgtcagcttctctgcttctgagataagaaccatttgtgtaacaccaacacttaacttcagaaagacatgcattatgtggtgtaatcaaacccgaggcttttcagatgacctacttacatcttcaatgtggataagataaagaacaaaacacatgcatctaaactgctgggcaatccagttgacttttaaatgtaagaatggaattccaaacacttaacacattcagctatatgacagaaagtaaatctatggatatggtattttgtgaatgatcttttaaataaaagaaaaccttacgtaatatttaaaaaaaataaa

SEQ ID NO: 53630 - DNA, 520 bp, Homo sapiens
cacggtagattccaaatactaagcacattccgctgggtgccccaggcaccctggccctgcaatcacctggcgagcgctctttcccaggctcctgctgccggccgcccccaaactgctcaccagccgtcatcctgggcttttcctactgtgtcttgttacaaggcctcagcaatccacagaactctctctccttccttccacctgtcagcttctctgcttctgagataagaaccatttgtgtaacaccaacacttaacttcagaaagacatgcattatgtggtgtaatcaaacccgaggcttttcagatgacctacttacatcttcaatgtggataagataaagaacaaaacacatgcatctaaactgctgggcaatccagttgacttttaaatgtaagaatggaattccaaacacttaacacattcagctatatgacagaaagtaaatctatggatatggtattttgtgaatgatcttttaaataaaagaaaaccttacgtaatatttaaaaaaaataaa

SEQ ID NO: 53631 - DNA, 6783 bp, Homo sapiens
cacacttgctggcttgctgggctccactgactggactgaaaacagggccaagaaaactgctgctgcagggggtcctgaaaacagctggaacccggcagtgatgtgggacctaacttgaagttaacctgtggtggtgaggttggaaccagttggattatgatttattttctacactcttgtacggaatgcagagctgttgtatcctgatgaatctactgctaaatatagtcatttggaataattttaagtattgatcttaaaacttgtaccacaacaagagtgtctaaaaagcacggcaagctcattacgttcttacgaacattcatgaagtctcgtccaacaaaacagaagctgaagcagcggggaatcttgaaagagagggtgtttggttgtgacctgggggagcaccttctaaattctggttttgaagtgccgcaggttcttcaaagctgcacagcattcattgagagatatggcatcgtggatggaatctatcgcctttctggtgttgcctccaatatccagagactacgccatgaatttgactctgagcacgtccccgacctgacgaaagaaccgtatgttcaggacatccattctgtgggttccctatgtaagctgtacttccgggaactcccaaaccctctgcttacctaccagctgtatgagaaattttctgatgcagtttcagcagcaacagatgaagaaaggctgataaaaatccacgatgtcatccagcagctccccccaccacactacagaacactggagttcctgatgagacacttgtctcttctagctgactattgttccatcacaaatatgcatgcaaaaaatctagcaattgtttgggctccaaacctgttaagatcaaaacagatagaatctgcctgcttcagtggaacagcagctttcatggaagtgaggattcagtctgtggttgttgagttcatcctgaatcacgttgatgtgctgttcagcggcagaatcagcatggccatgcaagagggggcagcttctctatcaaggcccaagtccctcctggtatcctctccatccaccaaactgctgacattggaagaggcccaggcacgaacacaagctcaggtcaattctccaattgtgacggaaaataaatatatcgaagtaggagaaggacctgctgcacttcaggggaaatttcataccataattgagttcccacttgaaagaaagaggcctcaaaataagatgaaaaagtctcctgtgggtagctggcgttcctttttcaacttggggaaatcatcatctgtttctaaacgaaagctgcagcggaatgagagtgagccttcagagatgaaagccatggctctgaaaggtggcagggcagaaggaaccctccgttcagctaaaagtgaggagtctcttacatctctccatgcagttgatggtgattctaagctcttccgacccagaagacccagatcttccagtgatgcactgtctgcctcttttaatggagaaatgctggggaaccgctgtaactcctatgataatctgcctcatgacaatgagagtgaggaggaaggagggctgcttcatatcccagcccttatgtctcctcattcagctgaggatgttgacttgagcccaccagacattggagtagccagcctggattttgatccaatgtcatttcaatgtagtcctcctaaggccgaatcagaatgtctggagagtggtgcttcctttttagattcaccaggatactccaaggataaaccaagtgccaataaaaaggatgcagaaacaggtagtagccaatgtcagactccaggaagcacagcaagctctgaacctgtctctcctcttcaggagaaactgagtccattctttaccctggacttgagcccaactgaagataaatcatctaagccatcctcctttactgaaaaggtcgtctatgctttctctccgaagataggacggaaattaagcaaatcaccttctatgagcatatctgagccaatttcagtgaccctaccaccacgggtgtcagaagtcattggtacagtctcaaataccacagctcagaatgcatcatcttcaacctgggacaaatgcgttgaagaaagggatgccacaaatagatcccccacccagatagtaaagatgaaaacaaatgagacagttgcccaagaagcatatgaatctgaagtccagcccctggaccaggtggctgctgaagaagtagaattgccagggaaagaggatcagtctgtctcaagcagtcagagtaaggctgtagcttctggacagactcagacaggagcagttacccatgacccccctcaggattccgttcctgtcagttcagtctctcttatcccaccaccaccgcctccgaaaaatgttgcccgaatgttggcgctagcattagctgagtccgcacagcaagcctcaactcagtcattgaagagaccagggacctctcaggctgggtatacaaattatggagacatagcggtggctacaactgaagataatctgtccagttcttactctgcagttgctctagataaggcctatttccaaaccgatcgaccagcagagcagttccacctccagaataatgcaccaggaaactgtgaccatcctctaccagagacaacagctactggggatcctacccattccaacacaactgaatctggggagcaacatcaccaagtagacttaacagggaatcagccacatcaagcatatttatctggggacccagaaaaggccagaattacttcagttcccttagactcagagaagtctgatgatcatgtaagtttccctgaagaccagtctgggaagaacagtatgccaactgtctccttcttggatcaggaccagtctccaccccgtttctacagtggagatcagcctccttcttatcttggtgcaagtgtggataaactccatcaccctttagaatttgcagacaaatctcccacacctcctaatttacctagcgataaaatctaccctccttctgggtcccccgaagagaataccagcacagccaccatgacttacatgacaactactccagcaacagcccaaatgagcaccaaggaagccagctgggatgtggctgaacaacccaccactgctgattttgctgctgccacacttcagcgcacgcacagaactaatcgtccccttccccctccgccttcccagagatctgcagagcagccaccagttgtggggcaggtacaagcagcaaccaatataggattaaataattcccacaaggttcaaggagtagttccagttccagagaggccacctgaacctcgagccatggatgaccctgcgtctgccttcatcagtgacagtggtgctgctgctgctcagtgtcccatggctacagctgtccagccaggcctgcctgagaaagtgcgggacggtgcccgggtcccgctgctgcacctgcgcgccgagtctgtccctgcgcatccctgtggctttcctgcaccactgccccccaccaggatgatggagagtaagatgattgctgccatacactccagcagtgcagatgccaccagcagttcaaattatcattcctttgtcactgcttcatccacctctgtggacgatgcattgcctttaccacttcctgtcccacaacctaagcatgcttctcagaaaacagtttactcctcctttgctaggcccgatgtcaccactgaaccctttggtccagataactgtttgcatttcaatatgactccaaactgccagtaccgtccccagagtgtacctccccatcacaataaattggagcagcaccaagtgtatggtgccaggtcagagccaccagcctccatgggtcttcgttataacacatatgtggccccaggaagaaacgcatctggacaccactccaagccatgcagccgggtcgagtatgtgtcttctttgagctcctctgtcaggaatacctgttaccccgaagacattccaccgtaccctaccatccggagagtgcagtctctccatgctccgccgtcttccatgattcgctctgttcccatttcacggacagaagttcccccagatgatgagccagcctactgcccaagacctctgtaccaatataagccatatcagtcctcccaggcccgctcagattatcatgtcactcagcttcagccttactttgagaatggccgggtccactacaggtatagcccatattccagttcttctagttcctattacagtccagatggggccctgtgtgatgtggatgcctatggcacagtccagttgagaccccttcaccgccttcccaatcgagactttgctttctacaatcctaggctgcaaggaaagagcttgtacagttatgctggtttggctccacgtccccgggccaacgtgactggctatttctctcccaacgaccataatgtagtcagcatgcctccggctgctgatgtgaagcacacctacacctcatgggatcttgaggacatggaaaaataccgcatgcagtccatccggagagagagccgtgctcggcagaaggtgaaagggcctgtcatgtcccaatatgataacatgaccccggcggtgcaggacgacttgggtgggatctatgtcatccatctgcgtagtaaatcagatcctgggaaaactggacttctctcagtggcagaaggaaaggagagccgccatgcagccaaggccatcagtcccgagggagaggaccgcttctataggaggcatcccgaggcagagatggacagagcccaccatcacggaggccatggtagcacgcagccggagaagccatccctgcctcagaagcagagcagcctgaggagcaggaagcttcctgacatgggctgcagtcttcctgagcacagggcacaccaagaagcaagccataggcagttctgtgagtcaaagaatgggcccccttatccccagggagctggccagttagattatgggtccaaagggattccagacacttctgagccagtcagctaccacaactctggagtaaaatatgctgcatccgggcaagaatctttaagactgaaccacaaagaggtaaggctctccaaagagatggagcgaccctgggttaggcagccttctgccccagagaaacactccagagactgctacaaggaggaagaacacctcactcagtcaatcgtcccaccccctaaaccagagaggagtcatagcctcaaactccatcatacccagaacgtggagagggaccccagtgtgctgtaccagtaccaaccacacggcaagcgccagagcagtgtgactgttgtgtcccagtatgataacctggaagattaccactccctgcctcagcaccagcgaggagtctttggagggggcggcatggggacgtatgtgccccctggctttccccatccacagagcaggacctatgctacagcgttgggtcaaggggccttcctgcccgcagagttgtccttgcagcatcctgaaacacagatccatgcagaatgagccctgcgagcaatagagttgaagcagcctctgctggacagtggactgttctatttttttcaataaccaaaaagattaaacaaaaaatactataaaacccctgaccacatttaaaaaatgataataaaagtaaacaaatcagcatctttttccccttccctgcttcattaccccctcttccatctatagactttgtcatttttgtctttagaaaagatctgaaggatggtaaagccccgtgctgaaacccagtagagaaacctgtctcaggacacacttgccatctagggctagcttgaaagagcctgaggactgcctttaactgaatttgaattcagcattgtcctttcttcttagtatttgctgcataattgagagcagttcacatcgatttcctggtaggcgtctgcattccctgttgtgttcctgcttctccttcagtagctgcacaacttgcgcagatcgacacactgttgtcacttcattctccccgtctgagaaggatcttgtgttcagttagagtcgtggaaaaatccctgatccttcaaggtcagtcagacagttggcaacattataattaaaaataagaaattaagactttaaattaaacatttggtagagtcatcataaaacaccagaccacttagactcaggctgaaccatactctttctattcttatttttcatccttgttcctcacggttcagtgaacaggctcatatcatgacagaatggacttttaaaagttagtacttaaggaaacttctttaggtggaagaaagtaaagttcttattgtcagtgaactttattagcaccagaaatctctattgatgcttttaatgcattgcctgccttcaggttttcttcttaccccacccctcaataagatttggtgaattgtaattctagtaaaacatgtcataccattggttttcctaaattatcaactttctttcattaaaaaaaaaaaaaaaaaaaaaagcccagcatggtttgactggatagacacgcataatttattatgaatataaatttccatgtttgtttctgttcctaaaccagagtacgaggtccctgggaatttaagtagctacgcattatctattattagactgcaagttcctgcaataactgcttagttcacagccccgtttcaccagtggagttctgggcagttattgctgtcctaaggcattactgtcgtttgcttactctatacttgtgtggtcacagtcttcttg

SEQ ID NO: 53632 - DNA, 5635 bp, Homo sapiens
tcctgctgtcggtgctgcccatgttatcaagaggtacactgctcgggcccctgacgaactgaccttagaggtgggagacattgtttctgttattgacatgcccccgaaagtgttaagcacatggtggagaggcaagcacggattccaggtgggactcttccctggacactgtgttgagttaattaaccaaaaagttccccagtcagtgaccaactcagtgccaaaaccagtgtctaaaaagcacggcaagctcattacgttcttacgaacattcatgaagtctcgtccaacaaaacagaagctgaagcagcggggaatcttgaaagagagggtgtttggttgtgacctgggggagcaccttctaaattctggttttgaagtgccgcaggttcttcaaagctgcacagcattcattgagagatatggcatcgtggatggaatctatcgcctttctggtgttgcctccaatatccagagactacgccatgaatttgactctgagcacgtccccgacctgacgaaagaaccgtatgttcaggacatccattctgtgggttccctatgtaagctgtacttccgggaactcccaaaccctctgcttacctaccagctgtatgagaaattttctgatgcagtttcagcagcaacagatgaagaaaggctgataaaaatccacgatgtcatccagcagctccccccaccacactacagaacactggagttcctgatgagacacttgtctcttctagctgactattgttccatcacaaatatgcatgcaaaaaatctagcaattgtttgggctccaaacctgttaagatcaaaacagatagaatctgcctgcttcagtggaacagcagctttcatggaagtgaggattcagtctgtggttgttgagttcatcctgaatcacgttgatgtgctgttcagcggcagaatcagcatggccatgcaagagggggcagcttctctatcaaggcccaagtccctcctggtatcctctccatccaccaaactgctgacattggaagaggcccaggcacgaacacaagctcaggtcaattctccaattgtgacggaaaataaatatatcgaagtaggagaaggacctgctgcacttcaggggaaatttcataccataattgagttcccacttgaaagaaagaggcctcaaaataagatgaaaaagtctcctgtgggtagctggcgttcctttttcaacttggggaaatcatcatctgtttctaaacgaaagctgcagcggaatgagagtgagccttcagagatgaaagccatggctctgaaaggtggcagggcagaaggaaccctccgttcagctaaaagtgaggagtctcttacatctctccatgcagttgatggtgattctaagctcttccgacccagaagacccagatcttccagtgatgcactgtctgcctcttttaatggagaaatgctggggaaccgctgtaactcctatgataatctgcctcatgacaatgagagtgaggaggaaggagggctgcttcatatcccagcccttatgtctcctcattcagctgaggatgttgacttgagcccaccagacattggagtagccagcctggattttgatccaatgtcatttcaatgtagtcctcctaaggccgaatcagaatgtctggagagtggtgcttcctttttagattcaccaggatactccaaggataaaccaagtgccaataaaaaggatgcagaaacaggtagtagccaatgtcagactccaggaagcacagcaagctctgaacctgtctctcctcttcaggagaaactgagtccattctttaccctggacttgagcccaactgaagataaatcatctaagccatcctcctttactgaaaaggtcgtctatgctttctctccgaagataggacggaaattaagcaaatcaccttctatgagcatatctgagccaatttcagtgaccctaccaccacgggtgtcagaagtcattggtacagtctcaaataccacagctcagaatgcatcatcttcaacctgggacaaatgcgttgaagaaagggatgccacaaatagatcccccacccagatagtaaagatgaaaacaaatgagacagttgcccaagaagcatatgaatctgaagtccagcccctggaccaggtggctgctgaagaagtagaattgccagggaaagaggatcagtctgtctcaagcagtcagagtaaggctgtagcttctggacagactcagacaggagcagttacccatgacccccctcaggattccgttcctgtcagttcagtctctcttatcccaccaccaccgcctccgaaaaatgttgcccgaatgttggcgctagcattagctgagtccgcacagcaagcctcaactcagtcattgaagagaccagggacctctcaggctgggtatacaaattatggagacatagcggtggctacaactgaagataatctgtccagttcttactctgcagttgctctagataaggcctatttccaaaccgatcgaccagcagagcagttccacctccagaataatgcaccaggaaactgtgaccatcctctaccagagacaacagctactggggatcctacccattccaacacaactgaatctggggagcaacatcaccaagtagacttaacagggaatcagccacatcaagcatatttatctggggacccagaaaaggccagaattacttcagttcccttagactcagagaagtctgatgatcatgtaagtttccctgaagaccagtctgggaagaacagtatgccaactgtctccttcttggatcaggaccagtctccaccccgtttctacagtggagatcagcctccttcttatcttggtgcaagtgtggataaactccatcaccctttagaatttgcagacaaatctcccacacctcctaatttacctagcgataaaatctaccctccttctgggtcccccgaagagaataccagcacagccaccatgacttacatgacaactactccagcaacagcccaaatgagcaccaaggaagccagctgggatgtggctgaacaacccaccactgctgattttgctgctgccacacttcagcgcacgcacagaactaatcgtccccttccccctccgccttcccagagatctgcagagcagccaccagttgtggggcaggtacaagcagcaaccaatataggattaaataattcccacaaggttcaaggagtagttccagttccagagaggccacctgaacctcgagccatggatgaccctgcgtctgccttcatcagtgacagtggtgctgctgctgctcagtgtcccatggctacagctgtccagccaggcctgcctgagaaagtgcgggacggtgcccgggtcccgctgctgcacctgcgcgccgagtctgtccctgcgcatccctgtggctttcctgcaccactgccccccaccaggatgatggagagtaagatgattgctgccatacactccagcagtgcagatgccaccagcagttcaaattatcattcctttgtcactgcttcatccacctctgtggacgatgcattgcctttaccacttcctgtcccacaacctaagcatgcttctcagaaaacagtttactcctcctttgctaggcccgatgtcaccactgaaccctttggtccagataactgtttgcatttcaatatgactccaaactgccagtaccgtccccagagtgtacctccccatcacaataaattggagcagcaccaagtgtatggtgccaggtcagagccaccagcctccatgggtcttcgttataacacatatgtggccccaggaagaaacgcatctggacaccactccaagccatgcagccgggtcgagtatgtgtcttctttgagctcctctgtcaggaatacctgttaccccgaagacattccaccgtaccctaccatccggagagtgcagtctctccatgctccgccgtcttccatgattcgctctgttcccatttcacggacagaagttcccccagatgatgagccagcctactgcccaagacctctgtaccaatataagccatatcagtcctcccaggcccgctcagattatcatgtcactcagcttcagccttactttgagaatggccgggtccactacaggtatagcccatattccagttcttctagttcctattacagtccagatggggccctgtgtgatgtggatgcctatggcacagtccagttgagaccccttcaccgccttcccaatcgagactttgctttctacaatcctaggctgcaaggaaagagcttgtacagttatgctggtttggctccacgtccccgggccaacgtgactggctatttctctcccaacgaccataatgtagtcagcatgcctccggctgctgatgtgaagcacacctacacctcatgggatcttgaggacatggaaaaataccgcatgcagtccatccggagagagagccgtgctcggcagaaggtgaaagggcctgtcatgtcccaatatgataacatgaccccggcggtgcaggacgacttgggtgggatctatgtcatccatctgcgtagtaaatcagatcctgggaaaactggacttctctcagtggcagaaggaaaggagagccgccatgcagccaaggccatcagtcccgagggagaggaccgcttctataggaggcatcccgaggcagagatggacagagcccaccatcacggaggccatggtagcacgcagccggagaagccatccctgcctcagaagcagagcagcctgaggagcaggaagcttcctgacatgggctgcagtcttcctgagcacagggcacaccaagaagcaagccataggcagttctgtgagtcaaagaatgggcccccttatccccagggagctggccagttagattatgggtccaaagggattccagacacttctgagccagtcagctaccacaactctggagtaaaatatgctgcatccgggcaagaatctttaagactgaaccacaaagaggtaaggctctccaaagagatggagcgaccctgggttaggcagccttctgccccagagaaacactccagagactgctacaaggaggaagaacacctcactcagtcaatcgtcccaccccctaaaccagagaggagtcatagcctcaaactccatcatacccagaacgtggagagggaccccagtgtgctgtaccagtaccaaccacacggcaagcgccagagcagtgtgactgttgtgtcccagtatgataacctggaagattaccactccctgcctcagcaccagcgaggagtctttggagggggcggcatggggacgtatgtgccccctggctttccccatccacagagcaggacctatgctacagcgttgggtcaaggggccttcctgcccgcagagttgtccttgcagcatcctgaaacacagatccatgcagaatgagccctgcgagcaatagagttgaagcagcctctgctggacagtggactgttctatttttttcaataaccaaaaagattaaacaaaaaatactataaaacccctgaccacatttaaaaaatgataataaaagtaaacaaatcagca

SEQ ID NO: 53633 - DNA, 3482 bp, Homo sapiens
gaaggcacctattttttaatgatcacatggggagtgtttggctttccatttaggataacgtaagctaccttttcactctcattttttttcccaatttcccactaggagcagttacccatgacccccctcaggattccgttcctgtcagttcagtctctcttatcccaccaccaccgcctccgaaaaatgttgcccgaatgttggcgctagcattagctgagtccgcacagcaagcctcaactcagtcattgaagagaccagggacctctcaggctgggtatacaaattatggagacatagcggtggctacaactgaagataatctgtccagttcttactctgcagttgctctagataaggcctatttccaaaccgatcgaccagcagagcagttccacctccagaataatgcaccaggaaactgtgaccatcctctaccagagacaacagctactggggatcctacccattccaacacaactgaatctggggagcaacatcaccaagtagacttaacagggaatcagccacatcaagcatatttatctggggacccagaaaaggccagaattacttcagttcccttagactcagagaagtctgatgatcatgtaagtttccctgaagaccagtctgggaagaacagtatgccaactgtctccttcttggatcaggaccagtctccaccccgtttctacagtggagatcagcctccttcttatcttggtgcaagtgtggataaactccatcaccctttagaatttgcagacaaatctcccacacctcctaatttacctagcgataaaatctaccctccttctgggtcccccgaagagaataccagcacagccaccatgacttacatgacaactactccagcaacagcccaaatgagcaccaaggaagccagctgggatgtggctgaacaacccaccactgctgattttgctgctgccacacttcagcgcacgcacagaactaatcgtccccttccccctccgccttcccagagatctgcagagcagccaccagttgtggggcaggtacaagcagcaaccaatataggattaaataattcccacaaggttcaaggagtagttccagttccagagaggccacctgaacctcgagccatggatgaccctgcgtctgccttcatcagtgacagtggtgctgctgctgctcagtgtcccatggctacagctgtccagccaggcctgcctgagaaagtgcgggacggtgcccgggtcccgctgctgcacctgcgcgccgagtctgtccctgcgcatccctgtggctttcctgcaccactgccccccaccaggatgatggagagtaagatgattgctgccatacactccagcagtgcagatgccaccagcagttcaaattatcattcctttgtcactgcttcatccacctctgtggacgatgcattgcctttaccacttcctgtcccacaacctaagcatgcttctcagaaaacagtttactcctcctttgctaggcccgatgtcaccactgaaccctttggtccagataactgtttgcatttcaatatgactccaaactgccagtaccgtccccagagtgtacctccccatcacaataaattggagcagcaccaagtgtatggtgccaggtcagagccaccagcctccatgggtcttcgttataacacatatgtggccccaggaagaaacgcatctggacaccactccaagccatgcagccgggtcgagtatgtgtcttctttgagctcctctgtcaggaatacctgttaccccgaagacattccaccgtaccctaccatccggagagtgcagtctctccatgctccgccgtcttccatgattcgctctgttcccatttcacggacagaagttcccccagatgatgagccagcctactgcccaagacctctgtaccaatataagccatatcagtcctcccaggcccgctcagattatcatgtcactcagcttcagccttactttgagaatggccgggtccactacaggtatagcccatattccagttcttctagttcctattacagtccagatggggccctgtgtgatgtggatgcctatggcacagtccagttgagaccccttcaccgccttcccaatcgagactttgctttctacaatcctaggctgcaaggaaagagcttgtacagttatgctggtttggctccacgtccccgggccaacgtgactggctatttctctcccaacgaccataatgtagtcagcatgcctccggctgctgatgtgaagcacacctacacctcatgggatcttgaggacatggaaaaataccgcatgcagtccatccggagagagagccgtgctcggcagaaggtgaaagggcctgtcatgtcccaatatgataacatgaccccggcggtgcaggacgacttgggtgggatctatgtcatccatctgcgtagtaaatcagatcctgggaaaactggacttctctcagtggcagaaggaaaggagagccgccatgcagccaaggccatcagtcccgagggagaggaccgcttctataggaggcatcccgaggcagagatggacagagcccaccatcacggaggccatggtagcacgcagccggagaagccatccctgcctcagaagcagagcagcctgaggagcaggaagcttcctgacatgggctgcagtcttcctgagcacagggcacaccaagaagcaagccataggcagttctgtgagtcaaagaatgggcccccttatccccagggagctggccagttagattatgggtccaaagggattccagacacttctgagccagtcagctaccacaactctggagtaaaatatgctgcatccgggcaagaatctttaagactgaaccacaaagaggtaaggctctccaaagagatggagcgaccctgggttaggcagccttctgccccagagaaacactccagagactgctacaaggaggaagaacacctcactcagtcaatcgtcccaccccctaaaccagagaggagtcatagcctcaaactccatcatacccagaacgtggagagggaccccagtgtgctgtaccagtaccaaccacacggcaagcgccagagcagtgtgactgttgtgtcccagtatgataacctggaagattaccactccctgcctcagcaccagcgaggagtctttggagggggcggcatggggacgtatgtgccccctggctttccccatccacagagcaggacctatgctacagcgttgggtcaaggggccttcctgcccgcagagttgtccttgcagcatcctgaaacacagatccatgcagaatgagccctgcgagcaatagagttgaagcagcctctgctggacagtggactgttctatttttttcaataaccaaaaagattaaacaaaaaatactataaaacccctgaccacatttaaaaaatgataataaaagtaaacaaatcagca

SEQ ID NO: 53634 - DNA, 4315 bp, Homo sapiens
ttggaagtataagagattatagtgccttgggattttttgttactttcctagcattcaccagcagtttgtcccatagtcaggtgcctgtttcaatgagagaatgtagtatgcagaatgctaaggtttcttcctgaatttcctcatattttaagaaagtgccacaggttgtttttcttctatatggtcaccttgaactattaataggacttaagattttagaccttagtggaggatgctgtgtttactgcttctcaaggatagcatgttttcagtatgaggattatctttggccagactaaggtggaatcaaaggtaggagagaggcagtagcttctgatttgaatattgcctttccctatgtttgaagccctaaaactgctaactgtgtacaactgtgaatttcaaaagtctccccagatgatagaattaactcttaatttaacaagatgtcctttgtgttgagactgagctagactaatagaccgggtatgtatttttaagctctacagcattacttgactaaacctctcttttggtttgtatattaaaattatgccataggcaacctcatctcgcatttaaaacctctcataaattagaaaactttgaatggttctccaaagataatactgggtgttgtacaaaatagcagcacaagccttcttttcctagaaatgggtacagattcattgcaaccacatggcttgggaaagttcaagctgctacccaaccagccttaatttgtgagttacaaatttaatagtacttgattcatagagggaacaaaaaatagacccatagtattatcatctttcaataggttcaaggagtagttccagttccagagaggccacctgaacctcgagccatggatgaccctgcgtctgccttcatcagtgacagtggtgctgctgctgctcagtgtcccatggctacagctgtccagccaggcctgcctgagaaagtgcgggacggtgcccgggtcccgctgctgcacctgcgcgccgagtctgtccctgcgcatccctgtggctttcctgcaccactgccccccaccaggatgatggagagtaagatgattgctgccatacactccagcagtgcagatgccaccagcagttcaaattatcattcctttgtcactgcttcatccacctctgtggacgatgcattgcctttaccacttcctgtcccacaacctaagcatgcttctcagaaaacagtttactcctcctttgctaggcccgatgtcaccactgaaccctttggtccagataactgtttgcatttcaatatgactccaaactgccagtaccgtccccagagtgtacctccccatcacaataaattggagcagcaccaagtgtatggtgccaggtcagagccaccagcctccatgggtcttcgttataacacatatgtggccccaggaagaaacgcatctggacaccactccaagccatgcagccgggtcgagtatgtgtcttctttgagctcctctgtcaggaatacctgttaccccgaagacattccaccgtaccctaccatccggagagtgcagtctctccatgctccgccgtcttccatgattcgctctgttcccatttcacggacagaagttcccccagatgatgagccagcctactgcccaagacctctgtaccaatataagccatatcagtcctcccaggcccgctcagattatcatgtcactcagcttcagccttactttgagaatggccgggtccactacaggtatagcccatattccagttcttctagttcctattacagtccagatggggccctgtgtgatgtggatgcctatggcacagtccagttgagaccccttcaccgccttcccaatcgagactttgctttctacaatcctaggctgcaaggaaagagcttgtacagttatgctggtttggctccacgtccccgggccaacgtgactggctatttctctcccaacgaccataatgtagtcagcatgcctccggctgctgatgtgaagcacacctacacctcatgggatcttgaggacatggaaaaataccgcatgcagtccatccggagagagagccgtgctcggcagaaggtgaaagggcctgtcatgtcccaatatgataacatgaccccggcggtgcaggacgacttgggtgggatctatgtcatccatctgcgtagtaaatcagatcctgggaaaactggacttctctcagtggcagaaggaaaggagagccgccatgcagccaaggccatcagtcccgagggagaggaccgcttctataggaggcatcccgaggcagagatggacagagcccaccatcacggaggccatggtagcacgcagccggagaagccatccctgcctcagaagcagagcagcctgaggagcaggaagcttcctgacatgggctgcagtcttcctgagcacagggcacaccaagaagcaagccataggcagttctgtgagtcaaagaatgggcccccttatccccagggagctggccagttagattatgggtccaaagggattccagacacttctgagccagtcagctaccacaactctggagtaaaatatgctgcatccgggcaagaatctttaagactgaaccacaaagaggtaaggctctccaaagagatggagcgaccctgggttaggcagccttctgccccagagaaacactccagagactgctacaaggaggaagaacacctcactcagtcaatcgtcccaccccctaaaccagagaggagtcatagcctcaaactccatcatacccagaacgtggagagggaccccagtgtgctgtaccagtaccaaccacacggcaagcgccagagcagtgtgactgttgtgtcccagtatgataacctggaagattaccactccctgcctcagcaccagcgaggagtctttggagggggcggcatggggacgtatgtgccccctggctttccccatccacagagcaggacctatgctacagcgttgggtcaaggggccttcctgcccgcagagttgtccttgcagcatcctgaaacacagatccatgcagaatgagccctgcgagcaatagagttgaagcagcctctgctggacagtggactgttctatttttttcaataaccaaaaagattaaacaaaaaatactataaaacccctgaccacatttaaaaaatgataataaaagtaaacaaatcagcatctttttccccttccctgcttcattaccccctcttccatctatagactttgtcatttttgtctttagaaaagatctgaaggatggtaaagccccgtgctgaaacccagtagagaaacctgtctcaggacacacttgccatctagggctagcttgaaagagcctgaggactgcctttaactgaatttgaattcagcattgtcctttcttcttagtatttgctgcataattgagagcagttcacatcgatttcctggtaggcgtctgcattccctgttgtgttcctgcttctccttcagtagctgcacaacttgcgcagatcgacacactgttgtcacttcattctccccgtctgagaaggatcttgtgttcagttagagtcgtggaaaaatccctgatccttcaaggtcagtcagacagttggcaacattataattaaaaataagaaattaagactttaaattaaacatttggtagagtcatcataaaacaccagaccacttagactcaggctgaaccatactctttctattcttatttttcatccttgttcctcacggttcagtgaacaggctcatatcatgacagaatggacttttaaaagttagtacttaaggaaacttctttaggtggaagaaagtaaagttcttattgtcagtgaactttattagcaccagaaatctctattgatgcttttaatgcattgcctgccttcaggttttcttcttaccccacccctcaataagatttggtgaattgtaattctagtaaaacatgtcataccattggttttcctaaattatcaactttctttcattaaaaaaaaaaaaaaaaaaaaaagcccagcatggtttgactggatagacacgcataatttattatgaatataaatttccatgtttgtttctgttcctaaaccagagtacgaggtccctgggaatttaagtagctacgcattatctattattagactgcaagttcctgcaataactgcttagttcacagccccgtttcaccagtggagttctgggcagttattgctgtcctaaggcattactgtcgtttgcttactctatacttgtgtggtcacagtcttcttg

SEQ ID NO: 53635 - DNA, 4004 bp, Homo sapiens
tatatgaaatgtaattcttattttataaataatgtgatgtaaatgtaactggtgccccctccccgatgtgactgagggtgagtgagtggtggcggggctgctccttcccacccctcagaacagctctgatcctcgttaatacctggctgcgtgtgcagctgaggagggagtgaacctcaagcctaaatacctgttaggattggagggtctgggtgggcctgggcctagcaatcaagcttctacctgtaccttatgtaaggtagaccctcctagctcaggtactgacactaggagcttctacctgtaccttatgtaaggtagaccctcctagtgtcagtacctgagctagtttacctcagttccgcaggcaggacagcggtccgggaaccctgagtgagaatgagtgtggatgtgtacagacacgcctggacggcagcgggaggctgggactttccattacaaatagagactcaacaggaatgaagtctggattaaataattcccacaaggttcaaggagtagttccagttccagagaggccacctgaacctcgagccatggatgaccctgcgtctgccttcatcagtgacagtggtgctgctgctgctcagtgtcccatggctacagctgtccagccaggcctgcctgagaaagtgcgggacggtgcccgggtcccgctgctgcacctgcgcgccgagtctgtccctgcgcatccctgtggctttcctgcaccactgccccccaccaggatgatggagagtaagatgattgctgccatacactccagcagtgcagatgccaccagcagttcaaattatcattcctttgtcactgcttcatccacctctgtggacgatgcattgcctttaccacttcctgtcccacaacctaagcatgcttctcagaaaacagtttactcctcctttgctaggcccgatgtcaccactgaaccctttggtccagataactgtttgcatttcaatatgactccaaactgccagtaccgtccccagagtgtacctccccatcacaataaattggagcagcaccaagtgtatggtgccaggtcagagccaccagcctccatgggtcttcgttataacacatatgtggccccaggaagaaacgcatctggacaccactccaagccatgcagccgggtcgagtatgtgtcttctttgagctcctctgtcaggaatacctgttaccccgaagacattccaccgtaccctaccatccggagagtgcagtctctccatgctccgccgtcttccatgattcgctctgttcccatttcacggacagaagttcccccagatgatgagccagcctactgcccaagacctctgtaccaatataagccatatcagtcctcccaggcccgctcagattatcatgtcactcagcttcagccttactttgagaatggccgggtccactacaggtatagcccatattccagttcttctagttcctattacagtccagatggggccctgtgtgatgtggatgcctatggcacagtccagttgagaccccttcaccgccttcccaatcgagactttgctttctacaatcctaggctgcaaggaaagagcttgtacagttatgctggtttggctccacgtccccgggccaacgtgactggctatttctctcccaacgaccataatgtagtcagcatgcctccggctgctgatgtgaagcacacctacacctcatgggatcttgaggacatggaaaaataccgcatgcagtccatccggagagagagccgtgctcggcagaaggtgaaagggcctgtcatgtcccaatatgataacatgaccccggcggtgcaggacgacttgggtgggatctatgtcatccatctgcgtagtaaatcagatcctgggaaaactggacttctctcagtggcagaaggaaaggagagccgccatgcagccaaggccatcagtcccgagggagaggaccgcttctataggaggcatcccgaggcagagatggacagagcccaccatcacggaggccatggtagcacgcagccggagaagccatccctgcctcagaagcagagcagcctgaggagcaggaagcttcctgacatgggctgcagtcttcctgagcacagggcacaccaagaagcaagccataggcagttctgtgagtcaaagaatgggcccccttatccccagggagctggccagttagattatgggtccaaagggattccagacacttctgagccagtcagctaccacaactctggagtaaaatatgctgcatccgggcaagaatctttaagactgaaccacaaagaggtaaggctctccaaagagatggagcgaccctgggttaggcagccttctgccccagagaaacactccagagactgctacaaggaggaagaacacctcactcagtcaatcgtcccaccccctaaaccagagaggagtcatagcctcaaactccatcatacccagaacgtggagagggaccccagtgtgctgtaccagtaccaaccacacggcaagcgccagagcagtgtgactgttgtgtcccagtatgataacctggaagattaccactccctgcctcagcaccagcgaggagtctttggagggggcggcatggggacgtatgtgccccctggctttccccatccacagagcaggacctatgctacagcgttgggtcaaggggccttcctgcccgcagagttgtccttgcagcatcctgaaacacagatccatgcagaatgagccctgcgagcaatagagttgaagcagcctctgctggacagtggactgttctatttttttcaataaccaaaaagattaaacaaaaaatactataaaacccctgaccacatttaaaaaatgataataaaagtaaacaaatcagcatctttttccccttccctgcttcattaccccctcttccatctatagactttgtcatttttgtctttagaaaagatctgaaggatggtaaagccccgtgctgaaacccagtagagaaacctgtctcaggacacacttgccatctagggctagcttgaaagagcctgaggactgcctttaactgaatttgaattcagcattgtcctttcttcttagtatttgctgcataattgagagcagttcacatcgatttcctggtaggcgtctgcattccctgttgtgttcctgcttctccttcagtagctgcacaacttgcgcagatcgacacactgttgtcacttcattctccccgtctgagaaggatcttgtgttcagttagagtcgtggaaaaatccctgatccttcaaggtcagtcagacagttggcaacattataattaaaaataagaaattaagactttaaattaaacatttggtagagtcatcataaaacaccagaccacttagactcaggctgaaccatactctttctattcttatttttcatccttgttcctcacggttcagtgaacaggctcatatcatgacagaatggacttttaaaagttagtacttaaggaaacttctttaggtggaagaaagtaaagttcttattgtcagtgaactttattagcaccagaaatctctattgatgcttttaatgcattgcctgccttcaggttttcttcttaccccacccctcaataagatttggtgaattgtaattctagtaaaacatgtcataccattggttttcctaaattatcaactttctttcattaaaaaaaaaaaaaaaaaaaaaagcccagcatggtttgactggatagacacgcataatttattatgaatataaatttccatgtttgtttctgttcctaaaccagagtacgaggtccctgggaatttaagtagctacgcattatctattattagactgcaagttcctgcaataactgcttagttcacagccccgtttcaccagtggagttctgggcagttattgctgtcctaaggcattactgtcgtttgcttactctatacttgtgtggtcacagtcttcttg

SEQ ID NO: 53636 - DNA, 6679 bp, Homo sapiens
tcctgctgtcggtgctgcccatgttatcaagaggtacactgctcgggcccctgacgaactgaccttagaggtgggagacattgtttctgttattgacatgcccccgaaagtgttaagcacatggtggagaggcaagcacggattccaggtgggactcttccctggacactgtgttgagttaattaaccaaaaagttccccagtcagtgaccaactcagtgccaaaaccagtgtctaaaaagcacggcaagctcattacgttcttacgaacattcatgaagtctcgtccaacaaaacagaagctgaagcagcggggaatcttgaaagagagggtgtttggttgtgacctgggggagcaccttctaaattctggttttgaagtgccgcaggttcttcaaagctgcacagcattcattgagagatatggcatcgtggatggaatctatcgcctttctggtgttgcctccaatatccagagactacgccatgaatttgactctgagcacgtccccgacctgacgaaagaaccgtatgttcaggacatccattctgtgggttccctatgtaagctgtacttccgggaactcccaaaccctctgcttacctaccagctgtatgagaaattttctgatgcagtttcagcagcaacagatgaagaaaggctgataaaaatccacgatgtcatccagcagctccccccaccacactacagaacactggagttcctgatgagacacttgtctcttctagctgactattgttccatcacaaatatgcatgcaaaaaatctagcaattgtttgggctccaaacctgttaagatcaaaacagatagaatctgcctgcttcagtggaacagcagctttcatggaagtgaggattcagtctgtggttgttgagttcatcctgaatcacgttgatgtgctgttcagcggcagaatcagcatggccatgcaagagggggcagcttctctatcaaggcccaagtccctcctggtatcctctccatccaccaaactgctgacattggaagaggcccaggcacgaacacaagctcaggtcaattctccaattgtgacggaaaataaatatatcgaagtaggagaaggacctgctgcacttcaggggaaatttcataccataattgagttcccacttgaaagaaagaggcctcaaaataagatgaaaaagtctcctgtgggtagctggcgttcctttttcaacttggggaaatcatcatctgtttctaaacgaaagctgcagcggaatgagagtgagccttcagagatgaaagccatggctctgaaaggtggcagggcagaaggaaccctccgttcagctaaaagtgaggagtctcttacatctctccatgcagttgatggtgattctaagctcttccgacccagaagacccagatcttccagtgatgcactgtctgcctcttttaatggagaaatgctggggaaccgctgtaactcctatgataatctgcctcatgacaatgagagtgaggaggaaggagggctgcttcatatcccagcccttatgtctcctcattcagctgaggatgttgacttgagcccaccagacattggagtagccagcctggattttgatccaatgtcatttcaatgtagtcctcctaaggccgaatcagaatgtctggagagtggtgcttcctttttagattcaccaggatactccaaggataaaccaagtgccaataaaaaggatgcagaaacaggtagtagccaatgtcagactccaggaagcacagcaagctctgaacctgtctctcctcttcaggagaaactgagtccattctttaccctggacttgagcccaactgaagataaatcatctaagccatcctcctttactgaaaaggtcgtctatgctttctctccgaagataggacggaaattaagcaaatcaccttctatgagcatatctgagccaatttcagtgaccctaccaccacgggtgtcagaagtcattggtacagtctcaaataccacagctcagaatgcatcatcttcaacctgggacaaatgcgttgaagaaagggatgccacaaatagatcccccacccagatagtaaagatgaaaacaaatgagacagttgcccaagaagcatatgaatctgaagtccagcccctggaccaggtggctgctgaagaagtagaattgccagggaaagaggatcagtctgtctcaagcagtcagagtaaggctgtagcttctggacagactcagacaggagcagttacccatgacccccctcaggattccgttcctgtcagttcagtctctcttatcccaccaccaccgcctccgaaaaatgttgcccgaatgttggcgctagcattagctgagtccgcacagcaagcctcaactcagtcattgaagagaccagggacctctcaggctgggtatacaaattatggagacatagcggtggctacaactgaagataatctgtccagttcttactctgcagttgctctagataaggcctatttccaaaccgatcgaccagcagagcagttccacctccagaataatgcaccaggaaactgtgaccatcctctaccagagacaacagctactggggatcctacccattccaacacaactgaatctggggagcaacatcaccaagtagacttaacagggaatcagccacatcaagcatatttatctggggacccagaaaaggccagaattacttcagttcccttagactcagagaagtctgatgatcatgtaagtttccctgaagaccagtctgggaagaacagtatgccaactgtctccttcttggatcaggaccagtctccaccccgtttctacagtggagatcagcctccttcttatcttggtgcaagtgtggataaactccatcaccctttagaatttgcagacaaatctcccacacctcctaatttacctagcgataaaatctaccctccttctgggtcccccgaagagaataccagcacagccaccatgacttacatgacaactactccagcaacagcccaaatgagcaccaaggaagccagctgggatgtggctgaacaacccaccactgctgattttgctgctgccacacttcagcgcacgcacagaactaatcgtccccttccccctccgccttcccagagatctgcagagcagccaccagttgtggggcaggtacaagcagcaaccaatataggattaaataattcccacaaggttcaaggagtagttccagttccagagaggccacctgaacctcgagccatggatgaccctgcgtctgccttcatcagtgacagtggtgctgctgctgctcagtgtcccatggctacagctgtccagccaggcctgcctgagaaagtgcgggacggtgcccgggtcccgctgctgcacctgcgcgccgagtctgtccctgcgcatccctgtggctttcctgcaccactgccccccaccaggatgatggagagtaagatgattgctgccatacactccagcagtgcagatgccaccagcagttcaaattatcattcctttgtcactgcttcatccacctctgtggacgatgcattgcctttaccacttcctgtcccacaacctaagcatgcttctcagaaaacagtttactcctcctttgctaggcccgatgtcaccactgaaccctttggtccagataactgtttgcatttcaatatgactccaaactgccagtaccgtccccagagtgtacctccccatcacaataaattggagcagcaccaagtgtatggtgccaggtcagagccaccagcctccatgggtcttcgttataacacatatgtggccccaggaagaaacgcatctggacaccactccaagccatgcagccgggtcgagtatgtgtcttctttgagctcctctgtcaggaatacctgttaccccgaagacattccaccgtaccctaccatccggagagtgcagtctctccatgctccgccgtcttccatgattcgctctgttcccatttcacggacagaagttcccccagatgatgagccagcctactgcccaagacctctgtaccaatataagccatatcagtcctcccaggcccgctcagattatcatgtcactcagcttcagccttactttgagaatggccgggtccactacaggtatagcccatattccagttcttctagttcctattacagtccagatggggccctgtgtgatgtggatgcctatggcacagtccagttgagaccccttcaccgccttcccaatcgagactttgctttctacaatcctaggctgcaaggaaagagcttgtacagttatgctggtttggctccacgtccccgggccaacgtgactggctatttctctcccaacgaccataatgtagtcagcatgcctccggctgctgatgtgaagcacacctacacctcatgggatcttgaggacatggaaaaataccgcatgcagtccatccggagagagagccgtgctcggcagaaggtgaaagggcctgtcatgtcccaatatgataacatgaccccggcggtgcaggacgacttgggtgggatctatgtcatccatctgcgtagtaaatcagatcctgggaaaactggacttctctcagtggcagaaggaaaggagagccgccatgcagccaaggccatcagtcccgagggagaggaccgcttctataggaggcatcccgaggcagagatggacagagcccaccatcacggaggccatggtagcacgcagccggagaagccatccctgcctcagaagcagagcagcctgaggagcaggaagcttcctgacatgggctgcagtcttcctgagcacagggcacaccaagaagcaagccataggcagttctgtgagtcaaagaatgggcccccttatccccagggagctggccagttagattatgggtccaaagggattccagacacttctgagccagtcagctaccacaactctggagtgctctccaaagagatggagcgaccctgggttaggcagccttctgccccagagaaacactccagagactgctacaaggaggaagaacacctcactcagtcaatcgtcccaccccctaaaccagagaggagtcatagcctcaaactccatcatacccagaacgtggagagggaccccagtgtgctgtaccagtaccaaccacacggcaagcgccagagcagtgtgactgttgtgtcccagtatgataacctggaagattaccactccctgcctcagcaccagcgaggagtctttggagggggcggcatggggacgtatgtgccccctggctttccccatccacagagcaggacctatgctacagcgttgggtcaaggggccttcctgcccgcagagttgtccttgcagcatcctgaaacacagatccatgcagaatgagccctgcgagcaatagagttgaagcagcctctgctggacagtggactgttctatttttttcaataaccaaaaagattaaacaaaaaatactataaaacccctgaccacatttaaaaaatgataataaaagtaaacaaatcagcatctttttccccttccctgcttcattaccccctcttccatctatagactttgtcatttttgtctttagaaaagatctgaaggatggtaaagccccgtgctgaaacccagtagagaaacctgtctcaggacacacttgccatctagggctagcttgaaagagcctgaggactgcctttaactgaatttgaattcagcattgtcctttcttcttagtatttgctgcataattgagagcagttcacatcgatttcctggtaggcgtctgcattccctgttgtgttcctgcttctccttcagtagctgcacaacttgcgcagatcgacacactgttgtcacttcattctccccgtctgagaaggatcttgtgttcagttagagtcgtggaaaaatccctgatccttcaaggtcagtcagacagttggcaacattataattaaaaataagaaattaagactttaaattaaacatttggtagagtcatcataaaacaccagaccacttagactcaggctgaaccatactctttctattcttatttttcatccttgttcctcacggttcagtgaacaggctcatatcatgacagaatggacttttaaaagttagtacttaaggaaacttctttaggtggaagaaagtaaagttcttattgtcagtgaactttattagcaccagaaatctctattgatgcttttaatgcattgcctgccttcaggttttcttcttaccccacccctcaataagatttggtgaattgtaattctagtaaaacatgtcataccattggttttcctaaattatcaactttctttcattaaaaaaaaaaaaaaaaaaaaaagcccagcatggtttgactggatagacacgcataatttattatgaatataaatttccatgtttgtttctgttcctaaaccagagtacgaggtccctgggaatttaagtagctacgcattatctattattagactgcaagttcctgcaataactgcttagttcacagccccgtttcaccagtggagttctgggcagttattgctgtcctaaggcattactgtcgtttgcttactctatacttgtgtggtcacagtcttcttg

SEQ ID NO: 53637 - DNA, 4667 bp, Homo sapiens
tcctgctgtcggtgctgcccatgttatcaagaggtacactgctcgggcccctgacgaactgaccttagaggtgggagacattgtttctgttattgacatgcccccgaaagtgttaagcacatggtggagaggcaagcacggattccaggtgggactcttccctggacactgtgttgagttaattaaccaaaaagttccccagtcagtgaccaactcagtgccaaaaccagtgtctaaaaagcacggcaagctcattacgttcttacgaacattcatgaagtctcgtccaacaaaacagaagctgaagcagcggggaatcttgaaagagagggtgtttggttgtgacctgggggagcaccttctaaattctggttttgaagtgccgcaggttcttcaaagctgcacagcattcattgagagatatggcatcgtggatggaatctatcgcctttctggtgttgcctccaatatccagagactacgccatgaatttgactctgagcacgtccccgacctgacgaaagaaccgtatgttcaggacatccattctgtgggttccctatgtaagctgtacttccgggaactcccaaaccctctgcttacctaccagctgtatgagaaattttctgatgcagtttcagcagcaacagatgaagaaaggctgataaaaatccacgatgtcatccagcagctccccccaccacactacagaacactggagttcctgatgagacacttgtctcttctagctgactattgttccatcacaaatatgcatgcaaaaaatctagcaattgtttgggctccaaacctgttaagatcaaaacagatagaatctgcctgcttcagtggaacagcagctttcatggaagtgaggattcagtctgtggttgttgagttcatcctgaatcacgttgatgtgctgttcagcggcagaatcagcatggccatgcaagagggggcagcttctctatcaaggcccaagtccctcctggtatcctctccatccaccaaactgctgacattggaagaggcccaggcacgaacacaagctcaggtcaattctccaattgtgacggaaaataaatatatcgaagtaggagaaggacctgctgcacttcaggggaaatttcataccataattgagttcccacttgaaagaaagaggcctcaaaataagatgaaaaagtctcctgtgggtagctggcgttcctttttcaacttggggaaatcatcatctgtttctaaacgaaagctgcagcggaatgagagtgagccttcagagatgaaagccatggctctgaaaggtggcagggcagaaggaaccctccgttcagctaaaagtgaggagtctcttacatctctccatgcagttgatggtgattctaagctcttccgacccagaagacccagatcttccagtgatgcactgtctgcctcttttaatggagaaatgctggggaaccgctgtaactcctatgataatctgcctcatgacaatgagagtgaggaggaaggagggctgcttcatatcccagcccttatgtctcctcattcagctgaggatgttgacttgagcccaccagacattggagtagccagcctggattttgatccaatgtcatttcaatgtagtcctcctaaggccgaatcagaatgtctggagagtggtgcttcctttttagattcaccaggatactccaaggataaaccaagtgccaataaaaaggatgcagaaacaggtagtagccaatgtcagactccaggaagcacagcaagctctgaacctgtctctcctcttcaggagaaactgagtccattctttaccctggacttgagcccaactgaagataaatcatctaagccatcctcctttactgaaaaggtcgtctatgctttctctccgaagataggacggaaattaagcaaatcaccttctatgagcatatctgagccaatttcagtgaccctaccaccacgggtgtcagaagtcattggtacagtctcaaataccacagctcagaatgcatcatcttcaacctgggacaaatgcgttgaagaaagggatgccacaaatagatcccccacccagatagtaaagatgaaaacaaatgagacagttgcccaagaagcatatgaatctgaagtccagcccctggaccaggtggctgctgaagaagtagaattgccagggaaagaggatcagtctgtctcaagcagtcagagtaaggctgtagcttctggacagactcagacaggagcagttacccatgacccccctcaggattccgttcctgtcagttcagtctctcttatcccaccaccaccgcctccgaaaaatgttgcccgaatgttggcgctagcattagctgagtccgcacagcaagcctcaactcagtcattgaagagaccagggacctctcaggctgggtatacaaattatggagacatagcggtggctacaactgaagataatctgtccagttcttactctgcagttgctctagataaggcctatttccaaaccgatcgaccagcagagcagttccacctccagaataatgcaccaggaaactgtgaccatcctctaccagagacaacagctactggggatcctacccattccaacacaactgaatctggggagcaacatcaccaagtagacttaacagggaatcagccacatcaagcatatttatctggggacccagaaaaggccagaattacttcagttcccttagactcagagaagtctgatgatcatgtaagtttccctgaagaccagtctgggaagaacagtatgccaactgtctccttcttggatcaggaccagtctccaccccgtttctacagtggagatcagcctccttcttatcttggtgcaagtgtggataaactccatcaccctttagaatttgcagacaaatctcccacacctcctaatttacctagcgataaaatctaccctccttctgggtcccccgaagagaataccagcacagccaccatgacttacatgacaactactccagcaacagcccaaatgagcaccaaggaagccagctgggatgtggctgaacaacccaccactgctgattttgctgctgccacacttcagcgcacgcacagaactaatcgtccccttccccctccgccttcccagagatctgcagagcagccaccagttgtggggcaggtacaagcagcaaccaatataggattaaataattcccacaaggttcaaggagtagttccagttccagagaggccacctgaacctcgagccatggatgaccctgcgtctgccttcatcagtgacagtggtgctgctgctgctcagtgtcccatggctacagctgtccagccaggcctgcctgagaaagtgcgggacggtgcccgggtcccgctgctgcacctgcgcgccgagtctgtccctgcgcatccctgtggctttcctgcaccactgccccccaccaggatgatggagagtaagatgattgctgccatacactccagcagtgcagatgccaccagcagttcaaattatcattcctttgtcactgcttcatccacctctgtggacgatgcattgcctttaccacttcctgtcccacaacctaagcatgcttctcagaaaacagtttactcctcctttgctaggcccgatgtcaccactgaaccctttggtccagataactgtttgcatttcaatatgactccaaactgccagtaccgtccccagagtgtacctccccatcacaataaattggagcagcaccaagtgtatggtgccaggtcagagccaccagcctccatgggtcttcgttataacacatatgtggccccaggaagaaacgcatctggacaccactccaagccatgcagccgggtcgagtatgtgtcttctttgagctcctctgtcaggaatacctgttaccccgaagacattccaccgtaccctaccatccggagagtgcagtctctccatgctccgccgtcttccatgattcgctctgttcccatttcacggacagaagttcccccagatgatgagccagcctactgcccaagacctctgtaccaatataagccatatcagtcctcccaggcccgctcagattatcatgtcactcagcttcagccttactttgagaatggccgggtccactacaggtatagcccatattccagttcttctagttcctattacagtccagatggggccctgtgtgatgtggatgcctatggcacagtccagttgagaccccttcaccgccttcccaatcgagactttgctttctacaatcctaggctgcaaggaaagagcttgtacagttatgctggtttggctccacgtccccgggccaacgtgactggctatttctctcccaacgaccataatgtagtcagcatgcctccggctgctgatgtgaagcacacctacacctcatgggatcttgaggacatggaaaaataccgcatgcagtccatccggagagagagccgtgctcggcagaaggtgaaagggcctgtcatgtcccaatatgataacatgaccccggcggtgcaggacgacttgggtgggatctatgtcatccatctgcgtagtaaacacatcgatccatgatttacaatttcgagctcgtatccagtcgacctgcagcatg

SEQ ID NO: 53638 - DNA, 4577 bp, Homo sapiens
  misc_feature (4574)..(4574): n is a, c, g, or t
tcctgctgtcggtgctgcccatgttatcaagaggtacactgctcgggcccctgacgaactgaccttagaggtgggagacattgtttctgttattgacatgcccccgaaagtgttaagcacatggtggagaggcaagcacggattccaggtgggactcttccctggacactgtgttgagttaattaaccaaaaagttccccagtcagtgaccaactcagtgccaaaaccagtgtctaaaaagcacggcaagctcattacgttcttacgaacattcatgaagtctcgtccaacaaaacagaagctgaagcagcggggaatcttgaaagagagggtgtttggttgtgacctgggggagcaccttctaaattctggttttgaagtgccgcaggttcttcaaagctgcacagcattcattgagagatatggcatcgtggatggaatctatcgcctttctggtgttgcctccaatatccagagactacgccatgaatttgactctgagcacgtccccgacctgacgaaagaaccgtatgttcaggacatccattctgtgggttccctatgtaagctgtacttccgggaactcccaaaccctctgcttacctaccagctgtatgagaaattttctgatgcagtttcagcagcaacagatgaagaaaggctgataaaaatccacgatgtcatccagcagctccccccaccacactacagaacactggagttcctgatgagacacttgtctcttctagctgactattgttccatcacaaatatgcatgcaaaaaatctagcaattgtttgggctccaaacctgttaagatcaaaacagatagaatctgcctgcttcagtggaacagcagctttcatggaagtgaggattcagtctgtggttgttgagttcatcctgaatcacgttgatgtgctgttcagcggcagaatcagcatggccatgcaagagggggcagcttctctatcaaggcccaagtccctcctggtatcctctccatccaccaaactgctgacattggaagaggcccaggcacgaacacaagctcaggtcaattctccaattgtgacggaaaataaatatatcgaagtaggagaaggacctgctgcacttcaggggaaatttcataccataattgagttcccacttgaaagaaagaggcctcaaaataagatgaaaaagtctcctgtgggtagctggcgttcctttttcaacttggggaaatcatcatctgtttctaaacgaaagctgcagcggaatgagagtgagccttcagagatgaaagccatggctctgaaaggtggcagggcagaaggaaccctccgttcagctaaaagtgaggagtctcttacatctctccatgcagttgatggtgattctaagctcttccgacccagaagacccagatcttccagtgatgcactgtctgcctcttttaatggagaaatgctggggaaccgctgtaactcctatgataatctgcctcatgacaatgagagtgaggaggaaggagggctgcttcatatcccagcccttatgtctcctcattcagctgaggatgttgacttgagcccaccagacattggagtagccagcctggattttgatccaatgtcatttcaatgtagtcctcctaaggccgaatcagaatgtctggagagtggtgcttcctttttagattcaccaggatactccaaggataaaccaagtgccaataaaaaggatgcagaaacaggtagtagccaatgtcagactccaggaagcacagcaagctctgaacctgtctctcctcttcaggagaaactgagtccattctttaccctggacttgagcccaactgaagataaatcatctaagccatcctcctttactgaaaaggtcgtctatgctttctctccgaagataggacggaaattaagcaaatcaccttctatgagcatatctgagccaatttcagtgaccctaccaccacgggtgtcagaagtcattggtacagtctcaaataccacagctcagaatgcatcatcttcaacctgggacaaatgcgttgaagaaagggatgccacaaatagatcccccacccagatagtaaagatgaaaacaaatgagacagttgcccaagaagcatatgaatctgaagtccagcccctggaccaggtggctgctgaagaagtagaattgccagggaaagaggatcagtctgtctcaagcagtcagagtaaggctgtagcttctggacagactcagacaggagcagttacccatgacccccctcaggattccgttcctgtcagttcagtctctcttatcccaccaccaccgcctccgaaaaatgttgcccgaatgttggcgctagcattagctgagtccgcacagcaagcctcaactcagtcattgaagagaccagggacctctcaggctgggtatacaaattatggagacatagcggtggctacaactgaagataatctgtccagttcttactctgcagttgctctagataaggcctatttccaaaccgatcgaccagcagagcagttccacctccagaataatgcaccaggaaactgtgaccatcctctaccagagacaacagctactggggatcctacccattccaacacaactgaatctggggagcaacatcaccaagtagacttaacagggaatcagccacatcaagcatatttatctggggacccagaaaaggccagaattacttcagttcccttagactcagagaagtctgatgatcatgtaagtttccctgaagaccagtctgggaagaacagtatgccaactgtctccttcttggatcaggaccagtctccaccccgtttctacagtggagatcagcctccttcttatcttggtgcaagtgtggataaactccatcaccctttagaatttgcagacaaatctcccacacctcctaatttacctagcgataaaatctaccctccttctgggtcccccgaagagaataccagcacagccaccatgacttacatgacaactactccagcaacagcccaaatgagcaccaaggaagccagctgggatgtggctgaacaacccaccactgctgattttgctgctgccacacttcagcgcacgcacagaactaatcgtccccttccccctccgccttcccagagatctgcagagcagccaccagttgtggggcaggtacaagcagcaaccaatataggattaaataattcccacaaggttcaaggagtagttccagttccagagaggccacctgaacctcgagccatggatgaccctgcgtctgccttcatcagtgacagtggtgctgctgctgctcagtgtcccatggctacagctgtccagccaggcctgcctgagaaagtgcgggacggtgcccgggtcccgctgctgcacctgcgcgccgagtctgtccctgcgcatccctgtggctttcctgcaccactgccccccaccaggatgatggagagtaagatgattgctgccatacactccagcagtgcagatgccaccagcagttcaaattatcattcctttgtcactgcttcatccacctctgtggacgatgcattgcctttaccacttcctgtcccacaacctaagcatgcttctcagaaaacagtttactcctcctttgctaggcccgatgtcaccactgaaccctttggtccagataactgtttgcatttcaatatgactccaaactgccagtaccgtccccagagtgtacctccccatcacaataaattggagcagcaccaagtgtatggtgccaggtcagagccaccagcctccatgggtcttcgttataacacatatgtggccccaggaagaaacgcatctggacaccactccaagccatgcagccgggtcgagtatgtgtcttctttgagctcctctgtcaggaatacctgttaccccgaagacattccaccgtaccctaccatccggagagtgcagtctctccatgctccgccgtcttccatgattcgctctgttcccatttcacggacagaagttcccccagatgatgagccagcctactgcccaagacctctgtaccaatataagccatatcagtcctcccaggcccgctcagattatcatgtcactcagcttcagccttactttgagaatggccgggtccactacaggtatagcccatattccagttcttctagttcctattacagtccagatggggccctgtgtgatgtggatgcctatggcacagtccagttgagaccccttcaccgccttcccaatcgagactttgctttctacaatcctaggctgcaaggaaagagcttgtacagttatgctggtttggctccacgtccccgggccaacgtgactggctatttctctcccaacgaccataatgtagtcagcatgcctccggctgctgatgtgaagcacacctacacctcatgggatcttgaggacatggaaaaataccgcatgcagtccatccggagagagagccgtgctcggcagaagcaggaagcagccattttgcagaagcaggcagaagcaggaagggggatactctggngtg

SEQ ID NO: 53639 - DNA, 1592 bp, Homo sapiens
cctgtcccgcagcagtctgcatccccatagcagacacaagggggtttacaaatgtagtccatcatacccagaacgtggagagggaccccagtgtgctgtaccagtaccaaccacacggcaagcgccagagcagtgtgactgttgtgtcccagtatgataacctggaagattaccactccctgcctcagcaccagcgaggagtctttggagggggcggcatggggacgtatgtgccccctggctttccccatccacagagcaggacctatgctacagcgttgggtcaaggggccttcctgcccgcagagttgtccttgcagcatcctgaaacacagatccatgcagaatgagccctgcgagcaatagagttgaagcagcctctgctggacagtggactgttctatttttttcaataaccaaaaagattaaacaaaaaatactataaaacccctgaccacatttaaaaaatgataataaaagtaaacaaatcagcatctttttccccttccctgcttcattaccccctcttccatctatagactttgtcatttttgtctttagaaaagatctgaaggatggtaaagccccgtgctgaaacccagtagagaaacctgtctcaggacacacttgccatctagggctagcttgaaagagcctgaggactgcctttaactgaatttgaattcagcattgtcctttcttcttagtatttgctgcataattgagagcagttcacatcgatttcctggtaggcgtctgcattccctgttgtgttcctgcttctccttcagtagctgcacaacttgcgcagatcgacacactgttgtcacttcattctccccgtctgagaaggatcttgtgttcagttagagtcgtggaaaaatccctgatccttcaaggtcagtcagacagttggcaacattataattaaaaataagaaattaagactttaaattaaacatttggtagagtcatcataaaacaccagaccacttagactcaggctgaaccatactctttctattcttatttttcatccttgttcctcacggttcagtgaacaggctcatatcatgacagaatggacttttaaaagttagtacttaaggaaacttctttaggtggaagaaagtaaagttcttattgtcagtgaactttattagcaccagaaatctctattgatgcttttaatgcattgcctgccttcaggttttcttcttaccccacccctcaataagatttggtgaattgtaattctagtaaaacatgtcataccattggttttcctaaattatcaactttctttcattaaaaaaaaaaaaaaaaaaaaaagcccagcatggtttgactggatagacacgcataatttattatgaatataaatttccatgtttgtttctgttcctaaaccagagtacgaggtccctgggaatttaagtagctacgcattatctattattagactgcaagttcctgcaataactgcttagttcacagccccgtttcaccagtggagttctgggcagttattgctgtcctaaggcattactgtcgtttgcttactctatacttgtgtggtcacagtcttcttg

SEQ ID NO: 53640 - DNA, 2812 bp, Homo sapiens
tcctgctgtcggtgctgcccatgttatcaagaggtacactgctcgggcccctgacgaactgaccttagaggtgggagacattgtttctgttattgacatgcccccgaaagtgttaagcacatggtggagaggcaagcacggattccaggtgggactcttccctggacactgtgttgagttaattaaccaaaaagttccccagtcagtgaccaactcagtgccaaaaccagtgtctaaaaagcacggcaagctcattacgttcttacgaacattcatgaagtctcgtccaacaaaacagaagctgaagcagcggggaatcttgaaagagagggtgtttggttgtgacctgggggagcaccttctaaattctggttttgaagtgccgcaggttcttcaaagctgcacagcattcattgagagatatggcatcgtggatggaatctatcgcctttctggtgttgcctccaatatccagagactacgccatgaatttgactctgagcacgtccccgacctgacgaaagaaccgtatgttcaggacatccattctgtgggttccctatgtaagctgtacttccgggaactcccaaaccctctgcttacctaccagctgtatgagaaattttctgatgcagtttcagcagcaacagatgaagaaaggctgataaaaatccacgatgtcatccagcagctccccccaccacactacagaacactggagttcctgatgagacacttgtctcttctagctgactattgttccatcacaaatatgcatgcaaaaaatctagcaattgtttgggctccaaacctgttaagatcaaaacagatagaatctgcctgcttcagtggaacagcagctttcatggaagtgaggattcagtctgtggttgttgagttcatcctgaatcacgttgatgtgctgttcagcggcagaatcagcatggccatgcaagagggggcagcttctctatcaaggcccaagtccctcctggtatcctctccatccaccaaactgctgacattggaagaggcccaggcacgaacacaagctcaggtcaattctccaattgtgacggaaaataaatatatcgaagtaggagaaggacctgctgcacttcaggggaaatttcataccataattgagttcccacttgaaagaaagaggcctcaaaataagatgaaaaagtctcctgtgggtagctggcgttcctttttcaacttggggaaatcatcatctgtttctaaacgaaagctgcagcggaatgagagtgagccttcagagatgaaagccatggctctgaaaggtggcagggcagaaggaaccctccgttcagctaaaagtgaggagtctcttacatctctccatgcagttgatggtgattctaagctcttccgacccagaagacccagatcttccagtgatgcactgtctgcctcttttaatggagaaatgctggggaaccgctgtaactcctatgataatctgcctcatgacaatgagagtgaggaggaaggagggctgcttcatatcccagcccttatgtctcctcattcagctgaggatgttgacttgagcccaccagacattggagtagccagcctggattttgatccaatgtcatttcaatgtagtcctcctaaggccgaatcagaatgtctggagagtggtgcttcctttttagattcaccaggatactccaaggataaaccaagtgccaataaaaaggatgcagaaacaggtagtagccaatgtcagactccaggaagcacagcaagctctgaacctgtctctcctcttcaggagaaactgagtccattctttaccctggacttgagcccaactgaagataaatcatctaagccatcctcctttactgaaaaggtcgtctatgctttctctccgaagataggacggaaattaagcaaatcaccttctatgagcatatctgagccaatttcagtgaccctaccaccacgggtgtcagaagtcattggtacagtctcaaataccacagctcagaatgcatcatcttcaacctgggacaaatgcgttgaagaaagggatgccacaaatagatcccccacccagatagtaaagatgaaaacaaatgagacagttgcccaagaagcatatgaatctgaagtccagcccctggaccaggtggctgctgaagaagtagaattgccagggaaagaggatcagtctgtctcaagcagtcagagtaaggctgtagcttctggacagactcagacaggtaccgtttgttttcctccattctttctttaagttaagagggatcttcaatcctgtgtgccatctgtgccttttaagagagaaatttgtccacagctagcctttaatcaaagagaatgcttttctgggtggtgctgatggctcagagccctaaattaaaagcagtccaacaaaactccccaaaagggccaatggtcctgcttcaaatcttcacaaaagtccccttatctctttggacggtgagaattcgtggataatttttgcacaactgcgtagctcttgattctgtttttctcttctaataaaatatctttattgtagccttccaagttaacaagccagctacaccatcaaatgtaaaaactgttcataataacagtctacaagcacttgaagcttgttttctaagcaatcttttctgagccaggtgagggacatgctttttttcccccccatctctgtaacaattcaagaagagattgcagtctttatacactgtttgttttagttttccttctgaaccagatgtgttttcaacagcatttgcatgtggga

SEQ ID NO: 53641 - DNA, 1227 bp, Homo sapiens
tcctgctgtcggtgctgcccatgttatcaagaggtacactgctcgggcccctgacgaactgaccttagaggtgggagacattgtttctgttattgacatgcccccgaaagtgttaagcacatggtggagaggcaagcacggattccaggtgggactcttccctggacactgtgttgagttaattaaccaaaaagttccccagtcagtgaccaactcagtgccaaaaccagtgtctaaaaagcacggcaagctcattacgttcttacgaacattcatgaagtctcgtccaacaaaacagaagctgaagcagcggggaatcttgaaagagagggtgtttggttgtgacctgggggagcaccttctaaattctggttttgaagtgccgcaggttcttcaaagctgcacagcattcattgagagatatggcatcgtggatggaatctatcgcctttctggtgttgcctccaatatccagagactacgccatgaatttgactctgagcacgtccccgacctgacgaaagaaccgtatgttcaggacatccattctgtgggttccctatgtaagctgtacttccgggaactcccaaaccctctgcttacctaccagctgtatgagaaattttctgatgcagtttcagcagcaacagatgaagaaaggctgataaaaatccacgatgtcatccagcagctccccccaccacactacagaacactggagttcctgatgagacacttgtctcttctagctgactattgttccatcacaaatatgcatgcaaaaaatctagcaattgtttgggctccaaacctgttaagatcaaaacagatagaatctgcctgcttcagtggaacagcagctttcatggaagtgaggattcagtctgtggttgttgagttcatcctgaatcacgttgatgtgctgttcagcggcagaatcagcatggccatgcaagagggggcagcttctctatcaaggcccaagtccctcctggtatcctctccatccaccaaactgctgacattggaagaggcccaggcacgaacacaagctcaggtcaattctccaattgtgacggaaaataaatatatcgaagtaggagaaggacctgctgcacttcaggggaaatttcataccataattgagttcccacttgaaaggtaaaatttgttaaatcctattttgggatatgattttcatagctatgtcctattattttcttttag

SEQ ID NO: 53642 - DNA, 385 bp, Homo sapiens
taaaaagcacggcaagctcattacgttcttacgaacattcatgaagtctcgtccaacaaaacagaagctgaagcagcggggaatcttgaaagagagggtgtttggttgtgacctgggggagcaccttctaaattctggttttgaaggtaaaaataaaatgtgcaagcttatactctgagtttctgacctctccatattggtttgctataaccaattatggagtagatttagtcaaatgatacctgtttcatttcagttcaatgcatgtactaagctttctcaggtactcagttctggatggagctgagaatgaaaagtctaagaatgcactttggcattagagatgttcgtgttctattcgggaagagtaggacattcacacaaa

SEQ ID NO: 53643 - DNA, 636 bp, Homo sapiens
  misc_feature (2)..(2): n is a, c, g, or t
gnggagaggtgccctcggtgatagaggaaacatggccgagtatacgcggctgcacaacgccttggcgctaatccgcctccgaaacccgccggtcaacgcgatcagtacgactttactccgtgacataaaagaaggactacagaaagctgtaatagaccatacaaactcaagtctaaccctctcccaccatctctggaatccagccacagactgagaccaatactgcattagctgtgcttgttggtaataacttagtgtaggtaatggatatggcagacttgagtgagaatgagtaacactgtggagaaagggacaggaattacaagagagacccagagaagggcttagtctcttttattgtggattgggcttttagagtatatttagttccagacttgatggctgttatacacctgctgatatatacctgcattgcatgtatctccaccatatgtgggcttgggcaaatctctttaacttcctgaacctcaatttctctatctataaagtgggaacaataatatctattttaaggggtttttgtgacattaagcgagataacatatctgaaagcctctactacagtacctacacaaagaagatggtcaataaatgttattgtttaattcacacaga

SEQ ID NO: 53644 - DNA, 3751 bp, Homo sapiens
  misc_feature (2)..(2): n is a, c, g, or t
gnggagaggtgccctcggtgatagaggaaacatggccgagtatacgcggctgcacaacgccttggcgctaatccgcctccgaaacccgccggtcaacgcgatcagtacgactttactccgtgacataaaagaaggactacagaaagctgtaatagaccatacaataaaagccattgtgatttgtggagcagagggcaaattttctgcaggtgctgatattcgtggcttcagtgctcctaggacatttggccttacactgggacatgtagtagatgaaatacagagaaatgagaagcccgtggtggcagcaatccaaggcatggctttcggagggggactagagctggccctgggctgtcactataggattgcccacgcagaggctcaagttggcttaccagaagttacactgggacttctccctggtgcaagaggaacccagcttctccccagactcactggagttcctgctgcacttgacttaattacctcaggaagacgtattttagcagatgaagcactcaagctgggcattctagataaagttgtaaactcagacccggttgaagaagcaatcagatttgctcagagagtttcagatcaacctctagaatcccgtagactctgcaacaagccaattcagagcttgcccaacatggacagcatttttagtgaggccctcttgaagatgcggaggcagcaccctgggtgtcttgcacaggaggcttgtgtccgtgcagtccaggctgctgtgcagtatccctatgaagtgggcatcaagaaggaggaggagctgtttctatatcttttgcaatcagggcaggctagagccctgcaatatgctttcttcgctgaaaggaaagcaaataagtggtcaactccctccggagcatcgtggaaaacagcatcagcgcggcctgtctcctcagttggtgttgttggcttgggaacaatgggccgaggcattgtcatttcttttgcaagggccaggattcctgtgattgctgtagactcggacaaaaaccagctagcaactgcaaacaagatgataacctctgtcttggaaaaagaagcctccaaaatgcaacagagcggccacccttggtcaggaccaaaacccaggttaacttcatctgtgaaggagcttggtggtgtagatttagtcattgaagcagtatttgaggaaatgagcctgaagaagcaggtctttgctgaactctcagctgtgtgcaaaccagaagcatttttgtgcactaatacttcagccctggatgttgatgagattgcttcttccactgatcgtcctcacttggtcattggcacccacttcttttcgccagctcatgtcatgaagttgttagaggttattcccagccaatactcttcccccactaccattgccactgttatgaacttatcaaaaaagattaaaaagattggagtcgttgtaggcaactgttttggatttgtggggaatcgaatgttgaatccttactacaatcaggcatatttcttgttagaagaaggcagcaaaccagaggaggtagatcaggtgctggaagagtttggttttaaaatgggaccttttagagtgtctgatcttgctgggttggatgtgggctggaaatctagaaaggggcaaggtcttactggacctacattgcttccaggaactcctgcccgaaaaaggggtaataggaggtactgcccaattcctgatgtgctctgtgaattaggacgatttggccagaagacaggtaagggttggtatcaatatgacaagccattgggtaggattcacaaacctgatccctggctttccacattcctatcacggtatagaaaaacccatcacattgaaccacgtaccattagccaggatgagatccttgaacgctgcttatattcacttatcaatgaagcattccgtatcttgggagaagggatagctgctagcccagagcacattgatgttgtctatttacatggatatggatggccaaggcacaagggcgggcccatgttctatgcttccacagttgggttgcccacagttctagagaaattgcagaaatattacaggcagaaccctgatattccccaactggagccaagtgactatctaaaaaaactggcttctcagggaaaccctcccctgaaagaatggcaaagcttggcaggctcccctagcagtaaattgtgattcagtcttccagattatgcctcacatgctagcatcaggtaatgctgactgaatttcagtgaaattaaatcaaaaatccaaagtaagattgttctgaaatacaaagcaaaataaataatcattagaatcttctgtgtaacgactctaatggtcaaatctttaggaatgtgcttcctatgcctctgaatctgtccttatcagataaattcaatgcatgaacttgtgtgaatataataccataatagctaatgaaagaggctcaggcataagttgagattctcaaatgcttttatcattggataaatgtgtcatcaattaataaatgataaatgcagctaagtcatacattcattttgactcctttcaatgtcacacacatagtattgatcagaaatcttatgaatcatacatacactcaacaaacattaaagttgtgggaacttaggttagtgtggcaagcctttcctcttctggtctttcctcttctgtttatggagaaataatagaaagtagtaagtcgttaacttagtgtaagaagggtcttagagaacatctaaccttctaggatttcccaattctgtgatagagtaatgacaccagttttcctgtcatgacaagcctctgtgatgttacatatggaaatggttgaatcttgaaaaatctaaaattgttgcaaaacatattttgtatgattttgttgtaagagttcttctctttttactttttgccttgtgtagttaaaaattaaggggctggtcaatacaaaaacttgtacacaaatatttatagcagaattattcataatggccaaaagctgaatacaacccaaatgtctatgaactaatgaatagataaaccaaatctggtatatccatacaatggactatattattcagccataaaaagaaataaagggccaggcacagtggctcacacctgtaatcccagcactttgggaggctgaggcaggaggattgtttgaggccagaaatttgagaccagcctgggcaacatagcaaaaccctgtctctacaaaaaatactttccgtacattagtggttgcctaaggctagaattgggggtgatgaatggggagtacaggattcatctaatgggtacaggatttctttatggttcatgaaaatggtctaaacttattgtggtaatggtcacataacaatatattaaaaaccattgagttgtatattttaagtgggtgaattatatggtatgtgaattatatctcaataaagttgttagtaaataaatggggctgaagatgttatccttcattgtggtgtaaatgaactttcacaatattttcacctgtgaacccaaataaaatgattaaagttctgatggaaaaatcttgaatggagtataagttttccgttgttaaaaagcaaacaaaaaaccaacaaaaaatccaagtgtgccttgaattgtacagagcacaattattatgtttgaaatgtgtactacttaattttatataatttggtttgtgaaattaaagacatcaataaaaatgattcctgaaagtagtaa

SEQ ID NO: 53645 - DNA, 3737 bp, Homo sapiens
  misc_feature (2)..(2): n is a, c, g, or t
gnggagaggtgccctcggtgatagaggaaacatggccgagtatacgcggctgcacaacgccttggcgctaatccgcctccgaaacccgccggtcaacgcgatcagtacgactttactccgtgacataaaagaaggactacagaaagctgtaatagaccatacaagtgctgatattcgtggcttcagtgctcctaggacatttggccttacactgggacatgtagtagatgaaatacagagaaatgagaagcccgtggtggcagcaatccaaggcatggctttcggagggggactagagctggccctgggctgtcactataggattgcccacgcagaggctcaagttggcttaccagaagttacactgggacttctccctggtgcaagaggaacccagcttctccccagactcactggagttcctgctgcacttgacttaattacctcagctttcaaagtgagatgactctcagattcattgaagacgtattttagcagatgaagcactcaagctgggcattctagataaagttgtaaactcagacccggttgaagaagcaatcagatttgctcagagagtttcagatcaacctctagaatcccgtagactctgcaacaagccaattcagagcttgcccaacatggacagcatttttagtgaggccctcttgaagatgcggaggcagcaccctgggtgtcttgcacaggaggcttgtgtccgtgcagtccaggctgctgtgcagtatccctatgaagtgggcatcaagaaggaggaggagctgtttctatatcttttgcaatcagggcaggctagagccctgcaatatgctttcttcgctgaaaggaaagcaaataagtggtcaactccctccggagcatcgtggaaaacagcatcagcgcggcctgtctcctcagttggtgttgttggcttgggaacaatgggccgaggcattgtcatttcttttgcaagggccaggattcctgtgattgctgtagactcggacaaaaaccagctagcaactgcaaacaagatgataacctctgtcttggaaaaagaagcctccaaaatgcaacagagcggccacccttggtcaggaccaaaacccaggttaacttcatctgtgaaggagcttggtggtgtagatttagtcattgaagcagtatttgaggaaatgagcctgaagaagcaggtctttgctgaactctcagctgtgtgcaaaccagaagcatttttgtgcactaatacttcagccctggatgttgatgagattgcttcttccactgatcgtcctcacttggtcattggcacccacttcttttcgccagctcatgtcatgaagttgttagaggttattcccagccaatactcttcccccactaccattgccactgttatgaacttatcaaaaaagattaaaaagattggagtcgttgtaggcaactgttttggatttgtggggaatcgaatgttgaatccttactacaatcaggcatatttcttgttagaagaaggcagcaaaccagaggaggtagatcaggtgctggaagagtttggttttaaaatgggaccttttagagtgtctgatcttgctgggttggatgtgggctggaaatctagaaaggggcaaggtcttactggacctacattgcttccaggaactcctgcccgaaaaaggggtaataggaggtactgcccaattcctgatgtgctctgtgaattaggacgatttggccagaagacaggtaagggttggtatcaatatgacaagccattgggtaggattcacaaacctgatccctggctttccacattcctatcacggtatagaaaaacccatcacattgaaccacgtaccattagccaggatgagatccttgaacgctgcttatattcacttatcaatgaagcattccgtatcttgggagaagggatagctgctagcccagagcacattgatgttgtctatttacatggatatggatggccaaggcacaagggcgggcccatgttctatgcttccacagttgggttgcccacagttctagagaaattgcagaaatattacaggcagaaccctgatattccccaactggagccaagtgactatctaaaaaaactggcttctcagggaaaccctcccctgaaagaatggcaaagcttggcaggctcccctagcagtaaattgtgattcagtcttccagattatgcctcacatgctagcatcaggtaatgctgactgaatttcagtgaaattaaatcaaaaatccaaagtaagattgttctgaaatacaaagcaaaataaataatcattagaatcttctgtgtaacgactctaatggtcaaatctttaggaatgtgcttcctatgcctctgaatctgtccttatcagataaattcaatgcatgaacttgtgtgaatataataccataatagctaatgaaagaggctcaggcataagttgagattctcaaatgcttttatcattggataaatgtgtcatcaattaataaatgataaatgcagctaagtcatacattcattttgactcctttcaatgtcacacacatagtattgatcagaaatcttatgaatcatacatacactcaacaaacattaaagttgtgggaacttaggttagtgtggcaagcctttcctcttctggtctttcctcttctgtttatggagaaataatagaaagtagtaagtcgttaacttagtgtaagaagggtcttagagaacatctaaccttctaggatttcccaattctgtgatagagtaatgacaccagttttcctgtcatgacaagcctctgtgatgttacatatggaaatggttgaatcttgaaaaatctaaaattgttgcaaaacatattttgtatgattttgttgtaagagttcttctctttttactttttgccttgtgtagttaaaaattaaggggctggtcaatacaaaaacttgtacacaaatatttatagcagaattattcataatggccaaaagctgaatacaacccaaatgtctatgaactaatgaatagataaaccaaatctggtatatccatacaatggactatattattcagccataaaaagaaataaagggccaggcacagtggctcacacctgtaatcccagcactttgggaggctgaggcaggaggattgtttgaggccagaaatttgagaccagcctgggcaacatagcaaaaccctgtctctacaaaaaatactttccgtacattagtggttgcctaaggctagaattgggggtgatgaatggggagtacaggattcatctaatgggtacaggatttctttatggttcatgaaaatggtctaaacttattgtggtaatggtcacataacaatatattaaaaaccattgagttgtatattttaagtgggtgaattatatggtatgtgaattatatctcaataaagttgttagtaaataaatggggctgaagatgttatccttcattgtggtgtaaatgaactttcacaatattttcacctgtgaacccaaataaaatgattaaagttctgatggaaaaatcttgaatggagtataagttttccgttgttaaaaagcaaacaaaaaaccaacaaaaaatccaagtgtgccttgaattgtacagagcacaattattatgtttgaaatgtgtactacttaattttatataatttggtttgtgaaattaaagacatcaataaaaatgattcctgaaagtagtaa

SEQ ID NO: 53646 - DNA, 3697 bp, Homo sapiens
  misc_feature (2)..(2): n is a, c, g, or t
gnggagaggtgccctcggtgatagaggaaacatggccgagtatacgcggctgcacaacgccttggcgctaatccgcctccgaaacccgccggtcaacgcgatcagtacgactttactccgtgacataaaagaaggactacagaaagctgtaatagaccatacaataaaagccattgtgatttgtggagcagagggcaaattttctgcaggtgctgatattcgtggcttcagtgctcctaggacatttggccttacactgggacatgtagtagatgaaatacagagaaatgagaagcccgtggtggcagcaatccaaggcatggctttcggagggggactagagctggccctgggctgtcactataggattgcccacgcagaggctcaagttggcttaccagaagttacactgggacttctccctggtgcaagaggaacccagcttctccccagactcactggagttcctgctgcacttgacttaattacctcaggaagacgtattttagcagatgaagcactcaagctgggcattctagataaagttgtaaactcagacccggttgaagaagcaatcagatttgctcagagagtttcagatcaacctctagaatcccgtagactctgcaacaagccaattcagagcttgcccaacatggacagcatttttagtgaggccctcttgaagatgcggaggcagcaccctgggtgtcttgcacaggaggcttgtgtccgtgcagtccaggctgctgtgcagtatccctatgaagtgggcatcaagaaggaggaggagctgtttctatatcttttgcaatcagggcaggctagagccctgcaatatgctttcttcgctgaaaggaaagcaaataagtggtcaactccctccggagcatcgtggaaaacagcatcagcgcggcctgtctcctcagttggtgttgttggcttgggaacaatgggccgaggcattgtcatttcttttgcaagggccaggattcctgtgattgctgtagactcggacaaaaaccagctagcaactgcaaacaagatgataacctctgtcttggaaaaagaagcctccaaaatgcaacagagcggccacccttggtcaggacctgaagcagtatttgaggaaatgagcctgaagaagcaggtctttgctgaactctcagctgtgtgcaaaccagaagcatttttgtgcactaatacttcagccctggatgttgatgagattgcttcttccactgatcgtcctcacttggtcattggcacccacttcttttcgccagctcatgtcatgaagttgttagaggttattcccagccaatactcttcccccactaccattgccactgttatgaacttatcaaaaaagattaaaaagattggagtcgttgtaggcaactgttttggatttgtggggaatcgaatgttgaatccttactacaatcaggcatatttcttgttagaagaaggcagcaaaccagaggaggtagatcaggtgctggaagagtttggttttaaaatgggaccttttagagtgtctgatcttgctgggttggatgtgggctggaaatctagaaaggggcaaggtcttactggacctacattgcttccaggaactcctgcccgaaaaaggggtaataggaggtactgcccaattcctgatgtgctctgtgaattaggacgatttggccagaagacaggtaagggttggtatcaatatgacaagccattgggtaggattcacaaacctgatccctggctttccacattcctatcacggtatagaaaaacccatcacattgaaccacgtaccattagccaggatgagatccttgaacgctgcttatattcacttatcaatgaagcattccgtatcttgggagaagggatagctgctagcccagagcacattgatgttgtctatttacatggatatggatggccaaggcacaagggcgggcccatgttctatgcttccacagttgggttgcccacagttctagagaaattgcagaaatattacaggcagaaccctgatattccccaactggagccaagtgactatctaaaaaaactggcttctcagggaaaccctcccctgaaagaatggcaaagcttggcaggctcccctagcagtaaattgtgattcagtcttccagattatgcctcacatgctagcatcaggtaatgctgactgaatttcagtgaaattaaatcaaaaatccaaagtaagattgttctgaaatacaaagcaaaataaataatcattagaatcttctgtgtaacgactctaatggtcaaatctttaggaatgtgcttcctatgcctctgaatctgtccttatcagataaattcaatgcatgaacttgtgtgaatataataccataatagctaatgaaagaggctcaggcataagttgagattctcaaatgcttttatcattggataaatgtgtcatcaattaataaatgataaatgcagctaagtcatacattcattttgactcctttcaatgtcacacacatagtattgatcagaaatcttatgaatcatacatacactcaacaaacattaaagttgtgggaacttaggttagtgtggcaagcctttcctcttctggtctttcctcttctgtttatggagaaataatagaaagtagtaagtcgttaacttagtgtaagaagggtcttagagaacatctaaccttctaggatttcccaattctgtgatagagtaatgacaccagttttcctgtcatgacaagcctctgtgatgttacatatggaaatggttgaatcttgaaaaatctaaaattgttgcaaaacatattttgtatgattttgttgtaagagttcttctctttttactttttgccttgtgtagttaaaaattaaggggctggtcaatacaaaaacttgtacacaaatatttatagcagaattattcataatggccaaaagctgaatacaacccaaatgtctatgaactaatgaatagataaaccaaatctggtatatccatacaatggactatattattcagccataaaaagaaataaagggccaggcacagtggctcacacctgtaatcccagcactttgggaggctgaggcaggaggattgtttgaggccagaaatttgagaccagcctgggcaacatagcaaaaccctgtctctacaaaaaatactttccgtacattagtggttgcctaaggctagaattgggggtgatgaatggggagtacaggattcatctaatgggtacaggatttctttatggttcatgaaaatggtctaaacttattgtggtaatggtcacataacaatatattaaaaaccattgagttgtatattttaagtgggtgaattatatggtatgtgaattatatctcaataaagttgttagtaaataaatggggctgaagatgttatccttcattgtggtgtaaatgaactttcacaatattttcacctgtgaacccaaataaaatgattaaagttctgatggaaaaatcttgaatggagtataagttttccgttgttaaaaagcaaacaaaaaaccaacaaaaaatccaagtgtgccttgaattgtacagagcacaattattatgtttgaaatgtgtactacttaattttatataatttggtttgtgaaattaaagacatcaataaaaatgattcctgaaagtagtaa

SEQ ID NO: 53647 - DNA, 613 bp, Homo sapiens
  misc_feature (2)..(2): n is a, c, g, or t
gnggagaggtgccctcggtgatagaggaaacatggccgagtatacgcggctgcacaacgccttggcgctaatccgcctccgaaacccgccggtcaacgcgatcagtacgactttactccgtgacataaaagaaggactacagaaagctgtaatagaccatacaataaaagccattgtgatttgtggagcagagggcaaattttctgcaggtgctgatattcgtggcttcagtgctcctaggacatttggccttacactgggacatgtagtagatgaaatacagagaaatgagaagcccgtggtggcagcaatccaaggcatggctttcggagggggactagagctggccctgggctgtcactataggattgcccacgcagaggctcaagttggcttaccagaagttacactgggacttctccctggtgcaagaggaacccagcttctccccagactcactggagttcctgctgcacttgacttaattacctcaggtcagtatagaccttggcaacaactgtctagattagtgtgaagaattggactaggatttagaaaaattctggcttgaccacctactccctatgtaaccataaaaggattcttgaacttc

SEQ ID NO: 53648 - DNA, 3805 bp, Homo sapiens
  misc_feature (2)..(2): n is a, c, g, or t
gnggagaggtgccctcggtgatagaggaaacatggccgagtatacgcggctgcacaacgccttggcgctaatccgcctccgaaacccgccggtcaacgcgatcagtacgactttactccgtgacataaaagaaggactacagaaagctgtaatagaccatacaataaaagccattgtgatttgtggagcagagggcaaattttctgcaggtgctgatattcgtggcttcagtgctcctaggacatttggccttacactgggacatgtagtagatgaaatacagagaaatgagaagcccgtggtggcagcaatccaaggcatggctttcggagggggactagagctggccctgggctgtcactataggattgcccacgcagaggctcaagttggcttaccagaagttacactgggacttctccctggtgcaagaggaacccagcttctccccagactcactggagttcctgctgcacttgacttaattacctcaggaagacgtattttagcagatgaagcactcaagctgggcattctagataaagttgtaaactcagacccggttgaagaagcaatcagatttgctcagagagtttcagatcaacctctagaatcccgtagactctgcaacaagccaattcagagcttgcccaacatggacagcatttttagtgaggccctcttgaagatgcggaggcagcaccctgggtgtcttgcacaggaggcttgtgtccgtgcagtccaggctgctgtgcagtatccctatgaagtgggcatcaagaaggaggaggagctgtttctatatcttttgcaatcagggcaggctagagccctgcaatatgctttcttcgctgaaaggaaagcaaataagtggtcaactccctccggagcatcgtggaaaacagcatcagcgcggcctgtctcctcagttggtgttgttggcttgggaacaatgggccgaggcattgtcatttcttttgcaagggccaggattcctgtgattgctgtagactcggacaaaaaccagctagcaactgcaaacaagatgataacctctgtcttggaaaaagaagcctccaaaatgcaacagagcggccacccttggtcaggaccaaaacccaggttaacttcatctgtgaaggagcttggtggtgtagatttagtcattgaagcagtatttgaggaaatgagcctgaagaagcaggtctttgctgaactctcagctgtgtgcaaaccagaagcatttttgtgcactaatacttcagccctggatgttgatgagattgcttcttccactgatcgtcctcacttggtcattggcacccacttcttttcgccagctcatgtcatgaagttgttagaggttattcccagccaatactcttcccccactaccattgccactgttatgaacttatcaaaaaagattaaaaagattggagtcgttgtaggcaactgttttggatttgtggggaatcgaatgttgaatccttactacaatcaggcatatttcttgttagaagaaggcagcaaaccagaggaggtagatcaggtgctggaagagtttggttttaaaatgggaccttttagagtgtctgatcttgctgggttggatgtgggctggaaatctagaaaggggcaaggtcttactggacctacattgcttccaggaactcctgcccgaaaaaggggtaataggaggtactgcccaattcctgatgtgctctgtgaattaggacgatttggccagaagacaggtaagggttggtatcaatatgacaagccattgggtaggattcacaaacctgatccctggctttccacattcctatcacggtatagaaaaacccatcacattgaaccacgtaccattagccaggatgagatccttgaacgctgcttatattcacttatcaatgaagcattccgtatcttgggagaagggatagctgctagcccagagcacattgatgttgtctatttacatggatatggatggccaaggcacaagggcgggcccatgttctatgcttccacagttgggttgcccacagttctagagaaattgcagaaatattacaggcagaaccctgatattccccaactggagccaagtgactatctaaaaaaactggcttctcagggaaaccctcccctgaaagaatggcaaagcttggcaggctcccctagcagtaaattgtgattcagtcttccagattatgcctcacatgctagcatcaggtaatgctgactgaatttcagtgaaattaaatcaaaaatccaaagtaagattgttctgaaatacaaagcaaaataaataatcattagaatcttctgtgtaacgactctaatggtcaaatctttaggaatgtgcttcctatgcctctgaatctgtccttatcagataaattcaatgcatgaacttgtgtgaatataataccataatagctaatgaaagaggctcaggcataagttgagattctcaaatgcttttatcattggataaatgtgtcatcaattaataaatgataaatgcagctaagtcatacattcattttgactcctttcaatgtcacacacatagtattgatcagaaatcttatgaatcatacatacactcaacaaacattaaagttgtaggaaaaagacagttggaaattggtaagggaactgagtacttcaaaccagcacagggaacttaggttagtgtggcaagcctttcctcttctggtctttcctcttctgtttatggagaaataatagaaagtagtaagtcgttaacttagtgtaagaagggtcttagagaacatctaaccttctaggatttcccaattctgtgatagagtaatgacaccagttttcctgtcatgacaagcctctgtgatgttacatatggaaatggttgaatcttgaaaaatctaaaattgttgcaaaacatattttgtatgattttgttgtaagagttcttctctttttactttttgccttgtgtagttaaaaattaaggggctggtcaatacaaaaacttgtacacaaatatttatagcagaattattcataatggccaaaagctgaatacaacccaaatgtctatgaactaatgaatagataaaccaaatctggtatatccatacaatggactatattattcagccataaaaagaaataaagggccaggcacagtggctcacacctgtaatcccagcactttgggaggctgaggcaggaggattgtttgaggccagaaatttgagaccagcctgggcaacatagcaaaaccctgtctctacaaaaaatactttccgtacattagtggttgcctaaggctagaattgggggtgatgaatggggagtacaggattcatctaatgggtacaggatttctttatggttcatgaaaatggtctaaacttattgtggtaatggtcacataacaatatattaaaaaccattgagttgtatattttaagtgggtgaattatatggtatgtgaattatatctcaataaagttgttagtaaataaatggggctgaagatgttatccttcattgtggtgtaaatgaactttcacaatattttcacctgtgaacccaaataaaatgattaaagttctgatggaaaaatcttgaatggagtataagttttccgttgttaaaaagcaaacaaaaaaccaacaaaaaatccaagtgtgccttgaattgtacagagcacaattattatgtttgaaatgtgtactacttaattttatataatttggtttgtgaaattaaagacatcaataaaaatgattcctgaaagtagtaa

SEQ ID NO: 53649 - DNA, 3752 bp, Homo sapiens
  misc_feature (2)..(2): n is a, c, g, or t
gnggagaggtgccctcggtgatagaggaaacatggccgagtatacgcggctgcacaacgccttggcgctaatccgcctccgaaacccgccggtcaacgcgatcagtacgactttactccgtgacataaaagaaggactacagaaagctgtaatagaccatacaataaaagccattgtgatttgtggagcagagggcaaattttctgcaggtgctgatattcgtggcttcagtgctcctaggacatttggccttacactgggacatgtagtagatgaaatacagagaaatgagaagcccgtggtggcagcaatccaaggcatggctttcggagggggactagagctggccctgggctgtcactataggattgcccacgcagaggctcaagttggcttaccagaagttacactgggacttctccctggtgcaagaggaacccagcttctccccagactcactggagttcctgctgcacttgacttaattacctcaggaagacgtattttagcagatgaagcactcaagctgggcattctagataaagttgtaaactcagacccggttgaagaagcaatcagatttgctcagagagtttcagatcaacctctagaatcccgtagactctgcaacaagccaattcagagcttgcccaacatggacagcatttttagtgaggccctcttgaagatgcggaggcagcaccctgggtgtcttgcacaggaggcttgtgtccgtgcagtccaggctgctgtgcagtatccctatgaagtgggcatcaagaaggaggaggagctgtttctatatcttttgcaatcagggcaggctagagccctgcaatatgctttcttcgctgaaaggaaagcaaataagtggtcaactccctccggagcatcgtggaaaacagcatcagcgcggcctgtctcctcagttggtgttgttggcttgggaacaatgggccgaggcattgtcatttcttttgcaagggccaggattcctgtgattgctgtagactcggacaaaaaccagctagcaactgcaaacaagatgataacctctgtcttggaaaaagaagcctccaaaatgcaacagagcggccacccttggtcaggaccaaaacccaggttaacttcatctgtgaaggagcttggtggtgtagatttagtcattgaagcagtatttgaggaaatgagcctgaagaagcaggtctttgctgaactctcagctgtgtgcaaaccagaagcatttttgtgcactaatacttcagccctggatgttgatgagattgcttcttccactgatcgtcctcacttggtcattggcacccacttcttttcgccagctcatgtcatgaagttgttagaggttattcccagccaatactcttcccccactaccattgccactgttatgaacttatcaaaaaagattaaaaagattggagtcgttgtaggcaactgttttggatttgtggggaatcgaatgttgaatccttactacaatcaggcatatttcttgttagaagaaggcagcaaaccagaggaggtagatcaggtgctggaagagtttggttttaaaatgggaccttttagagtgtctgatcttgctgggttggatgtgggctggaaatctagaaaggggcaaggtcttactggacctacattgcttccaggaactcctgcccgaaaaaggggtaataggaggtactgcccaattcctgatgtgctctgtgaattaggacgatttggccagaagacaggtaagggttggtatcaatatgacaagccattgggtaggattcacaaacctgatccctggctttccacattcctatcacggtatagaaaaacccatcacattgaaccacgtaccattagccaggatgagatccttgaacgctgcttatattcacttatcaatgaagcattccgtatcttgggagaagggatagctgctagcccagagcacattgatgttgtctatttacatggatatggatggccaaggcacaagggcgggcccatgttctatgcttccacagttgggttgcccacagttctagagaaattgcagaaatattacaggcagaaccctgatattccccaactggagccaagtgactatctaaaaaaactggcttctcagggaaaccctcccctgaaagaatggcaaagcttggcaggctcccctagcagtaaattgtgattcagtcttccagattatgcctcacatgctagcatcaggtaatgctgactgaatttcagtgaaattaaatcaaaaatccaaagtaagatttctaatggtcaaatctttaggaatgtgcttcctatgcctctgaatctgtccttatcagataaattcaatgcatgaacttgtgtgaatataataccataatagctaatgaaagaggctcaggcataagttgagattctcaaatgcttttatcattggataaatgtgtcatcaattaataaatgataaatgcagctaagtcatacattcattttgactcctttcaatgtcacacacatagtattgatcagaaatcttatgaatcatacatacactcaacaaacattaaagttgtaggaaaaagacagttggaaattggtaagggaactgagtacttcaaaccagcacagggaacttaggttagtgtggcaagcctttcctcttctggtctttcctcttctgtttatggagaaataatagaaagtagtaagtcgttaacttagtgtaagaagggtcttagagaacatctaaccttctaggatttcccaattctgtgatagagtaatgacaccagttttcctgtcatgacaagcctctgtgatgttacatatggaaatggttgaatcttgaaaaatctaaaattgttgcaaaacatattttgtatgattttgttgtaagagttcttctctttttactttttgccttgtgtagttaaaaattaaggggctggtcaatacaaaaacttgtacacaaatatttatagcagaattattcataatggccaaaagctgaatacaacccaaatgtctatgaactaatgaatagataaaccaaatctggtatatccatacaatggactatattattcagccataaaaagaaataaagggccaggcacagtggctcacacctgtaatcccagcactttgggaggctgaggcaggaggattgtttgaggccagaaatttgagaccagcctgggcaacatagcaaaaccctgtctctacaaaaaatactttccgtacattagtggttgcctaaggctagaattgggggtgatgaatggggagtacaggattcatctaatgggtacaggatttctttatggttcatgaaaatggtctaaacttattgtggtaatggtcacataacaatatattaaaaaccattgagttgtatattttaagtgggtgaattatatggtatgtgaattatatctcaataaagttgttagtaaataaatggggctgaagatgttatccttcattgtggtgtaaatgaactttcacaatattttcacctgtgaacccaaataaaatgattaaagttctgatggaaaaatcttgaatggagtataagttttccgttgttaaaaagcaaacaaaaaaccaacaaaaaatccaagtgtgccttgaattgtacagagcacaattattatgtttgaaatgtgtactacttaattttatataatttggtttgtgaaattaaagacatcaataaaaatgattcctgaaagtagtaa

SEQ ID NO: 53650 - DNA, 3908 bp, Homo sapiens
  misc_feature (2)..(2): n is a, c, g, or t
gnggagaggtgccctcggtgatagaggaaacatggccgagtatacgcggctgcacaacgccttggcgctaatccgcctccgaaacccgccggtcaacgcgatcagtacgactttactccgtgacataaaagaaggactacagaaagctgtaatagaccatacaataaaagccattgtgatttgtggagcagagggcaaattttctgcaggtgctgatattcgtggcttcagtgctcctaggacatttggccttacactgggacatgtagtagatgaaatacagagaaatgagaagcccgtggtggcagcaatccaaggcatggctttcggagggggactagagctggccctgggctgtcactataggattgcccacgcagaggctcaagttggcttaccagaagttacactgggacttctccctggtgcaagaggaacccagcttctccccagactcactggagttcctgctgcacttgacttaattacctcaggaagacgtattttagcagatgaagcactcaagctgggcattctagataaagttgtaaactcagacccggttgaagaagcaatcagatttgctcagagagtttcagatcaacctctagaatcccgtagactctgcaacaagccaattcagagcttgcccaacatggacagcatttttagtgaggccctcttgaagatgcggaggcagcaccctgggtgtcttgcacaggaggcttgtgtccgtgcagtccaggctgctgtgcagtatccctatgaagtgggcatcaagaaggaggaggagctgtttctatatcttttgcaatcagggcaggctagagccctgcaatatgctttcttcgctgaaaggaaagcaaataagtggtcaactccctccggagcatcgtggaaaacagcatcagcgcggcctgtctcctcagttggtgttgttggcttgggaacaatgggccgaggcattgtcatttcttttgcaagggccaggattcctgtgattgctgtagactcggacaaaaaccagctagcaactgcaaacaagatgataacctctgtcttggaaaaagaagcctccaaaatgcaacagagcggccacccttggtcaggaccaaaacccaggttaacttcatctgtgaaggagcttggtggtgtagatttagtcattgaagcagtatttgaggaaatgagcctgaagaagcaggtctttgctgaactctcagctgtgtgcaaaccagaagcatttttgtgcactaatacttcagccctggatgttgatgagattgcttcttccactgatcgtcctcacttggtcattggcacccacttcttttcgccagctcatgtcatgaagttgttagaggttattcccagccaatactcttcccccactaccattgccactgttatgaacttatcaaaaaagattaaaaagattggagtcgttgtaggcaactgttttggatttgtggggaatcgaatgttgaatccttactacaatcaggcatatttcttgttagaagaaggcagcaaaccagaggaggtagatcaggtgctggaagagtttggttttaaaatgggaccttttagagtgtctgatcttgctgggttggatgtgggctggaaatctagaaaggggcaaggtcttactggacctacattgcttccaggaactcctgcccgaaaaaggggtaataggaggtactgcccaattcctgatgtgctctgtgaattaggacgatttggccagaagacaggtaagggttggtatcaatatgacaagccattgggtaggattcacaaacctgatccctggctttccacattcctatcacggtatagaaaaacccatcacattgaaccacgtaccattagccaggatgagatccttgaacgctgcttatattcacttatcaatgaagcattccgtatcttgggagaagggatagctgctagcccagagcacattgatgttgtctatttacatggatatggatggccaaggcacaagggcgggcccatgttctatgcttccacagttgggttgcccacagttctagagaaattgcagaaatattacaggcagaaccctgatattccccaactggagccaagtgactatctaaaaaaactggcttctcagggaaaccctcccctgaaagaatggcaaagcttggcaggctcccctagcagtaaattgtgattcagtcttccagattatgcctcacatgctagcatcaggtaatgctgactgaatttcagtgaaattaaatcaaaaatccaaagtaagattgttctgaaatacaaagcaaaataaataatcattagaatcttctgtgtaacgactctaatggtcaaatctttaggaatgtgcttcctatgcctctgaatctgtccttatcagataaattcaatgcatgaacttgtgtgaatataataccataatagctaatgaaagaggctcaggcataagttgagattctcaaatgcttttatcattggataaatgtgtcatcaattaataaatgataaatgcagctaagtcatacattcattttgactcctttcaatgtcacacacatagtattgatcagaaatcttatgaatcatacatacactcaacaaacattaaagttgtgggaacttaggttagtgtggcaagcctttcctcttctggtctttcctcttctgtttatggagaaataatagaaagtagtaagtcgttaacttagtgtaagaagggtcttagagaacatctaaccttctaggatttcccaattctgtgatagagtaatgacaccagttttcctgtcatgacaagcctctgtgatgttacatatggaaatggttgaatcttgaaaaatctaaaattgttgcaaaacatattttgtatgattttgttgtaagagttcttctctttttactttttgccttgtgtagttaaaaattaaggggctggtcaatacaaaaacttgtacacaaatatttatagcagaattattcataatggccaaaagctgaatacaacccaaatgtctatgaactaatgaatagataaaccaaatctggtatatccatacaatggactatattattcagccataaaaagaaataaagggccaggcacagtggctcacacctgtaatcccagcactttgggaggctgaggcaggaggattgtttgaggccagaaatttgagaccagcctgggcaacatagcaaaaccctgtctctacaaaaaatactttccgtacattagtggttgcctaaggctagaattgggggtgatgaatggggagtacaggattcatctaatgggtacaggatttctttatggttcatgaaaatggtctaaacttattgtggtaatggtcacataacaatatattaaaaaccattgagttgtatattttaagtgggtgaattatatggtatgtgaattatatctcaataaagttgttagtaaataaatggggctgaagatgttatccttcattgtggtgtaaatgaactttcacaatattttcacctgtgaacccaaataaaatgattaaagttctgatggaaaaatcttgaatggagtataagttttccgttgttaaaaagcaaacaaaaaaccaacaaaaaatccaagtgtgccttgaattgtacagagcacaattattatgtttgaaatgtgtactacttaattttatataatttggtttgtgaaattaaagacatcaataaaaatgattcctgaaagtagtaaaacaacagagagaaaacagacaaacacgcgtgtggcagcacgggcctcgaagaagtctcaagacacactgtggccgagcaccagagggagaggaacggccacagcagtacagggaaacgggagaaacagggggaattcaccaaaaaacgccgggcac

SEQ ID NO: 53651 - DNA, 1103 bp, Homo sapiens
  misc_feature (2)..(2): n is a, c, g, or t
gnggagaggtgccctcggtgatagaggaaacatggccgagtatacgcggctgcacaacgccttggcgctaatccgcctccgaaacccgccggtcaacgcgatcagtacgactttactccgtgacataaaagaaggactacagaaagctgtaatagaccatacaataaaagccattgtgatttgtggagcagagggcaaattttctgcaggtgctgatattcgtggcttcagtgctcctaggacatttggccttacactgggacatgtagtagatgaaatacagagaaatgagaagcccgtggtggcagcaatccaaggcatggctttcggagggggactagagctggccctgggctgtcactataggattgcccacgcagaggctcaagttggcttaccagaagttacactgggacttctccctggtgcaagaggaacccagcttctccccagactcactggagttcctgctgcacttgacttaattacctcaggaagacgtattttagcagatgaagcactcaagctgggcattctagataaagttgtaaactcagacccggttgaagaagcaatcagatttgctcagagagtttcagatcaacctctagaatcccgtagactctgcaacaagccaattcagagcttgcccaacatggacagcatttttagtgaggccctcttgaagatgcggaggcagcaccctgggtgtcttgcacaggaggcttgtgtccgtgcagtccaggctgctgtgcagtatccctatgaagtgggcatcaagaaggaggaggagctgtttctatatcttttgcaatcagggcaggctagagccctgcaatatgctttcttcgctgaaaggaaagcaaataagtggtcaactccctccggagcatcgtggaaaacagcatcagcgcggcctgtctcctcagttggtgttgttgactccatgacactcctctgcctcctgactgaaacccggcttaccctgaggacctgcatctgctgccctctccagggaatgctgccgcttctcccacactccatggacagctgggtcacttctcagaccattgcgctttatgggacactgtcctttgtggtcc

SEQ ID NO: 53652 - DNA, 638 bp, Homo sapiens
  misc_feature (619)..(619): n is a, c, g, or t
  misc_feature (627)..(627): n is a, c, g, or t
aattgtacataattaagtaattactaattgccaggggttgtgctttatatatattatttaatcttcacaacttgttttatatgaagaaaactagtctcagaaatttaactatatagtatgtggtagagctggagttgatttgaatcgccaggtgtttgtgcggtctgggctcttgagcacagttctttactacttcacaaatatgttttactttgtggttcatagttattttcatggagagtttttagttcttctagtgttttgcctctgtcaaattactgccactatcataactattgccttttaagcttgaacaactataactatagttgatcagtaaggaaaaccttacttatctccttgccacgagttttcctttactatatacagaaaagcctaaagaaaataaagatcaccataatcaccagacattactgctgctaaaacttttcttctaatctccctaaaaaatgggactattttctgtctctctacacacacacacacgatttcataaatttttcatgttttgtaataacctctgcaccaggatttcttttctttttttttttgtttgagatgaagtctagcctggtcgacagagtgaaactgtgtcccnggaaaaanaaaaaaaggaa

SEQ ID NO: 53653 - DNA, 476 bp, Homo sapiens
ctatcctcctgccttagcctcctgagtctctgggattacgtgcatgagccatgagccaccacagctggctctgattttaattttttaaattgacagataacattgtgtgtttttatcgtgtataatatgatgttttgaagtatatatacattgtgaatggttaaatctagctaattaacaaatgcattacttcatatagtcatcatttttgtggtgagagcacataacacgtactctacattttttaagaatgcaatatatcgtcattaactgttgtcacgtcgttgtatgctagatctcttgtaatttatttctcctatctaactgtagttacgtattttttgaccaacatctccttgtccttcccatccccgaacagcctcagccccctgtaaccaccattctatagcctacctctatgagatcaactttttaagatcctgcatatgaatgagaccatgtgatatttgtctttc

SEQ ID NO: 53654 - DNA, 638 bp, Homo sapiens
atcagacgaatgagtaacatacaatcaaaatgactggatgatgactggggggacatcaacataaagactatgatgtgcattcaatatttacacgaagaactaggataaatgaaagatgagagagagaaagagagagagcaaacagtatataatggctctgtgctccaacaatgtgggaacaaccttataaagaatgtgtaaggacaggaagaacatatgcaaaaatgtcagtggtaacagtgttgggtggtgttattctaagaatgctttgcgtgtgaatagtaatgttgtctagcttaattctatcacccttggtatttctgaaaaccaggattcttgatatagaagaaacaggggggccaggcgcggtggctcacacctgtaatcccagcacttggcaggctgagatgagtggatcacttgaggtcaggagttcaaggccagcctagccaacatggcgaaaccccgtctctactaaaaatacaaaaattagctgggcgtggtggcacgtgcctgtaatcccagctactcaggaggctgaaggaggagaatcacttgaacccaggatgcggaagttgcagtgacccaagatcacgtcactgcgctccagcccgggcgacagaacaagactctgtctc

SEQ ID NO: 53655 - DNA, 308 bp, Homo sapiens
atctctgctttgtcatctgaaatatggcagaaataatacccatctcttgaatatatcatgagtaaattttttaatgcataaaacctccatgcttctgcatgtagtcagcatacagtaaataaagtttccttctccctaggtaagaaggactgcttcataaattataaagctttatgtgaatgcgagagattgttattaatattgtgctgcttccagattccaacttttacaaaagagttttagaaagagaaaaggaatttagtcattgtctcacaatacctggcataaataagtacacaataaaagtc

SEQ ID NO: 53656 - DNA, 294 bp, Homo sapiens
  misc_feature (1)..(2): n is a, c, g, or t
  misc_feature (5)..(5): n is a, c, g, or t
  misc_feature (288)..(288): n is a, c, g, or t
  misc_feature (294)..(294): n is a, c, g, or t
nnccnctagctctgaggactggccccttagctttaactggatgtttgaagaatgtgaagatgcacggtgaaggctcctctacaggcgtagagatagtgtcatgtttgacctgcaactgcgttatttgtttaaatcatttgttttaaaaaagagttttcttaggtgacattgtggttatattagaagaaaaaagggataggagcccatagtacctcagtgcttttctggcattgataaatcaccaggagcaagcaatctataatttcaattaatattgcattttcaagnataggn

SEQ ID NO: 53657 - DNA, 1860 bp, Homo sapiens
tccccgcgcgctctccgtccgcagtggaagccgccgccgcgctcgcagctcgcaggcgccgcgtagccgtcgccaccgccgccagcccgtgcgccctcggcgcgtacccgccgcgctcccatccccgccgccggccaggggcgcgctcggccgccccggacagtgtcccgctgcggctccgcggcgatggccaccaagatcgacaaagaggcttgccgggcggcgtacaacctggtgcgcgacgacggctcggccgtcatctgggtgacttttaaatatgacggctccaccatcgtccccggcgagcagggagcggagtaccagcacttcatccagcagtgcacagatgacgtccggttgtttgccttcgtgcgcttcaccaccggggatgccatgagcaagaggtccaagtttgccctcatcacgtggatcggtgagaacgtcagcgggctgcagcgcgccaaaaccgggacggacaagaccctggtgaaggaggtcgtacagaatttcgctaaggagtttgtgatcagtgatcggaaggagctggaggaagatttcatcaagagcgagctgaagaaggcggggggagccaattacgacgcccagacggagtaaccccagcccccgccacaccaccccttgccaaagtcatctgcctgctccccgggggagaggaccgccggcctcagctactagcccaccagcccaccagggagaaaagaagccatgagaggcagcgcccgccaccctgtgtccacagcccccaccttcccgcttcccttagaaccctgccgtgtcctatctcatgacgctcatggaacctctttctttgatcttctttttcttttctccccctcttttttgttctaaagaaaagtcattttgatgcaaggtcctgcctgccatcagatccgaggtgcctcctgcagtgaccccttttcctggcatttctcttccacgcgacgaggtctgcctagtgagatctgcatgacctcacgttgctttccagagcccgggcctattttgccatctcagttttcctgggccctgcttcctgtgtaccactgaggggcagctgggccaggagctgtgcccggtgcctgcagccttcataagcacacacgtccattccctactaaggcccagacctcctggtatctgccccgggctccctcatcccacctccatccggagttgcccaagatgcatgtccagcataggcaggattgctcggtggtgagaaggttaggtccggctcagactgaataagaagagataaaatttgccttaaaacttacctggcagtggctttgctgcacggtctgaaaccacctgttcccaccctcttgaccgaaatttccttgtgacacagagaagggcaaaggtctgagcccagagttgacggagggagtatttcagggttcacttcaggggctcccaaagcgacaagatcgttagggagagaggcccagggtggggactgggaatttaaggagagctgggaacggatcccttaggttcaggaagcttctgtgcaagctgcgaggatggcttgggccgaagggttgctctgcccgccgcgctagctgtgagctgagcaaagccctgggctcacagcaccccaaaagcctgtggcttcagtcctgcgtctgcaccacacattcaaaaggatcgttttgttttgtttttaaagaaaggtgagattggcttggttcttcatgagcacatttgatatagctctttttctgtttttccttgctcatttcgttttggggaagaaatctgtactgtattgggattgtaaagaacatctctgcactcagacagtttacagaaataaatgttttttttgtttttcag

SEQ ID NO: 53658 - DNA, 1850 bp, Homo sapiens
agagcagaaaatgttataggtcgtgctcggtttatgtcctgctcgaggcctgtattccgtcgccaccgccgccagcccgtgcgccctcggcgcgtacccgccgcgctcccatccccgccgccggccaggggcgcgctcggccgccccggacagtgtcccgctgcggctccgcggcgatggccaccaagatcgacaaagaggcttgccgggcggcgtacaacctggtgcgcgacgacggctcggccgtcatctgggtgacttttaaatatgacggctccaccatcgtccccggcgagcagggagcggagtaccagcacttcatccagcagtgcacagatgacgtccggttgtttgccttcgtgcgcttcaccaccggggatgccatgagcaagaggtccaagtttgccctcatcacgtggatcggtgagaacgtcagcgggctgcagcgcgccaaaaccgggacggacaagaccctggtgaaggaggtcgtacagaatttcgctaaggagtttgtgatcagtgatcggaaggagctggaggaagatttcatcaagagcgagctgaagaaggcggggggagccaattacgacgcccagacggagtaaccccagcccccgccacaccaccccttgccaaagtcatctgcctgctccccgggggagaggaccgccggcctcagctactagcccaccagcccaccagggagaaaagaagccatgagaggcagcgcccgccaccctgtgtccacagcccccaccttcccgcttcccttagaaccctgccgtgtcctatctcatgacgctcatggaacctctttctttgatcttctttttcttttctccccctcttttttgttctaaagaaaagtcattttgatgcaaggtcctgcctgccatcagatccgaggtgcctcctgcagtgaccccttttcctggcatttctcttccacgcgacgaggtctgcctagtgagatctgcatgacctcacgttgctttccagagcccgggcctattttgccatctcagttttcctgggccctgcttcctgtgtaccactgaggggcagctgggccaggagctgtgcccggtgcctgcagccttcataagcacacacgtccattccctactaaggcccagacctcctggtatctgccccgggctccctcatcccacctccatccggagttgcccaagatgcatgtccagcataggcaggattgctcggtggtgagaaggttaggtccggctcagactgaataagaagagataaaatttgccttaaaacttacctggcagtggctttgctgcacggtctgaaaccacctgttcccaccctcttgaccgaaatttccttgtgacacagagaagggcaaaggtctgagcccagagttgacggagggagtatttcagggttcacttcaggggctcccaaagcgacaagatcgttagggagagaggcccagggtggggactgggaatttaaggagagctgggaacggatcccttaggttcaggaagcttctgtgcaagctgcgaggatggcttgggccgaagggttgctctgcccgccgcgctagctgtgagctgagcaaagccctgggctcacagcaccccaaaagcctgtggcttcagtcctgcgtctgcaccacacattcaaaaggatcgttttgttttgtttttaaagaaaggtgagattggcttggttcttcatgagcacatttgatatagctctttttctgtttttccttgctcatttcgttttggggaagaaatctgtactgtattgggattgtaaagaacatctctgcactcagacagtttacagaaataaatgttttttttgtttttcag

SEQ ID NO: 53659 - DNA, 1810 bp, Homo sapiens
tagggctaggtacgaggctgggtgttgaatcggccgagggtgcgcctcggcgcgtacccgccgcgctcccatccccgccgccggccaggggcgcgctcggccgccccggacagtgtcccgctgcggctccgcggcgatggccaccaagatcgacaaagaggcttgccgggcggcgtacaacctggtgcgcgacgacggctcggccgtcatctgggtgacttttaaatatgacggctccaccatcgtccccggcgagcagggagcggagtaccagcacttcatccagcagtgcacagatgacgtccggttgtttgccttcgtgcgcttcaccaccggggatgccatgagcaagaggtccaagtttgccctcatcacgtggatcggtgagaacgtcagcgggctgcagcgcgccaaaaccgggacggacaagaccctggtgaaggaggtcgtacagaatttcgctaaggagtttgtgatcagtgatcggaaggagctggaggaagatttcatcaagagcgagctgaagaaggcggggggagccaattacgacgcccagacggagtaaccccagcccccgccacaccaccccttgccaaagtcatctgcctgctccccgggggagaggaccgccggcctcagctactagcccaccagcccaccagggagaaaagaagccatgagaggcagcgcccgccaccctgtgtccacagcccccaccttcccgcttcccttagaaccctgccgtgtcctatctcatgacgctcatggaacctctttctttgatcttctttttcttttctccccctcttttttgttctaaagaaaagtcattttgatgcaaggtcctgcctgccatcagatccgaggtgcctcctgcagtgaccccttttcctggcatttctcttccacgcgacgaggtctgcctagtgagatctgcatgacctcacgttgctttccagagcccgggcctattttgccatctcagttttcctgggccctgcttcctgtgtaccactgaggggcagctgggccaggagctgtgcccggtgcctgcagccttcataagcacacacgtccattccctactaaggcccagacctcctggtatctgccccgggctccctcatcccacctccatccggagttgcccaagatgcatgtccagcataggcaggattgctcggtggtgagaaggttaggtccggctcagactgaataagaagagataaaatttgccttaaaacttacctggcagtggctttgctgcacggtctgaaaccacctgttcccaccctcttgaccgaaatttccttgtgacacagagaagggcaaaggtctgagcccagagttgacggagggagtatttcagggttcacttcaggggctcccaaagcgacaagatcgttagggagagaggcccagggtggggactgggaatttaaggagagctgggaacggatcccttaggttcaggaagcttctgtgcaagctgcgaggatggcttgggccgaagggttgctctgcccgccgcgctagctgtgagctgagcaaagccctgggctcacagcaccccaaaagcctgtggcttcagtcctgcgtctgcaccacacattcaaaaggatcgttttgttttgtttttaaagaaaggtgagattggcttggttcttcatgagcacatttgatatagctctttttctgtttttccttgctcatttcgttttggggaagaaatctgtactgtattgggattgtaaagaacatctctgcactcagacagtttacagaaataaatgttttttttgtttttcag

SEQ ID NO: 53660 - DNA, 406 bp, Homo sapiens
ctgacctcgtgatccgcccacctcggcctcccgaaatgctgggattacaggcgtgaaccactgcgcccggcatgattggcattttgggctaaatagtttctgtccacaggaccgtcttgtgcagtgcaggtcttttagcatcctggccactcatagtgcccgtggttctcagtagaagctgtagaggatgttgggaaattggggtgggttggtcacagtgcctggcatctgtctcagggtaagggcttgggaggctcaagtgcagagtcgtatctggatgccagcaacaccctgttgagaaactttctactatggtatgctcatcattctctgaagatgtcagggcctgtttgtttgtttgcctgtttctctcacttttgccttataatcagttcttccttgttgg

SEQ ID NO: 53661 - DNA, 416 bp, Homo sapiens
aaacaataatcaaccccatttacaaaggagtttcaattcatatttttataagaatttcttcaatgaatattctcccgtgagtgtatatgtgggtgagggattctctcagcacctagcacagagcctgacatacaattccctctcataatttatagtaagcacatgagtgaatgaaagtgaattatgcttgtgagagggaaaaagcagctactgatcatagatttttagtgaattcaaaggcctgtggctacaataatataggtaactgtggaaactgtcatgtaaagcaaaagccttgaaatgtacagcctgaagcacacacaattaaaaggatttttctttaaatatgtgaagagcataatcagaaacgaataatatcgtcattgtttgagagaactaaaattgctaggtagaag

SEQ ID NO: 53662 - DNA, 429 bp, Homo sapiens
ctgcccgcagtcatccggaggcctaaacccctccctgtggtgctgtgcttccatggtcacgctccttgtccactttcatgctcttcccgtactcctggttcctctttgaagttcttagaagatagcggtagaagaaatagtgaaaatcttaaagtctttgatcgaatttctgataaatgcacagaagaaaacgctgacgtatgctgccttccctctctgcttcagctacctaaaaggaaagggacccctgtcctatgatcacgtgacttgcttgaccttatcaatcacttggacgacccaccttccttaccctgcctgtcccccttgtcttgtatacaataaatatcagcgcgcccagccattcggggccactaccggtcttcgtgttttggtggtagtggtcccccaggcccagctgttttctattta

SEQ ID NO: 53663 - DNA, 256 bp, Homo sapiens
tcgctggaggctggaatgcagtggtatgatcatagctcactgcagcctcaaaatcctgggctcaagtaatccttctgcctcaggctcttgagtcactgagattacaggcacgagccactgtgcccagctagtatttattcttgaattgttaattttatataaggagatggcctcaaaaacattaacatccatttagtaaacaagctgtcaccacattaaacactaatgtaacatttgtgttgattcatttgaacta

SEQ ID NO: 53664 - DNA, 415 bp, Homo sapiens
ctcggcacgaggtgttaggatggcaggcttgagccaccacgcctggcagctccatctgtgttgactcctgaagcccctcatcttggctaatccggacaggcttgctggggaccccatctccccttggagactttgggatgtggctggatgtccaagtggccggggtcctccacagcccccagcttcccagggcgggaggcaggctgtgtcctcggtgggcactgacagtgaggctgaaacgtttgcacttcacatttccacatttaggggcattttgttgttgactcattcaaagctcttttaagtcgcttaatttgctgctcagagggaaatgaaaagggagccattttccctgatttgtttgcctcatcaacttttcaatcaataaaaaagtgcattttgctcatcggatgca

SEQ ID NO: 53665 - DNA, 535 bp, Homo sapiens
ctcggcacgaggtgttaggatggcaggcttgagccaccacgcctggcagctccatctgtgttgactcctgaagcccctcatcttggctaatccggacaggcttgctggggaccccatctccccttggagactttgggatgtggctggatgtccaagtggccggggtcctccacagcccccagcttcccagggcgggaggcaggctgtgtcctcggtgggcactgacagtgaggctgaaacgtttgcacttcacatttccacatttaggggcattttgttgttgactcattcaaagctcttttaagtcgcttaatttgctgctcagagggaaatgaaaagggagccattttccctgatttgtttgcctcatcaacttttcaatcaataaaaaagtgcattttgctcatcggatgcaaataggtccatctttcctaatatgttgaaatatagtgattcatcagccatttcatttcatctggaagctgaaagcctaatggcgtttggagagaactcctcactcgagaagagtcggtaa

SEQ ID NO: 53666 - DNA, 328 bp, Homo sapiens
ctctgactggtcgtgggcagggagctgggcagcagttcgtgggagcaccaggatgaccccctctggaatgactagggtgagacttccctggtgggatgtcccttgggcacagagccagggccacctcccagcagagagttggacaacgagctttgaggagcaagggagatcttcagcagattagctggacatggtggcaggcgcctataattccagctacttgggaggctgagacaggagaatcgcttgaaccccggaggcagaagttgcagtaagccgagatcgcgccatggcactgcagcctgggcaacagagtaaaattctgtca

SEQ ID NO: 53667 - DNA, 400 bp, Homo sapiens
  misc_feature (367)..(367): n is a, c, g, or t
  misc_feature (376)..(376): n is a, c, g, or t
  misc_feature (385)..(385): n is a, c, g, or t
tcgacaataaaatgacaacctattttaaaaatgagtaaagggtttaaagagacatttctctaaagaatttaaacaaatagccaataaacacatggaaaatgttcaataacattagtcattaaggaattgcaaatcaaaactacttcatacccattaaggtggctaaaatttaaaaagacagacaataactagttattaaggatgaggagaaattggaacactcattcaagcaaataaagttaatgatttatgacatgacactggtcacatctggactccaggtcctaaaaatgagttgaagaccatacaatcacaatacagaaaaagacttgaggatccatctaatcccattgatccttaggtttgntttcgtccncaaaaactnttcattcctgggcaa

SEQ ID NO: 53668 - DNA, 356 bp, Homo sapiens
aaggaaagaaaagtcttggtgaatgtgttccagaagactggaacataatatgcaagattggtaaacaggcaggagccaggttgtgcagtgctgtgtatggattttactctaagagcaaaggaaagccactgaagagtataaagcaggaaagtgtgaattgatttctttttgaaagaatgcccccggctctgtggagaatggattatagcaaaacaacaatggatgcccagaaatcagaaagctaggggtccatgaaaaaggtggtggcttgccgcagggggttgatgctgtaggggataaaaagtaataataacagtagcagtagtagctacaattatattgtgttaactatgtgc

SEQ ID NO: 53669 - DNA, 3405 bp, Homo sapiens
cgctgcgcgcaggccgggaacacgaggccaagagccgcagccccagccgccttggtgcagcgtacaccggcactagcccgcttgcagccccaggattagacagaagacgcgtcctcggcgcggtcgccgcccagccgtagtcacctggattacctacagcggcagctgcagcggagccagcgagaaggccaaaggggagcagcgtcccgagaggagcgcctcttttcagggaccccgccggctggcggacgcgcgggaaagcggcgtcgcgaacagagccagattgagggcccgcgggtggagagagcgacgcccgaggggatggcggcagcgtcccggagcgcctctggctgggcgctactgctgctggtggcactttggcagcagcgcgcggccggctccggcgtcttccagctgcagctgcaggagttcatcaacgagcgcggcgtactggccagtgggcggccttgcgagcccggctgccggactttcttccgcgtctgccttaagcacttccaggcggtcgtctcgcccggaccctgcaccttcgggaccgtctccacgccggtattgggcaccaactccttcgctgtccgggacgacagtagcggcggggggcgcaaccctctccaactgcccttcaatttcacctggccgggtaccttctcgctcatcatcgaagcttggcacgcgccaggagacgacctgcggccagaggccttgccaccagatgcactcatcagcaagatcgccatccagggctccctagctgtgggtcagaactggttattggatgagcaaaccagcaccctcacaaggctgcgctactcttaccgggtcatctgcagtgacaactactatggagacaactgctcccgcctgtgcaagaagcgcaatgaccacttcggccactatgtgtgccagccagatggcaacttgtcctgcctgcccggttggactggggaatattgccaacagcctatctgtctttcgggctgtcatgaacagaatggctactgcagcaagccagcagagtgcctctgccgcccaggctggcagggccggctgtgtaacgaatgcatcccccacaatggctgtcgccacggcacctgcagcactccctggcaatgtacttgtgatgagggctggggaggcctgttttgtgaccaagatctcaactactgcacccaccactccccatgcaagaatggggcaacgtgctccaacagtgggcagcgaagctacacctgcacctgtcgcccaggctacactggtgtggactgtgagctggagctcagcgagtgtgacagcaacccctgtcgcaatggaggcagctgtaaggaccaggaggatggctaccactgcctgtgtcctccgggctactatggcctgcattgtgaacacagcaccttgagctgcgccgactccccctgcttcaatgggggctcctgccgggagcgcaaccagggggccaactatgcttgtgaatgtccccccaacttcaccggctccaactgcgagaagaaagtggacaggtgcaccagcaacccctgtgccaacgggggacagtgcctgaaccgaggtccaagccgcatgtgccgctgccgtcctggattcacgggcacctactgtgaactccacgtcagcgactgtgcccgtaacccttgcgcccacggtggcacttgccatgacctggagaatgggctcatgtgcacctgccctgccggcttctctggccgacgctgtgaggtgcggacatccatcgatgcctgtgcctcgagtccctgcttcaacagggccacctgctacaccgacctctccacagacacctttgtgtgcaactgcccttatggctttgtgggcagccgctgcgagttccccgtgggcttgccgcccagcttcccctgggtggccgtctcgctgggtgtggggctggcagtgctgctggtactgctgggcatggtggcagtggctgtgcggcagctgcggcttcgacggccggacgacggcagcagggaagccatgaacaacttgtcggacttccagaaggacaacctgattcctgccgcccagcttaaaaacacaaaccagaagaaggagctggaagtggactgtggcctggacaagtccaactgtggcaaacagcaaaaccacacattggactataatctggccccagggcccctggggcgggggaccatgccaggaaagtttccccacagtgacaagagcttaggagagaaggcgccactgcggttacacagtgaaaagccagagtgtcggatatcagcgatatgctcccccagggactccatgtaccagtctgtgtgtttgatatcagaggagaggaatgaatgtgtcattgccacggaggtataaggcaggagcctacctggacatccctgctcagccccgcggctggaccttccttctgcattgtttacattgcatcctggatgggacgtttttcatatgcaacgtgctgctctcaggaggaggagggaatggcaggaaccggacagactgtgaacttgccaagagatgcaatacccttccacacctttgggtgtctgtctggcatcagattggcagctgcaccaaccagaggaacagaagagaagagagatgccactgggcactgccctgccagtagtggccttcagggggctccttccggggctccggcctgttttccagagagagtggcagtagccccatggggcccggagctgctgtggcctccactggcatccgtgtttccaaaagtgcctttggcccaggctccacggcgacagttgggcccaaatcagaaaggagagagggggccaatgagggcagggcctcctgtgggctggaaaaccactgggtgcgtctcttgctggggtttgccctggaggtgaggtgagtgctcgagggaggggagtgctttctgccccatgcctccaactactgtatgcaggcctggctctctggtctaggccctttgggcaagaatgtccgtctacccggcttccaccaccctctggccctgggcttctgtaagcagacaggcagagggcctgcccctcccaccagccaagggtgccaggcctaactggggcactcagggcagtgtgttggaaattccactgagggggaaatcaggtgctgcggccgcctgggccctttcctccctcaagcccatctccacaacctcgagcctgggctctggtccactactgccccagaccaccctcaaagctggtcttcagaaatcaataatatgagtttttattttgtttttttttttttttttgtagtttattttggagtctagtatttcaataatttaagaatcagaagcactgacctttctacattttataacattattttgtatataatgtgtatttataatatgaaaca

SEQ ID NO: 53670 - DNA, 925 bp, Homo sapiens
tgcacgaggcagatcagaaaagtaaagaccagttaagaggttggtgaccagataaggacaacctgattcctgccgcccagcttaaaaacacaaaccagaagaaggagctggaagtggactgtggcctggacaagtccaactgtggcaaacagcaaaaccacacattggactataatctggccccagggcccctggggcgggggaccatgccaggaaagtttccccacagtgacaagagcttaggagagaaggcgccactgcggttacacagtgaaaagccagagtgtcggatatcagcgatatgctcccccagggactccatgtaccagtctgtgtgtttgatatcagaggagaggaatgaatgtgtcattgccacggaggtataaggcaggagcctacctggacatccctgctcagccccgcggctggaccttccttctgcattgtttacattgcatcctggatgggacgtttttcatatgcaacgtgctgctctcaggaggaggagggaatggcaggaaccggacagactgtgaacttgccaagagatgcaatacccttccacacctttgggtgtctgtctggcatcagattggcagctgcaccaaccagaggaacagaagagaagagagtgtgttggaaattccactgagggggaaatcaggtgctgcggccgcctgggccctttcctccctcaagcccatctccacaacctcgagcctgggctctggtccactactgccccagaccaccctcaaagctggtcttcagaaatcaataatatgagtttttattttgtttttttttttttttttgtagtttattttggagtctagtatttcaataatttaagaatcagaagcactgacctttctacattttataacattattttgtatataatgtgtatttataatatgaaaca

SEQ ID NO: 53671 - DNA, 2918 bp, Homo sapiens
cgctgcgcgcaggccgggaacacgaggccaagagccgcagccccagccgccttggtgcagcgtacaccggcactagcccgcttgcagccccaggattagacagaagacgcgtcctcggcgcggtcgccgcccagccgtagtcacctggattacctacagcggcagctgcagcggagccagcgagaaggccaaaggggagcagcgtcccgagaggagcgcctcttttcagggaccccgccggctggcggacgcgcgggaaagcggcgtcgcgaacagagccagattgagggcccgcgggtggagagagcgacgcccgaggggatggcggcagcgtcccggagcgcctctggctgggcgctactgctgctggtggcactttggcagcagcgcgcggccggctccggcgtcttccagctgcagctgcaggagttcatcaacgagcgcggcgtactggccagtgggcggccttgcgagcccggctgccggactttcttccgcgtctgccttaagcacttccaggcggtcgtctcgcccggaccctgcaccttcgggaccgtctccacgccggtattgggcaccaactccttcgctgtccgggacgacagtagcggcggggggcgcaaccctctccaactgcccttcaatttcacctggccgggtaccttctcgctcatcatcgaagcttggcacgcgccaggagacgacctgcggccagaggccttgccaccagatgcactcatcagcaagatcgccatccagggctccctagctgtgggtcagaactggttattggatgagcaaaccagcaccctcacaaggctgcgctactcttaccgggtcatctgcagtgacaactactatggagacaactgctcccgcctgtgcaagaagcgcaatgaccacttcggccactatgtgtgccagccagatggcaacttgtcctgcctgcccggttggactggggaatattgccaacagcctatctgtctttcgggctgtcatgaacagaatggctactgcagcaagccagcagagtgcctctgccgcccaggctggcagggccggctgtgtaacgaatgcatcccccacaatggctgtcgccacggcacctgcagcactccctggcaatgtacttgtgatgagggctggggaggcctgttttgtgaccaagatctcaactactgcacccaccactccccatgcaagaatggggcaacgtgctccaacagtgggcagcgaagctacacctgcacctgtcgcccaggctacactggtgtggactgtgagctggagctcagcgagtgtgacagcaacccctgtcgcaatggaggcagctgtaaggaccaggaggatggctaccactgcctgtgtcctccgggctactatggcctgcattgtgaacacagcaccttgagctgcgccgactccccctgcttcaatgggggctcctgccgggagcgcaaccagggggccaactatgcttgtgaatgtccccccaacttcaccggctccaactgcgagaagaaagtggacaggtgcaccagcaacccctgtgccaacgggggacagtgcctgaaccgaggtccaagccgcatgtgccgctgccgtcctggattcacgggcacctactgtgaactccacgtcagcgactgtgcccgtaacccttgcgcccacggtggcacttgccatgacctggagaatgggctcatgtgcacctgccctgccggcttctctggccgacgctgtgaggtgcggacatccatcgatgcctgtgcctcgagtccctgcttcaacagggccacctgctacaccgacctctccacagacacctttgtgtgcaactgcccttatggctttgtgggcagccgctgcgagttccccgtgggcttgccgcccagcttcccctgggtggccgtctcgctgggtgtggggctggcagtgctgctggtactgctgggcatggtggcagtggctgtgcggcagctgcggcttcgacggccggacgacggcagcagggaagccatgaacaacttgtcggacttccagaaggacaacctgattcctgccgcccagcttaaaaacacaaaccagaagaaggagctggaagtggactgtggcctggacaagtccaactgtggcaaacagcaaaaccacacattggactataatctggccccagggcccctggggcgggggaccatgccaggaaagtttccccacagtgacaagagcttaggagagaaggcgccactgcggttacacagtgaaaagccagagtgtcggatatcagcgatatgctcccccagggactccatgtaccagtctgtgtgtttgatatcagaggagaggaatgaatgtgtcattgccacggaggtataaggcaggagcctacctggacatccctgctcagccccgcggctggaccttccttctgcattgtttacattgcatcctggatgggacgtttttcatatgcaacgtgctgctctcaggaggaggagggaatggcaggaaccggacagactgtgaacttgccaagagatgcaatacccttccacacctttgggtgtctgtctggcatcagattggcagctgcaccaaccagaggaacagaagagaagagagtgtgttggaaattccactgagggggaaatcaggtgctgcggccgcctgggccctttcctccctcaagcccatctccacaacctcgagcctgggctctggtccactactgccccagaccaccctcaaagctggtcttcagaaatcaataatatgagtttttattttgtttttttttttttttttgtagtttattttggagtctagtatttcaataatttaagaatcagaagcactgacctttctacattttataacattattttgtatataatgtgtatttataatatgaaaca

SEQ ID NO: 53672 - DNA, 1412 bp, Homo sapiens
tgcacgaggcagatcagaaaagtaaagaccagttaagaggttggtgaccagataaggacaacctgattcctgccgcccagcttaaaaacacaaaccagaagaaggagctggaagtggactgtggcctggacaagtccaactgtggcaaacagcaaaaccacacattggactataatctggccccagggcccctggggcgggggaccatgccaggaaagtttccccacagtgacaagagcttaggagagaaggcgccactgcggttacacagtgaaaagccagagtgtcggatatcagcgatatgctcccccagggactccatgtaccagtctgtgtgtttgatatcagaggagaggaatgaatgtgtcattgccacggaggtataaggcaggagcctacctggacatccctgctcagccccgcggctggaccttccttctgcattgtttacattgcatcctggatgggacgtttttcatatgcaacgtgctgctctcaggaggaggagggaatggcaggaaccggacagactgtgaacttgccaagagatgcaatacccttccacacctttgggtgtctgtctggcatcagattggcagctgcaccaaccagaggaacagaagagaagagagatgccactgggcactgccctgccagtagtggccttcagggggctccttccggggctccggcctgttttccagagagagtggcagtagccccatggggcccggagctgctgtggcctccactggcatccgtgtttccaaaagtgcctttggcccaggctccacggcgacagttgggcccaaatcagaaaggagagagggggccaatgagggcagggcctcctgtgggctggaaaaccactgggtgcgtctcttgctggggtttgccctggaggtgaggtgagtgctcgagggaggggagtgctttctgccccatgcctccaactactgtatgcaggcctggctctctggtctaggccctttgggcaagaatgtccgtctacccggcttccaccaccctctggccctgggcttctgtaagcagacaggcagagggcctgcccctcccaccagccaagggtgccaggcctaactggggcactcagggcagtgtgttggaaattccactgagggggaaatcaggtgctgcggccgcctgggccctttcctccctcaagcccatctccacaacctcgagcctgggctctggtccactactgccccagaccaccctcaaagctggtcttcagaaatcaataatatgagtttttattttgtttttttttttttttttgtagtttattttggagtctagtatttcaataatttaagaatcagaagcactgacctttctacattttataacattattttgtatataatgtgtatttataatatgaaaca

SEQ ID NO: 53673 - DNA, 813 bp, Homo sapiens
  misc_feature (59)..(59): n is a, c, g, or t
aaattgggcccaatttgggccacttgggcccccccccttttgccccaaggttaagtggncccttttcagggggggctccttccggggctccggcctgttttccagagagagtggcagtagccccatggggcccggagctgctgtggcctccactggcatccgtgtttccaaaagtgcctttggcccaggctccacggcgacagttgggcccaaatcagaaaggagagagggggccaatgagggcagggcctcctgtgggctggaaaaccactgggtgcgtctcttgctggggtttgccctggaggtgaggtgagtgctcgagggaggggagtgctttctgccccatgcctccaactactgtatgcaggcctggctctctggtctaggccctttgggcaagaatgtccgtctacccggcttccaccaccctctggccctgggcttctgtaagcagacaggcagagggcctgcccctcccaccagccaagggtgccaggcctaactggggcactcagggcagtgtgttggaaattccactgagggggaaatcaggtgctgcggccgcctgggccctttcctccctcaagcccatctccacaacctcgagcctgggctctggtccactactgccccagaccaccctcaaagctggtcttcagaaatcaataatatgagtttttattttgtttttttttttttttttgtagtttattttggagtctagtatttcaataatttaagaatcagaagcactgacctttctacattttataacattattttgtatataatgtgtatttataatatgaaaca

SEQ ID NO: 53674 - DNA, 3347 bp, Homo sapiens
tggactcagagcacaattgcgtttcctgcgggttatttttggcgtgggaacgcggggagtacggcggtgagaaaggctgaagctgccagcgccgctgacgggccccttcctgtattttacacctttcgcgaattccgctcctttggaaagggaataatggctttgggatgttgttctgacacagaggaaaaggatatttcagcagcacaacaattctcactttgaaaaggaaaaaagaaaaccattacccacctctggaggcagaacccctgaatgggcaccaaaggaccccctgctcccagggtcctctctagcctggggagcttttctttctttttctcttttttccattttgacctcttttcctctttcccctccctatctgcctccaagaccctgggatatcttaacatccttctattgtcccctttttgaatactatcaggccccctgcacatgcacacacgtagggcagctacgtagcggggctttgggtccctctggcctgttcttgctggcaggcgggggtcatctggataactgggctgattggttggctgatcaccatcatcacagccaagaaggacattggccagccgtcactggcacccttggggactggcgacccttccctgacccgaccctctgccccctcagaggccttgccaccagatgcactcatcagcaagatcgccatccagggctccctagctgtgggtcagaactggttattggatgagcaaaccagcaccctcacaaggctgcgctactcttaccgggtcatctgcagtgacaactactatggagacaactgctcccgcctgtgcaagaagcgcaatgaccacttcggccactatgtgtgccagccagatggcaacttgtcctgcctgcccggttggactggggaatattgccaacagcctatctgtctttcgggctgtcatgaacagaatggctactgcagcaagccagcagagtgcctctgccgcccaggctggcagggccggctgtgtaacgaatgcatcccccacaatggctgtcgccacggcacctgcagcactccctggcaatgtacttgtgatgagggctggggaggcctgttttgtgaccaagatctcaactactgcacccaccactccccatgcaagaatggggcaacgtgctccaacagtgggcagcgaagctacacctgcacctgtcgcccaggctacactggtgtggactgtgagctggagctcagcgagtgtgacagcaacccctgtcgcaatggaggcagctgtaaggaccaggaggatggctaccactgcctgtgtcctccgggctactatggcctgcattgtgaacacagcaccttgagctgcgccgactccccctgcttcaatgggggctcctgccgggagcgcaaccagggggccaactatgcttgtgaatgtccccccaacttcaccggctccaactgcgagaagaaagtggacaggtgcaccagcaacccctgtgccaacgggggacagtgcctgaaccgaggtccaagccgcatgtgccgctgccgtcctggattcacgggcacctactgtgaactccacgtcagcgactgtgcccgtaacccttgcgcccacggtggcacttgccatgacctggagaatgggctcatgtgcacctgccctgccggcttctctggccgacgctgtgaggtgcggacatccatcgatgcctgtgcctcgagtccctgcttcaacagggccacctgctacaccgacctctccacagacacctttgtgtgcaactgcccttatggctttgtgggcagccgctgcgagttccccgtgggcttgccgcccagcttcccctgggtggccgtctcgctgggtgtggggctggcagtgctgctggtactgctgggcatggtggcagtggctgtgcggcagctgcggcttcgacggccggacgacggcagcagggaagccatgaacaacttgtcggacttccagaaggacaacctgattcctgccgcccagcttaaaaacacaaaccagaagaaggagctggaagtggactgtggcctggacaagtccaactgtggcaaacagcaaaaccacacattggactataatctggccccagggcccctggggcgggggaccatgccaggaaagtttccccacagtgacaagagcttaggagagaaggcgccactgcggttacacagtgaaaagccagagtgtcggatatcagcgatatgctcccccagggactccatgtaccagtctgtgtgtttgatatcagaggagaggaatgaatgtgtcattgccacggaggtataaggcaggagcctacctggacatccctgctcagccccgcggctggaccttccttctgcattgtttacattgcatcctggatgggacgtttttcatatgcaacgtgctgctctcaggaggaggagggaatggcaggaaccggacagactgtgaacttgccaagagatgcaatacccttccacacctttgggtgtctgtctggcatcagattggcagctgcaccaaccagaggaacagaagagaagagagatgccactgggcactgccctgccagtagtggccttcagggggctccttccggggctccggcctgttttccagagagagtggcagtagccccatggggcccggagctgctgtggcctccactggcatccgtgtttccaaaagtgcctttggcccaggctccacggcgacagttgggcccaaatcagaaaggagagagggggccaatgagggcagggcctcctgtgggctggaaaaccactgggtgcgtctcttgctggggtttgccctggaggtgaggtgagtgctcgagggaggggagtgctttctgccccatgcctccaactactgtatgcaggcctggctctctggtctaggccctttgggcaagaatgtccgtctacccggcttccaccaccctctggccctgggcttctgtaagcagacaggcagagggcctgcccctcccaccagccaagggtgccaggcctaactggggcactcagggcagtgtgttggaaattccactgagggggaaatcaggtgctgcggccgcctgggccctttcctccctcaagcccatctccacaacctcgagcctgggctctggtccactactgccccagaccaccctcaaagctggtcttcagaaatcaataatatgagtttttattttgtttttttttttttttttgtagtttattttggagtctagtatttcaataatttaagaatcagaagcactgacctttctacattttataacattattttgtatataatgtgtatttataatatgaaaca

SEQ ID NO: 53675 - DNA, 444 bp, Homo sapiens
ttcccgtactgtgagggggttgtccagcgggcagaaaacccgaacagtggaggactctaacgaaagccacaccagagcctcccttgctccttctagttctccaacaggggaaatgtcccaagccttcctagtggaatgtgactgtgtcacctaccttcccaaaagtggccagcaaaatgagaaatgctgttagtcaactttcaatgtcctctctgcccagtgctttgattccaacagcctgtaaatgctgtttctacactggattagtccttcaaccccaccgcacacgctgtctgctgtactcaatttcatcaatccgcattacctagaggccaagcagacaccatcgtcctcccttgcgggtgagagggtgatggagggaccctcaggagcccagcaggaacaatgtctatctccgcaggctttgcagagatcctggaatat

SEQ ID NO: 53676 - DNA, 323 bp, Homo sapiens
caaatatgaaataattggaaagttgattgcatatttctatgtatataatacccctgggaaccttcaaaaatgtgcgtcacttgggtctttgggtcaattgatctacccaagcaattaatacttattcaggctgttattgtattaatagtaattacagaggacccactaaagagataagactcttctctattatttatgttataggaaacaaacgataagaagcttgtttctaaaattttggtttggctcatgaaatttaaatgtaagacctttttgtccagtatagataagttctgaaataaggcaaaagataaagtaaaaaa

SEQ ID NO: 53677 - DNA, 386 bp, Homo sapiens
tcagcggtggccttcaggctcaaaattgttggaattctctcctgccttcttgggtgccatctccccatatgccctcttgcttacatttcaaatgatttctattcatttgattcaaacctttaatatggttttctctgaaatacgtgcagaggatctggcaatctgttgtgcctgcttctagttcttgagatgacatttactaaattaaaaaatacataattatgtttttataaatttataaacatgttatacgatacatttgtgtgtgtgtgtgtgtgtgtgtgtgtgtgtgtgtgtgttttaggcagaggtatacaattccttaacctattaaatgaactccactgaatttgaatgagattttggggtgaggattcacaaacttt

SEQ ID NO: 53678 - DNA, 250 bp, Homo sapiens
cacccttgtcaccagataaccagtatacctctacagagaacatggtcatgagctgtgaattctctccattcctggaccccttgttacagatgatttagttactccaacatccatccttaccacctgtctcaggaaggaggtgcccttcctcctgtgcccagcatctccctttcacacctacttggtctccttgctccaacaattaatagcctatctttctgtcccttctttttcttcaaatagcctgcag

SEQ ID NO: 53679 - DNA, 2804 bp, Homo sapiens
accactttcacaatctgctagcaaaggttatgcagcgcgtgaacatgatcatggcagaatcaccaggcctcatcaccatctgccttttaggatatctactcagtgctgaatgtacagtttttcttgatcatgaaaacgccaacaaaattctgaatcggccaaagaggtataattcaggtaaattggaagagtttgttcaagggaaccttgagagagaatgtatggaagaaaagtgtagttttgaagaagcacgagaagtttttgaaaacactgaaagaacaactgaattttggaagcagtatgttgatggagatcagtgtgagtccaatccatgtttaaatggcggcagttgcaaggatgacattaattcctatgaatgttggtgtccctttggatttgaaggaaagaactgtgaattagatgtaacatgtaacattaagaatggcagatgcgagcagttttgtaaaaatagtgctgataacaaggtggtttgctcctgtactgagggatatcgacttgcagaaaaccagaagtcctgtgaaccagcagtgccatttccatgtggaagagtttctgtttcacaaacttctaagctcacccgtgctgagactgtttttcctgatgtggactatgtaaattctactgaagctgaaaccattttggataacatcactcaaagcacccaatcatttaatgacttcactcgggttgttggtggagaagatgccaaaccaggtcaattcccttggcaggttgttttgaatggtaaagttgatgcattctgtggaggctctatcgttaatgaaaaatggattgtaactgctgcccactgtgttgaaactggtgttaaaattacagttgtcgcaggtgaacataatattgaggagacagaacatacagagcaaaagcgaaatgtgattcgaattattcctcaccacaactacaatgcagctattaataagtacaaccatgacattgcccttctggaactggacgaacccttagtgctaaacagctacgttacacctatttgcattgctgacaaggaatacacgaacatcttcctcaaatttggatctggctatgtaagtggctggggaagagtcttccacaaagggagatcagctttagttcttcagtaccttagagttccacttgttgaccgagccacatgtcttcgatctacaaagttcaccatctataacaacatgttctgtgctggcttccatgaaggaggtagagattcatgtcaaggagatagtgggggaccccatgttactgaagtggaagggaccagtttcttaactggaattattagctggggtgaagagtgtgcaatgaaaggcaaatatggaatatataccaaggtatcccggtatgtcaactggattaaggaaaaaacaaagctcacttaatgaaagatggatttccaaggttaattcattggaattgaaaattaacagggcctctcactaactaatcactttcccatcttttgttagatttgaatatatacattctatgatcattgctttttctctttacaggggagaatttcatattttacctgagcaaattgattagaaaatggaaccactagaggaatataatgtgttaggaaattacagtcatttctaagggcccagcccttgacaaaattgtgaagttaaattctccactctgtccatcagatactatggttctccactatggcaactaactcactcaattttccctccttagcagcattccatcttcccgatcttctttgcttctccaaccaaaacatcaatgtttattagttctgtatacagtacaggatctttggtctactctatcacaaggccagtaccacactcatgaagaaagaacacaggagtagctgagaggctaaaactcatcaaaaacactactccttttcctctaccctattcctcaatcttttaccttttccaaatcccaatccccaaatcagtttttctctttcttactccctctctcccttttaccctccatggtcgttaaaggagagatggggagcatcattctgttatacttctgtacacagttatacatgtctatcaaacccagacttgcttccatagtggagacttgcttttcagaacatagggatgaagtaaggtgcctgaaaagtttgggggaaaagtttctttcagagagttaagttattttatatatataatatatatataaaatatataatatacaatataaatatatagtgtgtgtgtgtatgcgtgtgtgtagacacacacgcatacacacatataatggaagcaataagccattctaagagcttgtatggttatggaggtctgactaggcatgatttcacgaaggcaagattggcatatcattgtaactaaaaaagctgacattgacccagacatattgtactctttctaaaaataataataataatgctaacagaaagaagagaaccgttcgtttgcaatctacagctagtagagactttgaggaagaattcaacagtgtgtcttcagcagtgttcagagccaagcaagaagttgaagttgcctagaccagaggacataagtatcatgtctcctttaactagcataccccgaagtggagaagggtgcagcaggctcaaaggcataagtcattccaatcagccaactaagttgtccttttctggtttcgtgttcaccatggaacattttgattatagttaatccttctatcttgaatcttctagagagttgctgaccaactgacgtatgtttccctttgtgaattaataaactggtgttctggttcat

SEQ ID NO: 53680 - DNA, 2750 bp, Homo sapiens
accactttcacaatctgctagcaaaggttatgcagcgcgtgaacatgatcatggcagaatcaccaggcctcatcaccatctgccttttaggatatctactcagtgctgaatgtacagtttttcttgatcatgaaaacgccaacaaaattctgaatcggccaaagaggtataattcaggtaaattggaagagtttgttcaagggaaccttgagagagaatgtatggaagaaaagtgtagttttgaagaagcacgagaagtttttgaaaacactgaaagaacaactgaattttggaagcagtatgttgatggagatcagtgtgagtccaatccatgtttaaatggcggcagttgcaaggatgacattaattcctatgaatgttggtgtccctttggatttgaaggaaagaactgtgaattagatgtaacatgtaacattaagaatggcagatgcgagcagttttgtaaaaatagtgctgataacaaggtggtttgctcctgtactgagggatatcgacttgcagaaaaccagaagtcctgtgaaccagcagtgccatttccatgtggaagagtttctgtttcacaaacttctaagctcacccgtgctgagactgtttttcctgatgtggactatgtaaattctactgaagctgaaaccattttggataacatcactcaaagcacccaatcatttaatgacttcactcgggttgttggtggagaagatgccaaaccaggtcaattcccttggcaggttgttttgaatggtaaagttgatgcattctgtggaggctctatcgttaatgaaaaatggattgtaactgctgcccactgtgttgaaactggtgttaaaattacagttgtcgcaggtgaacataatattgaggagacagaacatacagagcaaaagcgaaatgtgattcgaattattcctcaccacaactacaatgcagctattaataagtacaaccatgacattgcccttctggaactggacgaacccttagtgctaaacagctacgttacacctatttgcattgctgacaaggaatacacgaacatcttcctcaaatttggatctggctatgtaagtggctggggaagagtcttccacaaagggagatcagctttagttcttcagtaccttagagttccacttgttgaccgagccacatgtcttcgatctacaaagttcaccatctataacaacatgttctgtgctggcttccatgaaggaggtagagattcatgtcaaggagatagtgggggaccccatgttactgaagtggaagggaccagtttcttaactggaattattagctggggtgaagagtgtgcaatgaaaggcaaatatggaatatataccaaggtatcccggtatgtcaactggattaaggaaaaaacaaagctcacttaatgaaagatggatttccaaggttaattcattggaattgaaaattaacagggcctctcactaactaatcactttcccatcttttgttagatttgaatatatacattctatgatcattgctttttctctttacaggggagaatttcatattttacctgagcaaattgattagaaaatggaaccactagaggaatataatgtgttaggaaattacagtcatttctaagggcccagcccttgacaaaattgtgaagttaaattctccactctgtccatcagatactatggttctccactatggcaactaactcactcaattttccctccttagcagcattccatcttcccgatcttctttgcttctccaaccaaaacatcaatgtttattagttctgtatacagtacaggatctttggtctactctatcacaaggccagtaccacactcatgaagaaagaacacaggagtagctgagaggctaaaactcatcaaaaacactactccttttcctctaccctattcctcaatcttttaccttttccaaatcccaatccccaaatcagtttttctctttcttactccctctctcccttttaccctccatggtcgttaaaggagagatggggagcatcattctgttatacttctgtacacagttatacatgtctatcaaacccagacttgcttccatagtggagacttgcttttcagaacatagggatgaagtaaggtgcctgaaaagtttgggggaaaagtttctttcagagagttaagttattttatatatataatatatatataaaatatataatatacaatataaatatatagtgtgtgtgtgtatgcgtgtgtgtagacacacacgcatacacacatataatggaagcaataagccattctaagagcttgtatggttatggaggtctgactaggcatgatttcacgaaggcaagattggcatatcattgtaactaaaaaagctgacattgacccagacatattgtactctttctacagctagtagagactttgaggaagaattcaacagtgtgtcttcagcagtgttcagagccaagcaagaagttgaagttgcctagaccagaggacataagtatcatgtctcctttaactagcataccccgaagtggagaagggtgcagcaggctcaaaggcataagtcattccaatcagccaactaagttgtccttttctggtttcgtgttcaccatggaacattttgattatagttaatccttctatcttgaatcttctagagagttgctgaccaactgacgtatgtttccctttgtgaattaataaactggtgttctggttcat

SEQ ID NO: 53681 - DNA, 2693 bp, Homo sapiens
accactttcacaatctgctagcaaaggttatgcagcgcgtgaacatgatcatggcagaatcaccaggcctcatcaccatctgccttttaggatatctactcagtgctgaatgtacagtttttcttgatcatgaaaacgccaacaaaattctgaatcggccaaagaggtataattcaggtaaattggaagagtttgttcaagggaaccttgagagagaatgtatggaagaaaagtgtagttttgaagaagcacgagaagtttttgaaaacactgaaagaacaactgaattttggaagcagtatgttgatggagatcagtgtgagtccaatccatgtttaaatggcggcagttgcaaggatgacattaattcctatgaatgttggtgtccctttggatttgaaggaaagaactgtgaattagatgtaacatgtaacattaagaatggcagatgcgagcagttttgtaaaaatagtgctgataacaaggtggtttgctcctgtactgagggatatcgacttgcatcacaaacttctaagctcacccgtgctgagactgtttttcctgatgtggactatgtaaattctactgaagctgaaaccattttggataacatcactcaaagcacccaatcatttaatgacttcactcgggttgttggtggagaagatgccaaaccaggtcaattcccttggcaggttgttttgaatggtaaagttgatgcattctgtggaggctctatcgttaatgaaaaatggattgtaactgctgcccactgtgttgaaactggtgttaaaattacagttgtcgcaggtgaacataatattgaggagacagaacatacagagcaaaagcgaaatgtgattcgaattattcctcaccacaactacaatgcagctattaataagtacaaccatgacattgcccttctggaactggacgaacccttagtgctaaacagctacgttacacctatttgcattgctgacaaggaatacacgaacatcttcctcaaatttggatctggctatgtaagtggctggggaagagtcttccacaaagggagatcagctttagttcttcagtaccttagagttccacttgttgaccgagccacatgtcttcgatctacaaagttcaccatctataacaacatgttctgtgctggcttccatgaaggaggtagagattcatgtcaaggagatagtgggggaccccatgttactgaagtggaagggaccagtttcttaactggaattattagctggggtgaagagtgtgcaatgaaaggcaaatatggaatatataccaaggtatcccggtatgtcaactggattaaggaaaaaacaaagctcacttaatgaaagatggatttccaaggttaattcattggaattgaaaattaacagggcctctcactaactaatcactttcccatcttttgttagatttgaatatatacattctatgatcattgctttttctctttacaggggagaatttcatattttacctgagcaaattgattagaaaatggaaccactagaggaatataatgtgttaggaaattacagtcatttctaagggcccagcccttgacaaaattgtgaagttaaattctccactctgtccatcagatactatggttctccactatggcaactaactcactcaattttccctccttagcagcattccatcttcccgatcttctttgcttctccaaccaaaacatcaatgtttattagttctgtatacagtacaggatctttggtctactctatcacaaggccagtaccacactcatgaagaaagaacacaggagtagctgagaggctaaaactcatcaaaaacactactccttttcctctaccctattcctcaatcttttaccttttccaaatcccaatccccaaatcagtttttctctttcttactccctctctcccttttaccctccatggtcgttaaaggagagatggggagcatcattctgttatacttctgtacacagttatacatgtctatcaaacccagacttgcttccatagtggagacttgcttttcagaacatagggatgaagtaaggtgcctgaaaagtttgggggaaaagtttctttcagagagttaagttattttatatatataatatatatataaaatatataatatacaatataaatatatagtgtgtgtgtgtatgcgtgtgtgtagacacacacgcatacacacatataatggaagcaataagccattctaagagcttgtatggttatggaggtctgactaggcatgatttcacgaaggcaagattggcatatcattgtaactaaaaaagctgacattgacccagacatattgtactctttctacagctagtagagactttgaggaagaattcaacagtgtgtcttcagcagtgttcagagccaagcaagaagttgaagttgcctagaccagaggacataagtatcatgtctcctttaactagcataccccgaagtggagaagggtgcagcaggctcaaaggcataagtcattccaatcagccaactaagttgtccttttctggtttcgtgttcaccatggaacattttgattatagttaatccttctatcttgaatcttctagagagttgctgaccaactgacgtatgtttccctttgtgaattaataaactggtgttctggttcat

SEQ ID NO: 53682 - DNA, 2692 bp, Homo sapiens
accactttcacaatctgctagcaaaggttatgcagcgcgtgaacatgatcatggcagaatcaccaggcctcatcaccatctgccttttaggatatctactcagtgctgaatgtacagtttttcttgatcatgaaaacgccaacaaaattctgaatcggccaaagaggtataattcaggtaaattggaagagtttgttcaagggaaccttgagagagaatgtatggaagaaaagtgtagttttgaagaagcacgagaagtttttgaaaacactgaaagaacaactgaattttggaagcagtatgttgatggagatcagtgtgagtccaatccatgtttaaatggcggcagttgcaaggatgacattaattcctatgaatgttggtgtccctttggatttgaaggaaagaactgtgaattagatgtaacatgtaacattaagaatggcagatgcgagcagttttgtaaaaatagtgctgataacaaggtggtttgctcctgtactgagggatatcgacttgcagaaaaccagaagtcctgtgaaccagcagtgccatttccatgtggaagagtttctgttattctactgaagctgaaaccattttggataacatcactcaaagcacccaatcatttaatgacttcactcgggttgttggtggagaagatgccaaaccaggtcaattcccttggcaggttgttttgaatggtaaagttgatgcattctgtggaggctctatcgttaatgaaaaatggattgtaactgctgcccactgtgttgaaactggtgttaaaattacagttgtcgcaggtgaacataatattgaggagacagaacatacagagcaaaagcgaaatgtgattcgaattattcctcaccacaactacaatgcagctattaataagtacaaccatgacattgcccttctggaactggacgaacccttagtgctaaacagctacgttacacctatttgcattgctgacaaggaatacacgaacatcttcctcaaatttggatctggctatgtaagtggctggggaagagtcttccacaaagggagatcagctttagttcttcagtaccttagagttccacttgttgaccgagccacatgtcttcgatctacaaagttcaccatctataacaacatgttctgtgctggcttccatgaaggaggtagagattcatgtcaaggagatagtgggggaccccatgttactgaagtggaagggaccagtttcttaactggaattattagctggggtgaagagtgtgcaatgaaaggcaaatatggaatatataccaaggtatcccggtatgtcaactggattaaggaaaaaacaaagctcacttaatgaaagatggatttccaaggttaattcattggaattgaaaattaacagggcctctcactaactaatcactttcccatcttttgttagatttgaatatatacattctatgatcattgctttttctctttacaggggagaatttcatattttacctgagcaaattgattagaaaatggaaccactagaggaatataatgtgttaggaaattacagtcatttctaagggcccagcccttgacaaaattgtgaagttaaattctccactctgtccatcagatactatggttctccactatggcaactaactcactcaattttccctccttagcagcattccatcttcccgatcttctttgcttctccaaccaaaacatcaatgtttattagttctgtatacagtacaggatctttggtctactctatcacaaggccagtaccacactcatgaagaaagaacacaggagtagctgagaggctaaaactcatcaaaaacactactccttttcctctaccctattcctcaatcttttaccttttccaaatcccaatccccaaatcagtttttctctttcttactccctctctcccttttaccctccatggtcgttaaaggagagatggggagcatcattctgttatacttctgtacacagttatacatgtctatcaaacccagacttgcttccatagtggagacttgcttttcagaacatagggatgaagtaaggtgcctgaaaagtttgggggaaaagtttctttcagagagttaagttattttatatatataatatatatataaaatatataatatacaatataaatatatagtgtgtgtgtgtatgcgtgtgtgtagacacacacgcatacacacatataatggaagcaataagccattctaagagcttgtatggttatggaggtctgactaggcatgatttcacgaaggcaagattggcatatcattgtaactaaaaaagctgacattgacccagacatattgtactctttctacagctagtagagactttgaggaagaattcaacagtgtgtcttcagcagtgttcagagccaagcaagaagttgaagttgcctagaccagaggacataagtatcatgtctcctttaactagcataccccgaagtggagaagggtgcagcaggctcaaaggcataagtcattccaatcagccaactaagttgtccttttctggtttcgtgttcaccatggaacattttgattatagttaatccttctatcttgaatcttctagagagttgctgaccaactgacgtatgtttccctttgtgaattaataaactggtgttctggttcat

SEQ ID NO: 53683 - DNA, 2725 bp, Homo sapiens
accactttcacaatctgctagcaaaggttatgcagcgcgtgaacatgatcatggcagaatcaccaggcctcatcaccatctgccttttaggatatctactcagtgctgaatgtacagtttttcttgatcatgaaaacgccaacaaaattctgaatcggccaaagaggtataattcaggtaaattggaagagtttgttcaagggaaccttgagagagaatgtatggaagaaaagtgtagttttgaagaagcacgagaagtttttgaaaacactgaaagaacaatggagatcagtgtgagtccaatccatgtttaaatggcggcagttgcaaggatgacattaattcctatgaatgttggtgtccctttggatttgaaggaaagaactgtgaattagatgtaacatgtaacattaagaatggcagatgcgagcagttttgtaaaaatagtgctgataacaaggtggtttgctcctgtactgagggatatcgacttgcagaaaaccagaagtcctgtgaaccagcagtgccatttccatgtggaagagtttctgtttcacaaacttctaagctcacccgtgctgagactgtttttcctgatgtggactatgtaaattctactgaagctgaaaccattttggataacatcactcaaagcacccaatcatttaatgacttcactcgggttgttggtggagaagatgccaaaccaggtcaattcccttggcaggttgttttgaatggtaaagttgatgcattctgtggaggctctatcgttaatgaaaaatggattgtaactgctgcccactgtgttgaaactggtgttaaaattacagttgtcgcaggtgaacataatattgaggagacagaacatacagagcaaaagcgaaatgtgattcgaattattcctcaccacaactacaatgcagctattaataagtacaaccatgacattgcccttctggaactggacgaacccttagtgctaaacagctacgttacacctatttgcattgctgacaaggaatacacgaacatcttcctcaaatttggatctggctatgtaagtggctggggaagagtcttccacaaagggagatcagctttagttcttcagtaccttagagttccacttgttgaccgagccacatgtcttcgatctacaaagttcaccatctataacaacatgttctgtgctggcttccatgaaggaggtagagattcatgtcaaggagatagtgggggaccccatgttactgaagtggaagggaccagtttcttaactggaattattagctggggtgaagagtgtgcaatgaaaggcaaatatggaatatataccaaggtatcccggtatgtcaactggattaaggaaaaaacaaagctcacttaatgaaagatggatttccaaggttaattcattggaattgaaaattaacagggcctctcactaactaatcactttcccatcttttgttagatttgaatatatacattctatgatcattgctttttctctttacaggggagaatttcatattttacctgagcaaattgattagaaaatggaaccactagaggaatataatgtgttaggaaattacagtcatttctaagggcccagcccttgacaaaattgtgaagttaaattctccactctgtccatcagatactatggttctccactatggcaactaactcactcaattttccctccttagcagcattccatcttcccgatcttctttgcttctccaaccaaaacatcaatgtttattagttctgtatacagtacaggatctttggtctactctatcacaaggccagtaccacactcatgaagaaagaacacaggagtagctgagaggctaaaactcatcaaaaacactactccttttcctctaccctattcctcaatcttttaccttttccaaatcccaatccccaaatcagtttttctctttcttactccctctctcccttttaccctccatggtcgttaaaggagagatggggagcatcattctgttatacttctgtacacagttatacatgtctatcaaacccagacttgcttccatagtggagacttgcttttcagaacatagggatgaagtaaggtgcctgaaaagtttgggggaaaagtttctttcagagagttaagttattttatatatataatatatatataaaatatataatatacaatataaatatatagtgtgtgtgtgtatgcgtgtgtgtagacacacacgcatacacacatataatggaagcaataagccattctaagagcttgtatggttatggaggtctgactaggcatgatttcacgaaggcaagattggcatatcattgtaactaaaaaagctgacattgacccagacatattgtactctttctacagctagtagagactttgaggaagaattcaacagtgtgtcttcagcagtgttcagagccaagcaagaagttgaagttgcctagaccagaggacataagtatcatgtctcctttaactagcataccccgaagtggagaagggtgcagcaggctcaaaggcataagtcattccaatcagccaactaagttgtccttttctggtttcgtgttcaccatggaacattttgattatagttaatccttctatcttgaatcttctagagagttgctgaccaactgacgtatgtttccctttgtgaattaataaactggtgttctggttcat

SEQ ID NO: 53684 - DNA, 788 bp, Homo sapiens
ccggcacgaggccaggagttgtgagtttccaagccccagctcactctgaccacttctctgcctgcccagcatcatgaagggccttgcagctgccctccttgtcctcgtctgcaccatggccctctgctcctgtgcacaagttggtaccaacaaagagctctgctgcctcgtctatacctcctggcagattccacaaaagttcatagttgactattctgaaaccagcccccagtgccccaagccaggtgtcatcctcctaaccaagagaggccggcagatctgtgctgaccccaataagaagtgggtccagaaatacatcagcgacctgaagctgaatgcctgaggggcctggaagctgcgagggcccagtgaacttggtgggcccaggagggaacaggagcctgagccagggcaatggccctgccaccctggaggccacctcttctaagagtcccatctgctatgcccagccacattaactaactttaatcttagtttatgcatcatatttcattttgaaattgatttctattgttgagctgcattatgaaattagtattttctctgacatctcatgacattgtctttatcatcctttcccctttcccttcaactcttcgtacattcaatgcatggatcaatcagtgtgattagctttctcagcagacattgtgccatatgtatcaaatgacaaatctttattgaatggttttgctcagcaccaccttttaatatattggcagtacttattatataaaaggtaaaccagcattctcactgtgacgact

SEQ ID NO: 53685 - DNA, 300 bp, Homo sapiens
ggcacgaggccaggagttgtgagtttccaagccccagctcactctgaccacttctctgcctgcccagcatcatgaagggccttgcagctgccctccttgtcctcgtctgcaccatggccctctgctcctgtgcacaaggtgagtctgtcatccatgtgctttgatggctccctgggcagaagtcaggcgacatcttccaagtgctgtggcctgaaaaccctcgtgtgaaattagggatcctcaaatggggtttcaaagtgacatcattgttttcttcaagaaggttgaaaagcagtctat

SEQ ID NO: 53686 - DNA, 1746 bp, Homo sapiens
cacccacttccgggtctcctctgtttacgaatgtttgggcgcgaattactctaagcgcggctctcagaagggtgcaagaagaatcagtgcactgtgtttagatcaagatgtctggtaaagcaaatgcttccaagaaaaacgctcaacagttaaaaagaaatccaaagagaaaaaaggataatgaggaagttgtgttgtcagagaataaggttagaaacacagtgaaaaaaaataaaaatcatctgaaagatctgtcttctgaaggacaaacaaagcacactaacctaaaacacggaaagacagcagccagcaagagaaaaacctggcaacctctgtcaaagagtaccagagaccatttgcaaactatgatggaatcagtaataatgacaattttgagtaacagtattaaagaaaaagaagaaatacaataccatctcaacttcctgaagaaaagattgctacaacagtgtgaaactctgaaagtccctcccaaaaagatggaagatttaactaatgtatcaagtctactgaatatggaaagggcacgagacaaagctaatgaagaaggtctggcattactacaggaagaaatagataaaatggtagagaccacagagttaatgactgggaatattcagagcctaaagaacaaaattcagattctggcaagtgaggtggaagaagaagaggagagagtaaaacagatgcatcaaataaatagtagtggagtactctctcttccggaactttctcagaaaactctcaaagcacccacacttcagaaagaaattttggcgctaattccaaaccagaatgctcttctaaaggacttggatattcttcataattcatcacagatgaagagcatgtcaaccttcattgaagaagcctataagaaactggatgcatcttaaagagtgttttttttttagattgttccatattaatttaatgttcgtgaatttgtaaaactgttaacctatgattatatgtacagaggctaaggcttctgcaggatttattatctcctgatatgcactttaaaattagtctttgtagttctatcattagcatctaatgtagttctgaagactgtttttagcagttgccaaatctaggaaactaacatttatattgctgtatctataagtatttgcctaaaaccataaaataggaattgccttaaggatctaatagtttataatgcctgaatggaactcatttattggttaacagctcatatcaggagctgtgataagtaagtgtttacatacactgtctagtgcataaaaaccttagtgtttgctatcattcattctgtagccaatggcttacagtttctgtctggtcatctggaacttgaaaaatcctcaaatgccttcactcttttacctaactccctagtctttttgggaagtagttaagatatgcctgctatctttaactttggaggtagtatcaaaattttacttctttggttgtttagtgaattaatgttgaatattttctactgtcatcaaaacatattcccaaaaagtattaaaaaggaaccttagcacatttattttattaaaacaagaaaacccaaaatatataaaccttttcttattatgataataagcttatatatgtgaataagttataacctagtgtataaaaaattatttctaacaaactacagtatactgtcttgggttgtttttttttttttagtctgtaaaataaaatgactgcaattacttttta

SEQ ID NO: 53687 - DNA, 2041 bp, Homo sapiens
tttagaagccaaaatatatttcttgaggaagactactctcccagcaatagttctgcatccagtatttggaaaagacatagatatagcatcaactttattgctgaacaagatttaagagttattacttatgtatattttctgtgtggcttatttacttgttccccaaagcatacaggcaatgttatcattgactgttgctaggaccatatttgaaagcagtgccatgtttaataccctttagaaacctggaggcttgctaattttaattttatacttggcctgcacacaacacatccttgatgtgttgtccccatacttgttttattcatttcttattttcttttcatcttcctctctaaattatgtattcctttaatgtgggaaactgttactctttttttttattctccctgctctaatgcccaacattacttccttttgacaaattaaaatagcaggctcttaaatgttcctaaataaatgaaaacaattcagaatttctccactacatgaagttttatgctgcttaaggaaggttgctgtatttgttgtcatcagttctgggctctgctagatttacacttggatcttccaggatctctgaccctaccagcattggtacgttttgaggaagtgttcatgtacatctccttattccagggaaattagatatccttataacacattaataccttgacataccagctttccaagaagtctcttttttgaaagaaacaaaagtaaattcaccagttgcttctaaaaatgttttaaatatatatggtgtttttttaaaatgtgtatgtataacaatatctattaggatttaatataataatgtgtttaagttaaaatgttttttttctctttctgactcaggaagaaatagataaaatggtagagaccacagagttaatgactgggaatattcagagcctaaagaacaaaattcagattctggcaagtgaggtggaagaagaagaggagagagtaaaacagatgcatcaaataaatagtagtggagtactctctcttccggaactttctcagaaaactctcaaagcacccacacttcagaaagaaattttggcgctaattccaaaccagaatgctcttctaaaggacttggatattcttcataattcatcacagatgaagagcatgtcaaccttcattgaagaagcctataagaaactggatgcatcttaaagagtgttttttttttagattgttccatattaatttaatgttcgtgaatttgtaaaactgttaacctatgattatatgtacagaggctaaggcttctgcaggatttattatctcctgatatgcactttaaaattagtctttgtagttctatcattagcatctaatgtagttctgaagactgtttttagcagttgccaaatctaggaaactaacatttatattgctgtatctataagtatttgcctaaaaccataaaataggaattgccttaaggatctaatagtttataatgcctgaatggaactcatttattggttaacagctcatatcaggagctgtgataagtaagtgtttacatacactgtctagtgcataaaaaccttagtgtttgctatcattcattctgtagccaatggcttacagtttctgtctggtcatctggaacttgaaaaatcctcaaatgccttcactcttttacctaactccctagtctttttgggaagtagttaagatatgcctgctatctttaactttggaggtagtatcaaaattttacttctttggttgtttagtgaattaatgttgaatattttctactgtcatcaaaacatattcccaaaaagtattaaaaaggaaccttagcacatttattttattaaaacaagaaaacccaaaatatataaaccttttcttattatgataataagcttatatatgtgaataagttataacctagtgtataaaaaattatttctaacaaactacagtatactgtcttgggttgtttttttttttttagtctgtaaaataaaatgactgcaattacttttta

SEQ ID NO: 53688 - DNA, 1614 bp, Homo sapiens
agattttttttttttcgaagcactgtgtttagatcaagatgtctggtaaagcaaatgcttccaagaaaaacgctcaacagttaaaaagaaatccaaagagaaaaaaggataatgaggaagttgtgttgtcagagaataaggttagaaacacagtgaaaaaaaataaaaatcatctgaaagatctgtcttctgaaggacaaacaaagcacactaacctaaaacacggaaagacagcagccagcaagagaaaaacctggcaacctctgtcaaagagtaccagagaccatttgcaaactatgatggaatcagtaataatgacaattttgagtaacagtattaaagaaaaagaagaaatacaataccatctcaacttcctgaagaaaagattgctacaacagtgtgaaactctgaaagtccctcccaaaaagatggaagatttaactaatgtatcaagtctactgaatatggaaagggcacgagacaaagctaatgaagaaggtctggcattactacagaacaaaattcagattctggcaagtgaggtggaagaagaagaggagagagtaaaacagatgcatcaaataaatagtagtggagtactctctcttccggaactttctcagaaaactctcaaagcacccacacttcagaaagaaattttggcgctaattccaaaccagaatgctcttctaaaggacttggatattcttcataattcatcacagatgaagagcatgtcaaccttcattgaagaagcctataagaaactggatgcatcttaaagagtgttttttttttagattgttccatattaatttaatgttcgtgaatttgtaaaactgttaacctatgattatatgtacagaggctaaggcttctgcaggatttattatctcctgatatgcactttaaaattagtctttgtagttctatcattagcatctaatgtagttctgaagactgtttttagcagttgccaaatctaggaaactaacatttatattgctgtatctataagtatttgcctaaaaccataaaataggaattgccttaaggatctaatagtttataatgcctgaatggaactcatttattggttaacagctcatatcaggagctgtgataagtaagtgtttacatacactgtctagtgcataaaaaccttagtgtttgctatcattcattctgtagccaatggcttacagtttctgtctggtcatctggaacttgaaaaatcctcaaatgccttcactcttttacctaactccctagtctttttgggaagtagttaagatatgcctgctatctttaactttggaggtagtatcaaaattttacttctttggttgtttagtgaattaatgttgaatattttctactgtcatcaaaacatattcccaaaaagtattaaaaaggaaccttagcacatttattttattaaaacaagaaaacccaaaatatataaaccttttcttattatgataataagcttatatatgtgaataagttataacctagtgtataaaaaattatttctaacaaactacagtatactgtcttgggttgtttttttttttttagtctgtaaaataaaatgactgcaattacttttta

SEQ ID NO: 53689 - DNA, 1348 bp, Homo sapiens
acaaaattagccaggtgtggtggcacatgcctgtaatcccagctattcgggaggctgaggcaggagaattgcttgaacctgggagctggaggttgcagtgagccaggactgcgccattgtactccagcctgggcaagaagagcaaaactccacctcaaaaaaacaaaaacaaacaaacaaacaaatcctatcatttaccagtggtgaaaggagcaggatggggagagggagagatagatttgaaagaagaatggcgattcgttgacaattattgaagttggatgatagatacttaaggtttattttactgttctctctaacatacatttgagatttctcataataaaatgttaacaactacatttaatactatctttcccacagaaagaaattttggcgctaattccaaaccagaatgctcttctaaaggacttggatattcttcataattcatcacagatgaagagcatgtcaaccttcattgaagaagcctataagaaactggatgcatcttaaagagtgttttttttttagattgttccatattaatttaatgttcgtgaatttgtaaaactgttaacctatgattatatgtacagaggctaaggcttctgcaggatttattatctcctgatatgcactttaaaattagtctttgtagttctatcattagcatctaatgtagttctgaagactgtttttagcagttgccaaatctaggaaactaacatttatattgctgtatctataagtatttgcctaaaaccataaaataggaattgccttaaggatctaatagtttataatgcctgaatggaactcatttattggttaacagctcatatcaggagctgtgataagtaagtgtttacatacactgtctagtgcataaaaaccttagtgtttgctatcattcattctgtagccaatggcttacagtttctgtctggtcatctggaacttgaaaaatcctcaaatgccttcactcttttacctaactccctagtctttttgggaagtagttaagatatgcctgctatctttaactttggaggtagtatcaaaattttacttctttggttgtttagtgaattaatgttgaatattttctactgtcatcaaaacatattcccaaaaagtattaaaaaggaaccttagcacatttattttattaaaacaagaaaacccaaaatatataaaccttttcttattatgataataagcttatatatgtgaataagttataacctagtgtataaaaaattatttctaacaaactacagtatactgtcttgggttgtttttttttttttagtctgtaaaataaaatgactgcaattacttttta

SEQ ID NO: 53690 - DNA, 390 bp, Homo sapiens
aaaagagaatgtggaacatttacaggatagttttttaaacaaaacattgtgcaaggctttagctttttttgtattattttcatctttacagattttttttttttcgaagcactgtgtttagatcaagatgtctggtaaagcaaatgcttccaagaaaaacgctcaacagttaaaaagaaatccaaagagaaaaaaggataatgaggaagttgtgttgtcagagaataaggtaatgaaaatatcaagtttctcatttagaaatcttcaactgtggccaagcactatggctcatgcctgtaatcccagcactttgggaggccgaggtgggtggatcacgaggtcaggagatcgaaaccatcctggctaacatgatgaaaccccgtctctact

SEQ ID NO: 53691 - DNA, 709 bp, Homo sapiens
cacccacttccgggtctcctctgtttacgaatgtttgggcgcgaattactctaagcgcggctctcagaagggtgcaagaagaatcagtgcactgtgtttagatcaagatgtctggtaaagcaaatgcttccaagaaaaacgctcaacagttaaaaagaaatccaaagagaaaaaaggataatgaggaagttgtgttgtcagagaataaggttagaaacacagtgaaaaaaaataaaaatcatctgaaagatctgtcttctgaaggacaaacaaagcacactaacctaaaacacggaaagacagcagccagcaagagaaaaacctggcaacctctgtcaaagagtaccagagaccatttgcaaactatgatggaatcagtaataatgacaattttgagtaacagtattaaagaaaaagaagaaatacaataccatctcaacttcctgaagaaaagcttgctttctttagttcctgaagtcaccatacccaagatacagttacttctaccaatacaacaaagtacaacattagcaaactgatcctaattggaactctaaatacatttttctgtagcagtgtttctgaaagtatatttgaaacacttgttcttacagatagtctatggataaaagtaacctatggtgaattatatttgggtaccttagcatgtaagaagccctgcagtaaataaatctatttcattttcttt

SEQ ID NO: 53692 - DNA, 1673 bp, Homo sapiens
cacccacttccgggtctcctctgtttacgaatgtttgggcgcgaattactctaagcgcggctctcagaagggtgcaagaagaatcagtgcactgtgtttagatcaagatgtctggtaaagcaaatgcttccaagaaaaacgctcaacagttaaaaagaaatccaaagagaaaaaaggataatgaggaagttgtgttgtcagagaataaggttagaaacacagtgaaaaaaaataaaaatcatctgaaagatctgtcttctgaaggacaaacaaagcacactaacctaaaacacggaaagacagcagccagcaagagaaaaacctggcaacctctgtcaaagagtaccagagaccatttgcaaactatgatggaatcagtaataatgacaattttgagtaacagtattaaagaaaaagaagaaatacaataccatctcaacttcctgaagaaaagattgctacaacagtgtgaaactctgaaagtccctcccaaaaagatggaagatttaactaatgtatcaagtctactgaatatggaaagggcacgagacaaagctaatgaagaaggtctggcattactacaggaagaaatagataaaatggtagagaccacagagttaatgactgggaatattcagagcctaaagaacaaaattcagattctggcaagtgaggtggaagaagaagaggagagagtaaaacagatgcatcaaataaatagtagtggagtactctctcttccggaactttctcagaaaactctcaaagcacccacacttcagaaagaaattttggcgctaattccaaaccagaatgctcttctaaaggacttggatattcttcataattcatcacagatgaagagcatgtcaaccttcattgaagaagcctataagaaactggatgcatcttaaagagtgttttttttttagattgttccatattaatttaatgttcgtgaatttgtaaaactgttaacctatgattatatgtacagaggctaaggcttctgcaggatttattatctcctgatatgcactttaaaattagtctttgtagttctatcattagcatctaatgtagttctgaagactgtttttagcagttgccaaatctaggaaactaacatttatattgctgtatctataagtatttgcctaaaaccataaaataggaattgccttaaggatctaatagtttataatgcctgaatggaactcatttattggttaacagctcatatcaggagctgtgataagtaagtgtttacatacactgtctagtgcataaaaaccttagtgtttgctatcattcattctgtagccaatggcttacagtttctgtctggtcatctggaacttgaaaaatcctcaaatgccttcactcttttacctaactccctagtctttttgggaagtagttaagatatgcctgctatctttaactttggaggtagtatcaaaattttacttctttggttgtttagtgaattaatgttgaatattttctactgtcatcaaaacatattcccaaaaagtattaaaaaggaaccttagcacatttattttattaaaacaagaaaacccaaaatatataaaccttttcttattatgataataagcttatatatgtgaataagttataacctagtgtataaaaaattatttctaaca

SEQ ID NO: 53693 - DNA, 1104 bp, Homo sapiens
tcttcactgtgttgcccaggctggtctcaaactcctgagctcaagcaatcctcccatctcagccatctcagtgctgggattacaggcatgagccaccacacccaacaagctaagaatggcttttacatttaaaaaatgtgttgttaagtacacacacactcacgaatacattaacaggaccatttttggcccacagagcctaaatatttaatatgtagccttcttcaaaaaaaaatttgccatatctagaactagagaacaagcttcagaccaaaacaaccagaaacactggtgtaagaactggagcaaagcactaaacacagagctacttagcaaatcaattctaaagaagactttcagggagaattcaatatgtaatggctatatggcccaacagtgaacatgaagatgtataaacttttttcataagtttcatagtagcaatcataattagtaattatgtctaagtgatcataattagtagtggtggtactggcactgcaactctgagactgctgtgtatatatgagatgaatcaaatgggatagtctatcattccctgttgtcttttagggggatctagtttttgcgatgcatttaataggctattcattcactacaattctcaaggaaaacattcttgttaaagccagttcattttggactaatagcagattatcaaatctggtcatctaccttatttggcctgagatcctcttggtggttttcaacaaattcaccctcagaagacaaagcttttgagatgcaggatatactgcagcgtgaccaaattctaaggcctcaaaagagaattctagtcccagttctatgactatttagctgtgccacaactctctagacctgcttacctaactttttaaaatttatttatttatttatttatttatttgagacagtctcactctgtcaccaggctggaatgcagtggcgtgatctcggctcactgcaacctccacctcccaggctcaagcgactctccttcctcagcctcccgaggagttgggaccacaggtttgttctaccacgcctggctaatttttgtatttttagtacagacagtttcaccatgttggccaggctggt

SEQ ID NO: 53694 - DNA, 1159 bp, Homo sapiens
tcttcactgtgttgcccaggctggtctcaaactcctgagctcaagcaatcctcccatctcagccatctcagtgctgggattacaggcatgagccaccacacccaacaagctaagaatggcttttacatttaaaaaatgtgttgttaagtacacacacactcacgaatacattaacaggaccatttttggcccacagagcctaaatatttaatatgtagccttcttcaaaaaaaaatttgccatatctagaactagagaacaagcttcagaccaaaacaaccagaaacactggtgtaagaactggagcaaagcactaaacacagagctacttagcaaatcaattctaaagaagactttcagggagaattcaatatgtaatggctatatggcccaacagtgaacatgaagatgtagtacaccaaaaaaggagggggcaggatgagaaaagcatcttcaatttaaaaattttaaacttttttcataagtttcatagtagcaatcataattagtaattatgtctaagtgatcataattagtagtggtggtactggcactgcaactctgagactgctgtgtatatatgagatgaatcaaatgggatagtctatcattccctgttgtcttttagggggatctagtttttgcgatgcatttaataggctattcattcactacaattctcaaggaaaacattcttgttaaagccagttcattttggactaatagcagattatcaaatctggtcatctaccttatttggcctgagatcctcttggtggttttcaacaaattcaccctcagaagacaaagcttttgagatgcaggatatactgcagcgtgaccaaattctaaggcctcaaaagagaattctagtcccagttctatgactatttagctgtgccacaactctctagacctgcttacctaactttttaaaatttatttatttatttatttatttatttgagacagtctcactctgtcaccaggctggaatgcagtggcgtgatctcggctcactgcaacctccacctcccaggctcaagcgactctccttcctcagcctcccgaggagttgggaccacaggtttgttctaccacgcctggctaatttttgtatttttagtacagacagtttcaccatgttggccaggctggt

SEQ ID NO: 53695 - DNA, 141 bp, Homo sapiens
aatggggactcctagaagccagaggccatgttctcttcatctcaggacccccttcaccagcaccagtctttctgacccccagccaggacccagtgcataagaaatgtgaattactgagccagctctggctgagcctggatg

SEQ ID NO: 53696 - DNA, 241 bp, Homo sapiens
cgtcctgacaggctgcccttggcttgcactaccggcctggatcccatgcctgccaagggtgagccaagcatggagggccgaggagtgtgtgagcgagcatagggtttggccactgtgtacagccaggcacaccagttgtggtagggtgggcagctcctggcaccggcttgggtgttagctccctgcaaggttgcagctggaccatgcataccacaagcatcttccacggctggcactaggg

SEQ ID NO: 53697 - DNA, 512 bp, Homo sapiens
acccatctgtgatccatcttgaccttttttctcctctctcagctgttcatcagggagcctccactgcagccataggcatgggtacttgctgagggagaggaaacaatagtggtgatgtgggggtctgagccacctgctcatatagctcctggtgatctctggctctgcttgtacttcatactgaatgaaccacttgcatcttagagactcacctaaaagagcccagctcatcatgggtggctctcttcagccacagtaaatgcctgaagagggacttggctgagtcctcagcagccaacactttgacagctgggggagtgagtacctcgtccttaaaagggaaattaggaaagtgcattacagagcccacatcagcatcgaatctccaacacaagtctatgaagaagctagggatggcattaatactgccatcttgcagatcaagaatctgaagtatcacaaggttaaacaacttcttcagttcatggaaaatcaatccagcctcagaacaa

SEQ ID NO: 53698 - DNA, 449 bp, Homo sapiens
taggccacaggatccacctacacttcagaagcaaagaaatgatgttgagagaagctaaatgaatgttccaaggtgacacactggcacgagtgaattgtgctgggtggttggcaaagccaggcattttcaggggcttttctgtgatcttatcctgtctcttaaaagcagctggtactcctgactccctactctaggttatgccaaacagaggttgaggcctgagacagacatttgtcctcttgccctggagctaagcaatagcttctgtattgtgtttgcccgcagaggaccacagggtgtcactcagtcaccttggccagcgccacttagaatgcatctgtaccgagcctcacttatgcctcctgccctcactgccctcactggaagcaccttccccacctgcccctcagaaaggcccccacaggacctgggggcctgggctttgcaga

SEQ ID NO: 53699 - DNA, 630 bp, Homo sapiens
gtttttaaggttcacaagtgtgccgtgtgtggcttcaccaccgaaaacctgctgcagttccacgaacacatccctcagcacaaatcggatggttctttctaccagtgccgggagtgtggcctctgctacatgtcacgtctctctgtccaggcacctctttgttgtacacaagttaaaggaacctcagccagtgtccaagcaaaacggggctggggaagataaccaacaggagaacaaacccagtcacgaggatgaatctcccaatggcgccatgtcagacagaaagtgcaaagtgtgcgcaaaaacttttgaaactgaagctgccttaaacactcacatgcagacacatggtatggccttcatcaaatccaaaaggatgagctcagacgagaaatagccacagacgctccatgaggaaaatccctgtccacattggcataagacacttttgttacacaaagtttgcagtataatagagttaacaatactgtctaggctgttgcaatatattctctttcaacgtgccttccttcttcatcttgtcatatatatcctcattaagtattaaaacagattttgagtttaaaagagtttgtatatatttaaatgaataactttttatactctttg

SEQ ID NO: 53700 - DNA, 362 bp, Homo sapiens
cgcagccagagacaacatgtaaacagcggagcagggctccgttcccacagcgcgggatctgggtcccagtttgcacagccctgagtcgagggtggatccaatccaggtctgatacagcatttcaatggtgatgccgcagccttccacactgaggcacttaacaccccattgttcccaattgcattttaactgaaaaaatacaaaaagagatcaaaactgaaagtgcagtttcctcatggtcccaccacattttggagaagtgtataaatggagaagtgaaagctccatcttctgccccttccccatgagagagcctctattcacagccaggtcagtttcttccagactgttaacatccgtgt

SEQ ID NO: 53701 - DNA, 787 bp, Homo sapiens
atttaatttttataaagaaaaacttagggctttagatgctttcagtaaaatttaaagcctactgaagttttgtttagattttagtttaaatctatgattgtcttgatttattgatcttctttgactggtggagtagaaagaaataactttctctatgcacagattttatacaaaaacgatttttctcagtgctttctgttttatttagatgtttggaagccaaattctgtgtgtcttgttcacatagtagtaagaagtagcaagaagactataacttaaatagacaaaaagttattgttggggcattgtatatcatatggagctgtactttctagaatttctagggtactttatgtttcttgctccctaaaaagaaaaacaaattagttatataatagtaaattaaaattgtataatataagccctacatgggtatttgtggcaattcaggagtaattgctttatcatcattctgttcagaagtaattgcattgcttttggtgactgtagcttacatttagaattcagtcagttgggtcatatgccatttttataaatggagaatataatgccataaactgtaaatttttgaagatatatggattctgattttgctgaatattttaggttttttgtttgttgtaaaaactgtatttctaccaaaggaatagaatgttaaatgcttattcagtaagaattctaaagcatgagttaagttggaataaatgacttaaaattatttcttaatttgttatgaataaactttttttgaagtttaaatctgagt

SEQ ID NO: 53702 - DNA, 460 bp, Homo sapiens
agtctttgattattaaccactagccccatttgaaaccccatcgcatttgatggcaatggaccttatgaagagaaccaaagtaccaattaggccaaactgcacacgggcttggatggacaggctcagaattcattttccagccgttgcgagggctcacactgactcatccacattcccacctggctttccagagggaactatgctaaaatgatgctaaagagaccagactgctttctttttttgtgcgtgtgacagagtctcgctctgtcacccaggctagagtgcagtggcacaaccacggctccctgcagcatcaacctcccagattaatcaatcctcccacctcagcctcctgagtagctgggaccacaggtacacaccactgtgcccagctaatttttgtgatttttgtaaagattgagtccccctgtgttgcccaggctggtctcaaactcctggg

SEQ ID NO: 53703 - DNA, 535 bp, Homo sapiens
ttgatttttgcacaggaaatagtcacatgtacaaactcaaaagataaaaagagtatacatatagtgaaaagtctcccactcctgtctcttagccactcagttttccctcttgaatgtagccaaggttactaatgcatagatatgttatgcgtatacaaggatgtacacatatattttgtaaatataagtatacataaagagcttctactaatttttttctactacataatattctgtgtagatatattataattttttaggcagtcccttatttgtgaacatgtaggttgttcctaatctttttcttttgtaaatgatacctattttgcacatttgtgagtatacctgtagaataaaatcatagggctagaattgctgagttaagaggtatatgcattttttatttttatgttttttagagatgaggatctcactatattacccaggctggcctcaagcttctgggcccaagtgctaccatagataccactgcactccagcctgggtgacagagcgagacactgtctcaaaaaaa

SEQ ID NO: 53704 - DNA, 510 bp, Homo sapiens
aacaaatattatgtgccaacacttacaaatagtaactcatttaattattttaaccttgctggtagatatggttattctcctctctccctcatagatggggaaactcaggcaagatgaagttaagtaacttgcgcagggtcatacacgagtggcagggccagagtctgaatccagacagttggctccagacgccagactcctagccactgctttgtgctgcccctctttcctctgctagttaagtcgaaaaagttgtttgtgattctgcatcttgctttcctcttctcttattaattatagtataatgggtgtcactcttattaccataagccttagtatggcattgcgagcaccagttaattaagcaataacgttttgagatccctaattggaagaattcagagcggtgtattgctttgagttagttggccctttgctgcaactctggccatgagacaacgttatcttgaatagtgataatgtgtaaaaagatgaggcctcctttttttt

SEQ ID NO: 53705 - DNA, 4520 bp, Homo sapiens
gcggagccaaggcacacgggtctgacccttgggccggcccggagcaagtgacacggaccggtcgcctatcctgaccacagcaaagcggcccggagcccgcggaggggacctgacgggggcgtaggcgccggaaggctgggggccccggagccgggccggcgtggcccgagttccggtgagcggacggcggcgcgcgcagatttgataatgggctgcattaaaagtaaagaaaacaaaagtccagccattaaatacagacctgaaaatactccagagcctgtcagtacaagtgtgagccattatggagcagaacccactacagtgtcaccatgtccgtcatcttcagcaaagggaacagcagttaatttcagcagtctttccatgacaccatttggaggatcctcaggggtaacgccttttggaggtgcatcttcctcattttcagtggtgccaagttcatatcctgctggtttaacaggtggtgttactatatttgtggccttatatgattatgaagctagaactacagaagacctttcatttaagaagggtgaaagatttcaaataattaacaatacggaaggagattggtgggaagcaagatcaatcgctacaggaaagaatggttatatcccgagcaattatgtagcgcctgcagattccattcaggcagaagaatggtattttggcaaaatggggagaaaagatgctgaaagattacttttgaatcctggaaatcaacgaggtattttcttagtaagagagagtgaaacaactaaaggtgcttattccctttctattcgtgattgggatgagataaggggtgacaatgtgaaacactacaaaattaggaaacttgacaatggtggatactatatcacaaccagagcacaatttgatactctgcagaaattggtgaaacactacacagaacatgctgatggtttatgccacaagttgacaactgtgtgtccaactgtgaaacctcagactcaaggtctagcaaaagatgcttgggaaatccctcgagaatctttgcgactagaggttaaactaggacaaggatgtttcggcgaagtgtggatgggaacatggaatggaaccacgaaagtagcaatcaaaacactaaaaccaggtacaatgatgccagaagctttccttcaagaagctcagataatgaaaaaattaagacatgataaacttgttccactatatgctgttgtttctgaagaaccaatttacattgtcactgaatttatgtcaaaaggaagcttattagatttccttaaggaaggagatggaaagtatttgaagcttccacagctggttgatatggctgctcagattgctgatggtatggcatatattgaaagaatgaactatattcaccgagatcttcgggctgctaatattcttgtaggagaaaatcttgtgtgcaaaatagcagactttggtttagcaaggttaattgaagacaatgaatacacagcaagacaaggtgcaaaatttccaatcaaatggacagctcctgaagctgcactgtatggtcggtttacaataaagtctgatgtctggtcatttggaattctgcaaacagaactagtaacaaagggccgagtgccatatccaggtatggtgaaccgtgaagtactagaacaagtggagcgaggatacaggatgccgtgccctcagggctgtccagaatccctccatgaattgatgaatctgtgttggaagaaggaccctgatgaaagaccaacatttgaatatattcagtccttcttggaagactacttcactgctacagagccacagtaccagccaggagaaaatttataattcaagtagcctattttatatgcacaaatctgccaaaatataaagaacttgtgtagattttctacaggaatcaaaagaagaaaatcttctttactctgcatgtttttaatggtaaactggaatcccagatatggttgcacaaaaccacttttttttccccaagtattaaactctaatgtaccaatgatgaatttatcagcgtatttcagggtccaaacaaaatagagctaagatactgatgacagtgtgggtgacagcatggtaatgaaggacagtgaggctcctgcttatttataaatcatttcctttctttttttccccaaagtcagaattgctcaaagaaaattatttattgttacagataaaacttgagagataaaaagctataccataataaaatctaaaattaaggaatatcatgggaccaaataattccattccagttttttaaagtttcttgcatttattattctcaaaagttttttctaagttaaacagtcagtatgcaatcttaatatatgctttcttttgcatggacatgggccaggtttttcaaaaggaatataaacaggatctcaaacttgattaaatgttagaccacagaagtggaatttgaaagtataatgcagtacattaatattcatgttcatggaactgaaagaataagaactttttcacttcagtccttttctgaagagtttgacttagaataatgaaggtaactagaaagtgagttaatcttgtatgaggttgcattgattttttaaggcaatatataattgaaactactgtccaatcaaaggggaaatgttttgatctttagatagcatgcaaagtaagacccagcattttaaaagccctttttaaaaactagacttcgtactgtgagtattgcttatatgtccttatggggatgggtgccacaaatagaaaatatgaccagatcagggacttgaatgcacttttgctcatggtgaatatagatgaacagagaggaaaatgtatttaaaagaaatacgagaaaagaaaatgtgaaagttttacaagttagagggatggaaggtaatgtttaatgttgatgtcatggagtgacagaatggctttgctggcactcagagctcctcacttagctatattctgagactttgaagagttataaagtataactataaaactaatttttcttacacactaaatgggtatttgttcaaaataatgaagttatggcttcacattcattgcagtgggatatggtttttatgtaaaacatttttagaactccagttttcaaatcatgtttgaatctacattcacttttttttgttttcttttttgagacggagtctcgctctgtcgcccaggctggagtgcagtggcgcgatctcggctcactgcaagctctgcctcccaggttcacaccattctcctgcctcagcctcccgagtagctgggactacaggtgcccaccaccacgcctggctagttttttgtatttttagtagagacgcagtttcaccgtgttagccaggatggtctcgatctcctgaccttgtgatccgcccgcctcggcctcccaaagtgctgggattacaggcatgagccaccgcgcccagcctacattcacttctaaagtctatgtaatggtggtcattttttcccttttagaatacattaaatggttgatttggggaggaaaacttattctgaatattaacggtggtgaaaaggggacagtttttaccctaaagtgcaaaagtgaaacatacaaaataagactaatttttaagagtaactcagtaatttcaaaatacagatttgaatagcagcattagtggtttgagtgtctagcaaaggaaaaattgatgaataaaatgaaggtctggtgtatatgttttaaaatactctcatatagtcacactttaaattaagccttatattaggcccctctattttcaggatataattcttaactatcattatttacctgattttaatcatcagattcgaaattctgtgccatggcatatatgttcaaattcaaaccatttttaaaatgtgaagatggacttcatgcaagttggcagtggttctggtactaaaaattgtggttgttttttctgtttacgtaacctgcttagtattgacactctctaccaagagggtcttcctaagaagagtgctgtcattatttcctcttatcaacaacttgtgacatgagattttttaagggctttatgtgaactatgatattgtaatttttctaagcatattcaaaagggtgacaaaattacgtttatgtactaaatctaatcaggaaagtaaggcaggaaaagttgatggtattcattaggttttaactgaatggagcagttccttatataataacaattgtatagtagggataaaacactaacttaatgtgtattcattttaaattgttctgtatttttaaattgccaagaaaaacaactttgtaaatttggagatattttccaacagcttttcgtcttcagtgtcttaatgtggaagttaacccttaccaaaaaaggaagttggcaaaaacagccttctagcacacttttttaaatgaataatggtagcctaaacttaatatttttataaagtattgtaatattgttttgtggataattgaaataaaaagttctcattgaatgcaccta

SEQ ID NO: 53706 - DNA, 1692 bp, Homo sapiens
  misc_feature (1)..(2): n is a, c, g, or t
  misc_feature (9)..(9): n is a, c, g, or t
  misc_feature (11)..(12): n is a, c, g, or t
  misc_feature (19)..(20): n is a, c, g, or t
  misc_feature (27)..(27): n is a, c, g, or t
  misc_feature (48)..(48): n is a, c, g, or t
  misc_feature (56)..(57): n is a, c, g, or t
  misc_feature (72)..(74): n is a, c, g, or t
  misc_feature (80)..(81): n is a, c, g, or t
  misc_feature (89)..(89): n is a, c, g, or t
  misc_feature (95)..(95): n is a, c, g, or t
  misc_feature (113)..(114): n is a, c, g, or t
  misc_feature (125)..(125): n is a, c, g, or t
  misc_feature (132)..(132): n is a, c, g, or t
  misc_feature (134)..(135): n is a, c, g, or t
  misc_feature (144)..(145): n is a, c, g, or t
  misc_feature (149)..(149): n is a, c, g, or t
  misc_feature (156)..(156): n is a, c, g, or t
  misc_feature (224)..(224): n is a, c, g, or t
nntttgagncnnagtctcnntctgttncccaggctggagtgcagtggnacaatctnngctcactgcaacctnnncctccnnggttcaantgattntcctgcctcagcctcccnngtagctgggantacaggnanntgccaccanncccngctaatntttgtatttttaatagagacagggtttcaccgtgttggccaggctgatctcgaactcatgacctcaantgatccacctgcctcggcctcccaaattaatgggattataggtgtgggccaccgcacccagccagtgttagatttttgaaatctgaatttagcctgcatttttattatgttttctggttttcctgttatcttctagactataccctgttaccatcatctccttctaaaataatatgattttcagtgacacaatttgatattaaccataattgtcttctctctgcttccctttgtatcgtatgtcttgtgttttttgtttttctctttccaagattgctgatggtatggcatatattgaaagaatgaactatattcaccgagatcttcgggctgctaatattcttgtaggagaaaatcttgtgtgcaaaatagcagactttggtttagcaaggttaattgaagacaatgaatacacagcaagacaaggtaaaattacttttacataaaagcttgtaatgtgttgtgtgttttgcttaactctcttgactatacagggttttccagaataagaattgttttagcttccctcagaagagtcatagagacattgatttcattcataaaatcatgtactgctgtggctttctgatagttatttcctccaagaaagaacttgactaggtatcctttgcattatacatagagcaagtagtagcctctttacacttcttttgacatgacaacaaatatattttaatttctttcctagaaaggccagaggttctcagtcagaggagatattgccctgtaccgccactcaccaggggacatctgacaatgtctacagacttttttggtggttacaacctgggggctactgcttgacatctagtgggtagaggccaggtatactgctgaacctcctacagtgtacagaaatgtgcaggcaaacccccccttccccccacaacagaattatcaggcccaaaatggtagcggtgctgagattgagaaaccctgctttagacatagtgctttctttcaacctccatacttctgtacagttacctccatctgtaatgtttgttgttgttgtttttcgagatagggtctccctctgttgctcaggctagagtatagtggcgtgatttcagctcactgcagccttgacctcctggggctcaggtgatcctcccacctcagcctcctgagtagctggaactacaggtgcacactaccacgcctgactaattctttgtattttttgtagagacgaagttttgccatgttgcccaagctggtctcgaacttctgggctcaagcagtcctcctgccttggcttcccaaagtgctaaaatggcaggcgtgagacaccatgcccggcctgtaatctttacatgtgaaaatcctaaccattctttagggcctaatttagctgccactttttttttcaatagtttttgggaaactagttctttagtggtgatttcagtgcacccatcacccaagcatcttgcactgtacccaa

SEQ ID NO: 53707 - DNA, 372 bp, Homo sapiens
tactactactaaattcgcggccgcgtcgacagcagttccttatataataacaattgtatagtagggataaaacactaacttaatgtgtattcattttaaattgttctgtatttttaaattgccaagaaaaacaactttgtaaatttggagatattttccaacagcttttcgtcttcagtgtcttaatgtggaagttaacccttaccaaaaaaggaagttggcaaaaacagccttctagcacacttttttaaatgaataatggtagcctaaacttaatatttttataaagtattgtaatattgttttgtggataattgaaataaaaagttctcattgaatgcacctaaaaaaaaagtcgacgcggccgcgaat

SEQ ID NO: 53708 - DNA, 4489 bp, Homo sapiens
gcggagccaaggcacacgggtctgacccttgggccggcccggagcaagtgacacggaccggtcgcctatcctgaccacagcaaagcggcccggagcccgcggaggggacctgacgggggcgtaggcgccggaaggctgggggccccggagccgggccggcgtggcccgagttccggtgagcggacggcggcgcgcgcagatttgataatgggctgcattaaaagtaaagaaaacaaaagtccagccattaaatacagacctgaaaatactccagagcctgtcagtacaagtgtgagccattatggagcagaacccactacagtgtcaccatgtccgtcatcttcagcaaagggaacagcagttaatttcagcagtctttccatgacaccatttggaggatcctcaggggtaacgccttttggaggtgcatcttcctcattttcagtggtgccaagttcatatcctgctggtttaacaggtggtgttactatatttgtggccttatatgattatgaagctagaactacagaagacctttcatttaagaagggtgaaagatttcaaataattaacaatacggaaggagattggtgggaagcaagatcaatcgctacaggaaagaatggttatatcccgagcaattatgtagcgcctgcagattccattcaggcagaagaatggtattttggcaaaatggggagaaaagatgctgaaagattacttttgaatcctggaaatcaacgaggtattttcttagtaagagagagtgaaacaactaaaggtgcttattccctttctattcgtgattgggatgagataaggggtgacaatgtgaaacactacaaaattaggaaacttgacaatggtggatactatatcacaaccagagcacaatttgatactctgcagaaattggtgaaacactacacagaacatgctgatggtttatgccacaagttgacaactgtgtgtccaactgtgaaacctcagactcaaggtctagcaaaagatgcttgggaaatccctcgagaatctttgcgactagaggttaaactaggacaaggatgtttcggcgaagtgtggatgggaacatggaatggaaccacgaaagtagcaatcaaaacactaaaaccaggtacaatgatgccagaagctttccttcaagaagctcagataatgaaaaaattaagacatgataaacttgttccactatatgctgttgtttctgaagaaccaatttacattgtcactgaatttatgtcaaaaggaagcttattagatttccttaaggaaggagatggaaagtatttgaagcttccacagctggttgatatggctgctcagattgctgatggtatggcatatattgaaagaatgaactatattcaccgagatcttcgggctgctaatattcttgtaggagaaaatcttgtgtgcaaaatagcagactttggtttagcaaggttaattgaagacaatgaatacacagcaagacaaggtgcaaaatttccaatcaaatggacagctcctgaagctgcactgtatggtcggtttacaataaagtctgatgtctggtcatttggaattctgcaaacagaactagtaacaaagggccgagtgccatatccaggtatggtgaaccgtgaagtactagaacaagtggagcgaggatacaggatgccgtgccctcagggctgtccagaatccctccatgaattgatgaatctgtgttggaagaaggaccctgatgaaagaccaacatttgaatatattcagtccttcttggaagactacttcactgctacagagccacagtaccagccaggagaaaatttataattcaagtagcctattttatatgcacaaatctgccaaaatataaagaacttgtgtagattttctacaggaatcaaaagaagaaaatcttctttactctgcatgtttttaatggtaaactggaatcccagatatggttgcacaaaaccacttttttttccccaagtattaaactctaatgtaccaatgatgaatttatcagcgtatttcagggtccaaacaaaatagagctaagatactgatgacagtgtgggtgacagcatggtaatgaaggacagtgaggctcctgcttatttataaatcatttcctttctttttttccccaaagtcagaattgctcaaagaaaattatttattgttacagataaaacttgagagataaaaagctataccataataaaatctaaaattaaggaatatcatgggaccaaataattccattccagttttttaaagtttcttgcatttattattctcaaaagttttttctaagttaaacagtcagtatgcaatcttaatatatgctttcttttgcatggacatgggccaggtttttcaaaaggaatataaacaggatctcaaacttgattaaatgttagaccacagaagtggaatttgaaagtataatgcagtacattaatattcatgttcatggaactgaaagaataagaactttttcacttcagtccttttctgaagagtttgacttagaataatgaaggtaactagaaagtgagttaatcttgtatgaggttgcattgattttttaaggcaatatataattgaaactactgtccaatcaaaggggaaatgttttgatctttagatagcatgcaaagtaagacccagcattttaaaagccctttttaaaaactagacttcgtactgtgagtattgcttatatgtccttatggggatgggtgccacaaatagaaaatatgaccagatcagggacttgaatgcacttttgctcatggtgaatatagatgaacagagaggaaaatgtatttaaaagaaatacgagaaaagaaaatgtgaaagttttacaagttagagggatggaaggtaatgtttaatgttgatgtcatggagtgacagaatggctttgctggcactcagagctcctcacttagctatattctgagactttgaagagttataaagtataactataaaactaatttttcttacacactaaatgggtatttgttcaaaataatgaagttatggcttcacattcattgcagtgggatatggtttttatgtaaaacatttttagaactccagttttcaaatcatgtttgaatctacattcacttttttttgttttcttttttgagacggagtctcgctctgtcgcccaggctggagtgcagtggcgcgatctcggctcactgcaagctctgcctcccaggttcacaccattctcctgcctcagcctcccgagtagctgggactacaggtgcccaccaccacgcctggctagttttttgtatttttagtagagacgcagtttcacccttgtgatccgcccgcctcggcctcccaaagtgctgggattacaggcatgagccaccgcgcccagcctacattcacttctaaagtctatgtaatggtggtcattttttcccttttagaatacattaaatggttgatttggggaggaaaacttattctgaatattaacggtggtgaaaaggggacagtttttaccctaaagtgcaaaagtgaaacatacaaaataagactaatttttaagagtaactcagtaatttcaaaatacagatttgaatagcagcattagtggtttgagtgtctagcaaaggaaaaattgatgaataaaatgaaggtctggtgtatatgttttaaaatactctcatatagtcacactttaaattaagccttatattaggcccctctattttcaggatataattcttaactatcattatttacctgattttaatcatcagattcgaaattctgtgccatggcatatatgttcaaattcaaaccatttttaaaatgtgaagatggacttcatgcaagttggcagtggttctggtactaaaaattgtggttgttttttctgtttacgtaacctgcttagtattgacactctctaccaagagggtcttcctaagaagagtgctgtcattatttcctcttatcaacaacttgtgacatgagattttttaagggctttatgtgaactatgatattgtaatttttctaagcatattcaaaagggtgacaaaattacgtttatgtactaaatctaatcaggaaagtaaggcaggaaaagttgatggtattcattaggttttaactgaatggagcagttccttatataataacaattgtatagtagggataaaacactaacttaatgtgtattcattttaaattgttctgtatttttaaattgccaagaaaaacaactttgtaaatttggagatattttccaacagcttttcgtcttcagtgtcttaatgtggaagttaacccttaccaaaaaaggaagttggcaaaaacagccttctagcacacttttttaaatgaataatggtagcctaaacttaatatttttataaagtattgtaatattgttttgtggataattgaaataaaaagttctcattgaatgcaccta

SEQ ID NO: 53709 - DNA, 2745 bp, Homo sapiens
  misc_feature (2710)..(2710): n is a, c, g, or t
gcggagccaaggcacacgggtctgacccttgggccggcccggagcaagtgacacggaccggtcgcctatcctgaccacagcaaagcggcccggagcccgcggaggggacctgacgggggcgtaggcgccggaaggctgggggccccggagccgggccggcgtggcccgagttccggtgagcggacggcggcgcgcgcagatttgataatgggctgcattaaaagtaaagaaaacaaaagtccagccattaaatacagacctgaaaatactccagagcctgtcagtacaagtgtgagccattatggagcagaacccactacagtgtcaccatgtccgtcatcttcagcaaagggaacagcagttaatttcagcagtctttccatgacaccatttggaggatcctcaggggtaacgccttttggaggtgcatcttcctcattttcagtggtgccaagttcatatcctgctggtttaacaggtggtgttactatatttgtggccttatatgattatgaagctagaactacagaagacctttcatttaagaagggtgaaagatttcaaataattaacaatacggaaggagattggtgggaagcaagatcaatcgctacaggaaagaatggttatatcccgagcaattatgtagcgcctgcagattccattcaggcagaagaatggtattttggcaaaatggggagaaaagatgctgaaagattacttttgaatcctggaaatcaacgaggtattttcttagtaagagagagtgaaacaactaaaggtgcttattccctttctattcgtgattgggatgagataaggggtgacaatgtgaaacactacaaaattaggaaacttgacaatggtggatactatatcacaaccagagcacaatttgatactctgcagaaattggtgaaacactacacagaacatgctgatggtttatgccacaagttgacaactgtgtgtccaactgtgaaacctcagactcaaggtctagcaaaagatgcttgggaaatccctcgagaatctttgcgactagaggttaaactaggacaaggatgtttcggcgaagtgtggatgggaacatggaatggaaccacgaaagtagcaatcaaaacactaaaaccaggtacaatgatgccagaagctttccttcaagaagctcagataatgaaaaaattaagacatgataaacttgttccactatatgctgttgtttctgaagaaccaatttacattgtcactgaatttatgtcaaaaggaagcttattagatttccttaaggaaggagatggaaagtatttgaagcttccacagctggttgatatggctgctcagattgctgatggtatggcatatattgaaagaatgaactatattcaccgagatcttcgggctgctaatattcttgtaggagaaaatcttgtgtgcaaaatagcagactttggtttagcaaggttaattgaagacaatgaatacacagcaagacaaggtgcaaaatttccaatcaaatggacagctcctgaagctgcactgtatggtcggtttacaataaagtctgatgtctggtcatttggaattctgcaaacagaactagtaacaaagggccgagtgccatatccaggtatggtgaaccgtgaagtactagaacaagtggagcgaggatacaggatgccgtgccctcagggctgtccagaatccctccatgaattgatgaatctgtgttggaagaaggaccctgatgaaagaccaacatttgaatatattcagtccttcttggaagactacttcactgctacagagccacagtaccagccaggagaaaatttataattcaagtagcctattttatatgcacaaatctgccaaaatataaagaacttgtgtagattttctacaggaatcaaaagaagaaaatcttctttactctgcatgtttttaatggtaaactggaatcccagatatggttgcacaaaaccacttttttttccccaagtattaaactctaatgtaccaatgatgaatttatcagcgtatttcagggtccaaacaaaatagagctaagatactgatgacagtgtgggtgacagcatggtaatgaaggacagtgaggctcctgcttatttataaatcatttcctttctttttttccccaaagtcagaattgctcaaagaaaattatttattgttacagataaaacttgagagataaaaagctataccataataaaatctaaaattaaggaatatcatgggaccaaataattccattccagttttttaaagtttcttgcatttattattctcaaaagttttttctaagttaaacagtcagtatgcaatcttaatatatgctttcttttgcatggacatgggccaggtttttcaaaaggaatataaacaggatctcaaacttgattaaatgttagaccacagaagtggaatttgaaagtataatgcagtacattaatattcatgttcatggaactgaaagaataagaactttttcacttcagtccttttctgaagagtttgacttagaataatgaaggtaactagaaagtgagttaatcttgtatgaggttgcattgattttttaaggcaatatataattgaaactactgtccaatcaaaggggaaatgttttgatctttagatagcatgcaaagtaagacccagcattttaaaagccctttttaaaacnaaccccaccgggaattttggctaattcccagggga

SEQ ID NO: 53710 - DNA, 4388 bp, Homo sapiens
gcggagccaaggcacacgggtctgacccttgggccggcccggagcaagtgacacggaccggtcgcctatcctgaccacagcaaagcggcccggagcccgcggaggggacctgacgggggcgtaggcgccggaaggctgggggccccggagccgggccggcgtggcccgagttccggtgagcggacggcggcgcgcgcagatttgataatgggctgcattaaaagtaaagaaaacaaaagtccagccattaaatacagacctgaaaatactccagagcctgtcagtacaagtgtgagccattatggagcagaacccactacagtgtcaccatgtccgtcatcttcagcaaagggaacagcagttaatttcagcagtctttccatgacaccatttggaggatcctcaggggtaacgccttttggaggtgcatcttcctcattttcagtggtgccaagttcatatcctgctggtttaacaggtggtgttactatatttgtggccttatatgattatgaagctagaactacagaagacctttcatttaagaagggtgaaagatttcaaataattaacaatacggaaggagattggtgggaagcaagatcaatcgctacaggaaagaatggttatatcccgagcaattatgtagcgcctgcagattccattcaggcagaagaatggtattttggcaaaatggggagaaaagatgctgaaagattacttttgaatcctggaaatcaacgaggtattttcttagtaagagagagtgaaacaactaaaggtgcttattccctttctattcgtgattgggatgagataaggggtgacaatgtgaaacactacaaaattaggaaacttgacaatggtggatactatatcacaaccagagcacaatttgatactctgcagaaattggtgaaacactacacagaacatgctgatggtttatgccacaagttgacaactgtgtgtccaactgtgaaacctcagactcaaggtctagcaaaagatgcttgggaaatccctcgagaatctttgcgactagaggttaaactaggacaaggatgtttcggcgaagtgtggatgggaacatggaatggaaccacgaaagtagcaatcaaaacactaaaaccaggtacaatgatgccagaagctttccttcaagaagctcagataatgaaaaaattaagacatgataaacttgttccactatatgctgttgtttctgaagaaccaatttacattgtcactgaatttatgtcaaaaggaagcttattagatttccttaaggaaggagatggaaagtatttgaagcttccacagctggttgatatggctgctcagattgctgatggtatggcatatattgaaagaatgaactatattcaccgagatcttcgggctgctaatattcttgtaggagaaaatcttgtgtgcaaaatagcagactttggtttagcaaggttaattgaagacaatgaatacacagcaagacaaggtatggtgaaccgtgaagtactagaacaagtggagcgaggatacaggatgccgtgccctcagggctgtccagaatccctccatgaattgatgaatctgtgttggaagaaggaccctgatgaaagaccaacatttgaatatattcagtccttcttggaagactacttcactgctacagagccacagtaccagccaggagaaaatttataattcaagtagcctattttatatgcacaaatctgccaaaatataaagaacttgtgtagattttctacaggaatcaaaagaagaaaatcttctttactctgcatgtttttaatggtaaactggaatcccagatatggttgcacaaaaccacttttttttccccaagtattaaactctaatgtaccaatgatgaatttatcagcgtatttcagggtccaaacaaaatagagctaagatactgatgacagtgtgggtgacagcatggtaatgaaggacagtgaggctcctgcttatttataaatcatttcctttctttttttccccaaagtcagaattgctcaaagaaaattatttattgttacagataaaacttgagagataaaaagctataccataataaaatctaaaattaaggaatatcatgggaccaaataattccattccagttttttaaagtttcttgcatttattattctcaaaagttttttctaagttaaacagtcagtatgcaatcttaatatatgctttcttttgcatggacatgggccaggtttttcaaaaggaatataaacaggatctcaaacttgattaaatgttagaccacagaagtggaatttgaaagtataatgcagtacattaatattcatgttcatggaactgaaagaataagaactttttcacttcagtccttttctgaagagtttgacttagaataatgaaggtaactagaaagtgagttaatcttgtatgaggttgcattgattttttaaggcaatatataattgaaactactgtccaatcaaaggggaaatgttttgatctttagatagcatgcaaagtaagacccagcattttaaaagccctttttaaaaactagacttcgtactgtgagtattgcttatatgtccttatggggatgggtgccacaaatagaaaatatgaccagatcagggacttgaatgcacttttgctcatggtgaatatagatgaacagagaggaaaatgtatttaaaagaaatacgagaaaagaaaatgtgaaagttttacaagttagagggatggaaggtaatgtttaatgttgatgtcatggagtgacagaatggctttgctggcactcagagctcctcacttagctatattctgagactttgaagagttataaagtataactataaaactaatttttcttacacactaaatgggtatttgttcaaaataatgaagttatggcttcacattcattgcagtgggatatggtttttatgtaaaacatttttagaactccagttttcaaatcatgtttgaatctacattcacttttttttgttttcttttttgagacggagtctcgctctgtcgcccaggctggagtgcagtggcgcgatctcggctcactgcaagctctgcctcccaggttcacaccattctcctgcctcagcctcccgagtagctgggactacaggtgcccaccaccacgcctggctagttttttgtatttttagtagagacgcagtttcaccgtgttagccaggatggtctcgatctcctgaccttgtgatccgcccgcctcggcctcccaaagtgctgggattacaggcatgagccaccgcgcccagcctacattcacttctaaagtctatgtaatggtggtcattttttcccttttagaatacattaaatggttgatttggggaggaaaacttattctgaatattaacggtggtgaaaaggggacagtttttaccctaaagtgcaaaagtgaaacatacaaaataagactaatttttaagagtaactcagtaatttcaaaatacagatttgaatagcagcattagtggtttgagtgtctagcaaaggaaaaattgatgaataaaatgaaggtctggtgtatatgttttaaaatactctcatatagtcacactttaaattaagccttatattaggcccctctattttcaggatataattcttaactatcattatttacctgattttaatcatcagattcgaaattctgtgccatggcatatatgttcaaattcaaaccatttttaaaatgtgaagatggacttcatgcaagttggcagtggttctggtactaaaaattgtggttgttttttctgtttacgtaacctgcttagtattgacactctctaccaagagggtcttcctaagaagagtgctgtcattatttcctcttatcaacaacttgtgacatgagattttttaagggctttatgtgaactatgatattgtaatttttctaagcatattcaaaagggtgacaaaattacgtttatgtactaaatctaatcaggaaagtaaggcaggaaaagttgatggtattcattaggttttaactgaatggagcagttccttatataataacaattgtatagtagggataaaacactaacttaatgtgtattcattttaaattgttctgtatttttaaattgccaagaaaaacaactttgtaaatttggagatattttccaacagcttttcgtcttcagtgtcttaatgtggaagttaacccttaccaaaaaaggaagttggcaaaaacagccttctagcacacttttttaaatgaataatggtagcctaaacttaatatttttataaagtattgtaatattgttttgtggataattgaaataaaaagttctcattgaatgcaccta

SEQ ID NO: 53711 - DNA, 4671 bp, Homo sapiens
gcggagccaaggcacacgggtctgacccttgggccggcccggagcaagtgacacggaccggtcgcctatcctgaccacagcaaagcggcccggagcccgcggaggggacctgacgggggcgtaggcgccggaaggctgggggccccggagccgggccggcgtggcccgagttccggtgagcggacggcggcgcgcgcagatttgataatgggctgcattaaaagtaaagaaaacaaaagtccagccattaaatacagacctgaaaatactccagagcctgtcagtacaagtgtgagccattatggagcagaacccactacagtgtcaccatgtccgtcatcttcagcaaagggaacagcagttaatttcagcagtctttccatgacaccatttggaggatcctcaggggtaacgccttttggaggtgcatcttcctcattttcagtggtgccaagttcatatcctgctggtttaacaggtggtgttactatatttgtggccttatatgattatgaagctagaactacagaagacctttcatttaagaagggtgaaagatttcaaataattaacaatacggaaggagattggtgggaagcaagatcaatcgctacaggaaagaatggttatatcccgagcaattatgtagcgcctgcagattccattcaggcagaagaatggtattttggcaaaatggggagaaaagatgctgaaagattacttttgaatcctggaaatcaacgaggtattttcttagtaagagagagtgaaacaactaaaggtgcttattccctttctattcgtgattgggatgagataaggggtgacaatgtgaaacactacaaaattaggaaacttgacaatggtggatactatatcacaaccagagcacaatttgatactctgcagaaattggtgaaacactacacagaacatgctgatggtttatgccacaagttgacaactgtgtgtccaactgtgaaacctcagactcaaggtctagcaaaagatgcttgggaaatccctcgagaatctttgcgactagaggttaaactaggacaaggatgtttcggcgaagtgtggatgggaacatggaatggaaccacgaaagtagcaatcaaaacactaaaaccaggtacaatgatgccagaagctttccttcaagaagctcagataatgaaaaaattaagacatgataaacttgttccactatatgctgttgtttctgaagaaccaatttacattgtcactgaatttatgtcaaaaggaagcttattagatttccttaaggaaggagatggaaagtatttgaagcttccacagctggttgatatggctgctcagattgctgatggtatggcatatattgaaagaatgaactatattcaccgagatcttcgggctgctaatattcttgtaggagaaaatcttgtgtgcaaaatagcagactttggtttagcaaggttaattgaagacaatgaatacacagcaagacaaggtgcaaaatttccaatcaaatggacagctcctgaagctgcactgtatggtcggtttacaataaagtctgatgtctggtcatttggaattctgcaaacagaactagtaacaaagggccgagtgccatatccaggtatggtgaaccgtgaagtactagaacaagtggagcgaggatacaggatgccgtgccctcagggctgtccagaatccctccatgaattgatgaatctgtgttggaagaaggaccctgatgaaagaccaacatttgaatatattcagtccttcttggaagactacttcactgctacagagccacagtaccagccaggagaaaatttataattcaagtagcctattttatatgcacaaatctgccaaaatataaagaacttgtgtagattttctacaggaatcaaaagaagaaaatcttctttactctgcatgtttttaatggtaaactggaatcccagatatggttgcacaaaaccacttttttttccccaagtattaaactctaatgtaccaatgatgaatttatcagcgtatttcagggtccaaacaaaatagagctaagatactgatgacagtgtgggtgacagcatggtaatgaaggacagtgaggctcctgcttatttataaatcatttcctttctttttttccccaaagtcagaattgctcaaagaaaattatttattgttacagataaaacttgagagataaaaagctataccataataaaatctaaaattaaggaatatcatgggaccaaataattccattccagttttttaaagtttcttgcatttattattctcaaaagttttttctaagttaaacagtcagtatgcaatcttaatatatgctttcttttgcatggacatgggccaggtttttcaaaaggaatataaacaggatctcaaacttgattaaatgttagaccacagaagtggaatttgaaagtataatgcagtacattaatattcatgttcatggaactgaaagaataagaactttttcacttcagtccttttctgaagagtttgacttagaataatgaaggtaactagaaagtgagttaatcttgtatgaggttgcattgattttttaaggcaatatataattgaaactactgtccaatcaaaggggaaatgttttgatctttagatagcatgcaaagtaagacccagcattttaaaagccctttttaaaaactagacttcgtactgtgagtattgcttatatgtccttatggggatgggtgccacaaatagaaaatatgaccagatcagggacttgaatgcacttttgctcatggtgaatatagatgaacagagaggaaaatgtatttaaaagaaatacgagaaaagaaaatgtgaaagttttacaagttagagggatggaaggtaatgtttaatgttgatgtcatggagtgacagaatggctttgctggcactcagagctcctcacttagctatattctgagactttgaagagttataaagtataactataaaactaatttttcttacacactaaatgggtatttgttcaaaataatgaagttatggcttcacattcattgcagtgggatatggtttttatgtaaaacatttttagaactccagttttcaaatcatgtttgaatctacattcacttttttttgttttcttttttgagacggagtctcgctctgtcgcccaggctggagtgcagtggcgcgatctcggctcactgcaagctctgcctcccaggttcacaccattctcctgcctcagcctcccgagtagctgggactacaggtgcccaccaccacgcctggctagttttttgtatttttagtagagacgcagtttcaccgtgttagccaggatggtctcgatctcctgaccttgtgatccgcccgcctcggcctcccaaagtgctgggattacaggcatgagccaccgcgcccagcctacattcacttctaaagtctatgtaatggtggtcattttttcccttttagaatacattaaatggttgatttggggaggaaaacttattctgaatattaacggtggtgaaaaggggacagtttttaccctaaagtgcaaaagtgaaacatacaaaataagactaatttttaagagtaactcagtaatttcaaaatacagatttgaatagcagcattagtggtttgagtgtctagcaaaggaaaaattgatgaataaaatgaaggtctggtgtatatgttttaaaatactctcatatagtcacactttaaattaagccttatattaggcccctctattttcaggatataattcttaactatcattatttacctgattttaatcatcagattcgaaattctgtgccatggcatatatgttcaaattcaaaccatttttaaaatgtgaagatggacttcatgcaagttggcagtggttctggtactaaaaattgtggttgttttttctgtttacgtaacctgcttagtattgacactctctaccaagagggtcttcctaagaagagtgctgtcattatttcctcttatcaacaacttgtgacatgagattttttaagggctttatgtgaactatgatattgtaatttttctaagcatattcaaaagggtgacaaaattacgtttatgtactaaatctaatcaggaaagtaaggcaggaaaagttgatggtattcattaggttttaactgaatggagcagttccttatataataacaattgtatagtagggataaaacactaacttaatgtgtattcattttaaattgttctgtatttttaaattgccaagaaaaacaactttgtaaatttggagatattttccaacagcttttcgtcttcagtgtcttaatgtggaagttaacccttaccaaaaaaggaagttggcaaaaacagccttctagcacacttttttaaatgaataatggtagcctaaacttaatatttttataaagtattgtaatattgttttgtggataattgaaataaaaagttctcattgaatgcacctattaatcgttttagttgctattcatattctcattcgttttttaaaaactgatatattctgaatttattcttccattgagaaaaaaatgttcagttacttgtaactactgagcagaatttaatcaatcctttattaaattcagaacattattg

SEQ ID NO: 53712 - DNA, 4781 bp, Homo sapiens
gcggagccaaggcacacgggtctgacccttgggccggcccggagcaagtgacacggaccggtcgcctatcctgaccacagcaaagcggcccggagcccgcggaggggacctgacgggggcgtaggcgccggaaggctgggggccccggagccgggccggcgtggcccgagttccggtgagcggacggcggcgcgcgcagatttgataatgggctgcattaaaagtaaagaaaacaaaagtccagccattaaatacagacctgaaaatactccagagcctgtcagtacaagtgtgagccattatggagcagaacccactacagtgtcaccatgtccgtcatcttcagcaaagggaacagcagttaatttcagcagtctttccatgacaccatttggaggatcctcaggggtaacgccttttggaggtgcatcttcctcattttcagtggtgccaagttcatatcctgctggtttaacaggtggtgttactatatttgtggccttatatgattatgaagctagaactacagaagacctttcatttaagaagggtgaaagatttcaaataattaacaatacggaaggagattggtgggaagcaagatcaatcgctacaggaaagaatggttatatcccgagcaattatgtagcgcctgcagattccattcaggcagaagaatggtattttggcaaaatggggagaaaagatgctgaaagattacttttgaatcctggaaatcaacgaggtattttcttagtaagagagagtgaaacaactaaaggtgcttattccctttctattcgtgattgggatgagataaggggtgacaatgtgaaacactacaaaattaggaaacttgacaatggtggatactatatcacaaccagagcacaatttgatactctgcagaaattggtgaaacactacacagaacatgctgatggtttatgccacaagttgacaactgtgtgtccaactgtgaaacctcagactcaaggtctagcaaaagatgcttgggaaatccctcgagaatctttgcgactagaggttaaactaggacaaggatgtttcggcgaagtgtggatgggaacatggaatggaaccacgaaagtagcaatcaaaacactaaaaccaggtacaatgatgccagaagctttccttcaagaagctcagataatgaaaaaattaagacatgataaacttgttccactatatgctgttgtttctgaagaaccaatttacattgtcactgaatttatgtcaaaaggaagcttattagatttccttaaggaaggagatggaaagtatttgaagcttccacagctggttgatatggctgctcagattgctgatggtatggcatatattgaaagaatgaactatattcaccgagatcttcgggctgctaatattcttgtaggagaaaatcttgtgtgcaaaatagcagactttggtttagcaaggttaattgaagacaatgaatacacagcaagacaaggtgcaaaatttccaatcaaatggacagctcctgaagctgcactgtatggtcggtttacaataaagtctgatgtctggtcatttggaattctgcaaacagaactagtaacaaagggccgagtgccatatccaggtatggtgaaccgtgaagtactagaacaagtggagcgaggatacaggatgccgtgccctcagggctgtccagaatccctccatgaattgatgaatctgtgttggaagaaggaccctgatgaaagaccaacatttgaatatattcagtccttcttggaagactacttcactgctacagagccacagtaccagccaggagaaaatttataattcaagtagcctattttatatgcacaaatctgccaaaatataaagaacttgtgtagattttctacaggaatcaaaagaagaaaatcttctttactctgcatgtttttaatggtaaactggaatcccagatatggttgcacaaaaccacttttttttccccaagtattaaactctaatgtaccaatgatgaatttatcagcgtatttcagggtccaaacaaaatagagctaagatactgatgacagtgtgggtgacagcatggtaatgaaggacagtgaggctcctgcttatttataaatcatttcctttctttttttccccaaagtcagaattgctcaaagaaaattatttattgttacagataaaacttgagagataaaaagctataccataataaaatctaaaattaaggaatatcatgggaccaaataattccattccagttttttaaagtttcttgcatttattattctcaaaagttttttctaagttaaacagtcagtatgcaatcttaatatatgctttcttttgcatggacatgggccaggtttttcaaaaggaatataaacaggatctcaaacttgattaaatgttagaccacagaagtggaatttgaaagtataatgcagtacattaatattcatgttcatggaactgaaagaataagaactttttcacttcagtccttttctgaagagtttgacttagaataatgaaggtaactagaaagtgagttaatcttgtatgaggttgcattgattttttaaggcaatatataattgaaactactgtccaatcaaaggggaaatgttttgatctttagatagcatgcaaagtaagacccagcattttaaaagccctttttaaaaactagacttcgtactgtgagtattgcttatatgtccttatggggatgggtgccacaaatagaaaatatgaccagatcagggacttgaatgcacttttgctcatggtgaatatagatgaacagagaggaaaatgtatttaaaagaaatacgagaaaagaaaatgtgaaagttttacaagttagagggatggaaggtaatgtttaatgttgatgtcatggagtgacagaatggctttgctggcactcagagctcctcacttagctatattctgagactttgaagagttataaagtataactataaaactaatttttcttacacactaaatgggtatttgttcaaaataatgaagttatggcttcacattcattgcagtgggatatggtttttatgtaaaacatttttagaactccagttttcaaatcatgtttgaatctacattcacttttttttgttttcttttttgagacggagtctcgctctgtcgcccaggctggagtgcagtggcgcgatctcggctcactgcaagctctgcctcccaggttcacaccattctcctgcctcagcctcccgagtagctgggactacaggtgcccaccaccacgcctggctagttttttgtatttttagtagagacgcagtttcaccgtgttagccaggatggtctcgatctcctgaccttgtgatccgcccgcctcggcctcccaaagtgctgggattacaggcatgagccaccgcgcccagcctacattcacttctaaagtctatgtaatggtggtcattttttcccttttagaatacattaaatggttgatttggggaggaaaacttattctgaatattaacggtggtgaaaaggggacagtttttaccctaaagtgcaaaagtgaaacatacaaaataagactaatttttaagagtaactcagtaatttcaaaatacagatttgaatagcagcattagtggtttgagtgtctagcaaaggaaaaattgatgaataaaatgaaggtctggtgtatatgttttaaaatactctcatatagtcacactttaaattaagccttatattaggcccctctattttcaggatataattcttaactatcattatttacctgattttaatcatcagattcgaaattctgtgccatggcatatatgttcaaattcaaaccatttttaaaatgtgaagatggacttcatgcaagttggcagtggttctggtactaaaaattgtggttgttttttctgtttacgtaacctgcttagtattgacactctctaccaagagggtcttcctaagaagagtgctgtcattatttcctcttatcaacaacttgtgacatgagattttttaagggctttatgtgaactatgatattgtaatttttctaagcatattcaaaagggtgacaaaattacgtttatgtactaaatctaatcaggaaagtaaggcaggaaaagttgatggtattcattaggttttaactgaatggagcagttccttatataataacaattgtatagtagggataaaacactaacttaatgtgtattcattttaaattgttctgtatttttaaattgccaagaaaaacaactttgtaaatttggagatattttccaacagcttttcgtcttcagtgtcttaatgtggaagttaacccttaccaaaaaaggaagttggcaaaaacagccttctagcacacttttttaaatgaataatggtagcctaaacttaatatttttataaagtattgtaatattgttttgtggataattgaaataaaaagttctcattgaatgcacctaaaaaaaaaaaaaaaaaaaaaaaaaaaaaaaaaaaaaaaaaaaaaaaaaaaaaaaaaaaaaaaaaaaaaaaaaaaaaaaaaaaaaaacaaaaaaaaaaaaaaaagagagagaagaaacacaaacaggcggcgggcggaggggccgctccaccaccacacagagaggcgggagcgcagcaaccccaagagcgggaggaggccgccgcgcgggaaaaaaacgatccgccgcgccagcccgggcgcacaccaccacgcggggacc

SEQ ID NO: 53713 - DNA, 4321 bp, Homo sapiens
gcggagccaaggcacacgggtctgacccttgggccggcccggagcaagtgacacggaccggtcgcctatcctgaccacagcaaagcggcccggagcccgcggaggggacctgacgggggcgtaggcgccggaaggctgggggccccggagccgggccggcgtggcccgagttccggtgagcggacggcggcgcgcgcagatttgataatgggctgcattaaaagtaaagaaaacaaaagtccagccattaaatacagacctgaaaatactccagagcctgtcagtacaagtgtgagccattatggagcagaacccactacagtgtcaccatgtccgtcatcttcagcaaagggaacagcagttaatttcagcagtctttccatgacaccatttggaggatcctcaggggtaacgccttttggaggtgcatcttcctcattttcagtggtgccaagttcatatcctgctggtttaacaggtggtgttactatatttgtggccttatatgattatgaagctagaactacagaagacctttcatttaagaagggtgaaagatttcaaataattaacaatacggaaggagattggtgggaagcaagatcaatcgctacaggaaagaatggttatatcccgagcaattatgtagcgcctgcagattccattcaggcagaagaatggtattttggcaaaatggggagaaaagatgctgaaagattacttttgaatcctggaaatcaacgaggtattttcttagtaagagagagtgaaacaactaaaggtgcttattccctttctattcgtgattgggatgagataaggggtgacaatgtgaaacactacaaaattaggaaacttgacaatggtggatactatatcacaaccagagcacaatttgatactctgcagaaattggtgaaacactacacagaacatgctgatggtttatgccacaagttgacaactgtgtgtccaactgtgaaacctcagactcaaggtctagcaaaagatgcttgggaaatccctcgagaatctttgcgactagaggttaaactaggacaaggatgtttcggcgaagtgtggatgggaacatggaatggaaccacgaaagtagcaatcaaaacactaaaaccaggtacaatgatgccagaagctttccttcaagaagctcagataatgaaaaaattaagacatgataaacttgttccactatatgctgttgtttctgaagaaccaatttacattgtcactgaatttatgtcaaaaggaagcttattagatttccttaaggaaggagatggaaagtatttgaagcttccacagctggttgatatggctgctcagattgctgatggtatggcatatattgaaagaatgaactatattcaccgagatcttcgggctgctaatattcttgtaggagaaaatcttgtgtgcaaaatagcagactttggtttagcaaggttaattgaagacaatgaatacacagcaagacaaggtgcaaaatttccaatcaaatggacagctcctgaagctgcactgtatggtcggtttacaataaagtctgatgtctggtcatttggaattctgcaaacagaactagtaacaaagggccgagtgccatatccaggtatggtgaaccgtgaagtactagaacaagtggagcgaggatacaggatgccgtgccctcagggctgtccagaatccctccatgaattgatgaatctgtgttggaagaaggaccctgatgaaagaccaacatttgaatatattcagtccttcttggaagactacttcactgctacagagccacagtaccagccaggagaaaatttataattcaagtagcctattttatatgcacaaatctgccaaaatataaagaacttgtgtagattttctacaggaatcaaaagaagaaaatcttctttactctgcatgtttttaatggtaaactggaatcccagatatggttgcacaaaaccacttttttttccccaagtattaaactctaatgtaccaatgatgaatttatcagcgtatttcagggtccaaacaaaatagagctaagatactgatgacagtgtgggtgacagcatggtaatgaaggacagtgaggctcctgcttatttataaatcatttcctttctttttttccccaaagtcagaattgctcaaagaaaattatttattgttacagataaaacttgagagataaaaagctataccataataaaatctaaaattaaggaatatcatgggaccaaataattccattccagttttttaaagtttcttgcatttattattctcaaaagttttttctaagttaaacagtcagtatgcaatcttaatatatgctttcttttgcatggacatgggccaggtttttcaaaaggaatataaacaggatctcaaacttgattaaatgttagaccacagaagtggaatttgaaagtataatgcagtacattaatattcatgttcatggaactgaaagaataagaactttttcacttcagtccttttctgaagagtttgacttagaataatgaaggtaactagaaagtgagttaatcttgtatgaggttgcattgattttttaaggcaatatataattgaaactactgtccaatcaaaggggaaatgttttgatctttagatagcatgcaaagtaagacccagcattttaaaagccctttttaaaaactagacttcgtactgtgagtattgcttatatgtccttatggggatgggtgccacaaatagaaaatatgaccagatcagggacttgaatgcacttttgctcatggtgaatatagatgaacagagaggaaaatgtatttaaaagaaatacgagaaaagaaaatgtgaaagttttacaagttagagggatggaaggtaatgtttaatgttgatgtcatggagtgacagaatggctttgctggcactcagagctcctcacttagctatattctgagactttgaagagttataaagtataactataaaactaatttttcttacacactaaatgggtatttgttcaaaataatgaagttatggcttcacattcattgcagtgggatatggtttttatgtaaaacatttttagaactccagttttcaaatcatgtttgaatctacattcacttttttttgttttcttttttgagacggagtctcgctctgtcgcccaggctggagtgcagtggcgcgatctcggctcactgcaagctctgcctcccaggttcacaccattctcctgcctcagcctcccgagtagctgggactacaggtgcccaccaccacgcctggctagttttttgtatttttagtagagacgcagtttcaccgtgttagccaggatggtctcgatctcctgaccttgtgatccgcccgcctcggcctcccaaagtgctgggattacaggcatgagccaccgcgcccagcctacattcacttctaaagtctatgtaatggtggtcattttttcccttttagaatacattaaatggttgatttggggaggaaaacttattctgaatattaacggtggtgaaaaggggacagtttttaccctaaagtgcaaaagtgaaacatacaaaataagactaatttttaagagtaactcagtaatttcaaaatacagatttgaatagcagcattagtggtttgagtgtctagcaaaggaaaaattgatgaataaaatgaaggtctggtgtatatgttttaaaatactctcatatagtcacactttaaattaagccttatattaggcccctctattttcaggatataattcttaactatcattatttacctgattttaatcatcagattcgaaattctgtgccatggcatatatgttcaaattcaaaccatttttaaaatgtgaagatggacttcatgcaagttggcagtggttctggtactaaaaattgtggttgttttttctgtttacgtaacctgcttagtattgacactctctaccaagagggtcttcctaagaagagtgctgtcattatttcctcttatcaacaacttgtgacatgagattttttaagggctttatgtgaactatgatattgtaatttttctaagcatattcaaaagggtgacaaaattacgtttatgtactaaatctaatcaggaaagtaaggcaggaaaagttgatggtattcattaggttttaactgaatggagcagttccttatataataacaattgtatagtagggataaaacactaacttaatgtgtattcattttaaattgttctgtatttttttgccaagacttaatgtggaagttcccttacc

SEQ ID NO: 53714 - DNA, 2014 bp, Homo sapiens
gcggagccaaggcacacgggtctgacccttgggccggcccggagcaagtgacacggaccggtcgcctatcctgaccacagcaaagcggcccggagcccgcggaggggacctgacgggggcgtaggcgccggaaggctgggggccccggagccgggccggcgtggcccgagttccggtgagcggacggcggcgcgcgcagatttgataatgggctgcattaaaagtaaagaaaacaaaagtccagccattaaatacagacctgaaaatactccagagcctgtcagtacaagtgtgagccattatggagcagaacccactacagtgtcaccatgtccgtcatcttcagcaaagggaacagcagttaatttcagcagtctttccatgacaccatttggaggatcctcaggggtaacgccttttggaggtgcatcttcctcattttcagtggtgccaagttcatatcctgctggtttaacaggtggtgttactatatttgtggccttatatgattatgaagctagaactacagaagacctttcatttaagaagggtgaaagatttcaaataattaacaatacggaaggagattggtgggaagcaagatcaatcgctacaggaaagaatggttatatcccgagcaattatgtagcgcctgcagattccattcaggcagaagaatggtattttggcaaaatggggagaaaagatgctgaaagattacttttgaatcctggaaatcaacgaggtattttcttagtaagagagagtgaaacaactaaaggtgcttattccctttctattcgtgattgggatgagataaggggtgacaatgtgaaacactacaaaattaggaaacttgacaatggtggatactatatcacaaccagagcacaatttgatactctgcagaaattggtgaaacactacacagaacatgctgatggtttatgccacaagttgacaactgtgtgtccaactgtgaaacctcagactcaaggtctagcaaaagatgcttgggaaatccctcgagaatctttgcgactagaggttaaactaggacaaggatgtttcggcgaagtgtggatgggaacatggaatggaaccacgaaagtagcaatcaaaacactaaaaccaggtacaatgatgccagaagctttccttcaagaagctcagataatgaaaaaattaagacatgataaacttgttccactatatgctgttgtttctgaagaaccaatttacattgtcactgaatttatgtcaaaaggaagcttattagatttccttaaggaaggagatggaaagtatttgaagcttccacagctggttgatatggctgctcagattgctgatggtatggcatatattgaaagaatgaactatattcaccgagatcttcgggctgctaatattcttgtaggagaaaatcttgtgtgcaaaatagcagactttggtttagcaaggttaattgaagacaatgaatacacagcaagacaaggtgcaaaatttccaatcaaatggacagctcctgaagctgcactgtatggtcggtttacaataaagtctgatgtctggtcatttggaattctgcaaacagaactagtaacaaagggccgagtgccatatccaggtatggtgaaccgtgaagtactagaacaagtggagcgaggatacaggatgccgtgccctcagggctgtccagaatccctccatgaattgatgaatctgtgttggaagaaggaccctgatgaaagaccaacatttgaatatattcagtccttcttggaagactacttcactgctacagagccacagtaccagcctgggcgacagagcaagactccatctcaaaaagacaaaaaaaatttaccaggcataatggttgcccctgtagtctcagaattgcgggggttgaaaggggagcatcactggggcccagggtccaggcccaggagataaatggccaatgactcaccgatgaccatgaaccttcaaaaaaaggggggttaaatcc

SEQ ID NO: 53715 - DNA, 921 bp, Homo sapiens
aaattatttcattgaagttagaaaatcatgtgaatgacataaaaaagccttttgtaattaaggaaagagacacactaaaggaaagagaaagagagcttcagatgactcttaataccagaatggaatctttagagacagcactgcggcttgtgttacctgtagagaaggcatcacttcttctctgtggctcggacctgcctctccataaaatggccatccagggatttcatctcattgatgctgatcgcatctatcaacacctaaggaatatccaagattccatagcaaaacagattgaaatatgtaaccgcttagaagagccaggcaactttgtattaaaggagttacacccatttgatctacacgcaatgcagaatattatactgaaatacaaaacacaatttgaaggaatgaaccacagggtgcagaggagtgaagatactctcaaagctctggaagactttttggcgtctctcagaacagctaaactctctgctgagcccgttacagacctttcagcctcagatacacaggtggcacaagaaaatacgttgacagtaaaaaataaagagggagaaattcatctgatgaaagacaaggccaaacatttggataaatgtttgaagatgctcgatatgagctttaaagatgctgaacggggtgatgacacctcctgtgaaaacctgcttgatgctttttcaataaagttatctgagacacatggctatggggtacaggaggaattcactgaggaaaacaaattactagaggcttgtattttcaaaaataatgaactccttaaaaatattcaagatgtgcagagtcaaatcagtaaaattggtcttaaggatcctactgttccagctgtgaaacatcggaaaaaatcattaatcagactggataaggttctagatgaatatg

SEQ ID NO: 53716 - DNA, 368 bp, Homo sapiens
caggaaacctactgtgaaaatgcagaaaaacaacagacaaaattgattgttgactcaatatgatatatagttcaaatgtaaacaaatgcttgttagcattccacatcactgaaggaaaaaaagtaagttattatttccaatgttgggagttaggttgctataagcttatgaacacacactttcagtgaatttatgtagaatcggaagcacttcattctcccctcaccacacatcacccccttgctcctcctcgacacgtgcaaaatgatagggcatggtaggggttgtagtgaaatggagaaggcatgccccatctcaagaaacaggtggaccagccacagcttcagctcattgtgtgatacaggaat

SEQ ID NO: 53717 - DNA, 1239 bp, Homo sapiens
gaacattttccctcatcctctgaaagtggaaaccagactgagatggtaagttaactgataaaacctgtcagcattccatcattttccccttttgacgtatcagtacttctaagaagggatctaagcacaattaagtgaattgagtccctggtctagcctcaggaactgaaacttctttggggcttgtcttgagacgtggcaaattctccttggtgagttttctaaaagtatttccccatggaaaggagaaagtggtttgggacagaaagaaatggaatgtcttcagtcatggaagagcctccatttcatctcatgtccatttctagcctctttcaaaaagcacagtgcatcatgagcaacagaaaagcagtagaatcctaaaggacataacagttgttccgtaactagaagcattctttgattttaaatttgaagctgttcagtttgcagctggggatatgtgcatggttgggaacttatacacatagagccattaactacttaagcagctgcagtagacctgattttctgtttgcagtatagagattgatttcaagggagttacattatttgaaaagttatgactttcagcctttgaggttttaagaatcccttttcatggtctgatcttaagttgtttgaaaaaagattcacgcttctgcatccacctctgccctcattctgtcaattgtgtgtggactctgagaagcctgcttgataacttgtcttaagttctattaaggcagttagactgagatttctaatgacttcaccataaagattatacttctgcctggcgtcgtttctataaaacactataggacatttgttttcaaaagcagttgagtaacagcaacataaaccacattttttaaaaaaatgagcacttttcattcacttgaaagcttaagtgggaaaaaggaagatgattgtcaggggaaaaacttacaaaatgctacagtgtttacaaatgccagttccaggtgattagaaaggccgttttcattatggttcagatttggaatagcttatgcaaagattgtgttcatttttatacaattctttttaactttaaattgccatctgtgttttaaacataattctgcactttggaatcagttcattagaatgataacatttatatggataaagatgcagtattccttattctgtacttgatttattatacttaccaaagctgcaactgaataaatctggtgaggtgaggccttcaaaatg

SEQ ID NO: 53718 - DNA, 315 bp, Homo sapiens
cagaaagacactcctgcctggaaatgccaaacatcttaggacaggcagctggctgacatggttagagatgattgggggaagctgctgctgagtgaggtgttcagagctccgaggcataaatcctgtattctgaggacaccactggtagaggtaatccctagggggccctttccctgacagtgtcttggctgtgcctggcttcttttgttcctttctgagctcaagtttgacacccttccccttgtatctgtgacaaataaatgccttttcagtaagctcctttccactagagttaactaacatcaatttctgtta

SEQ ID NO: 53719 - DNA, 453 bp, Homo sapiens
ctatattaatgataatgatcatattacaggttccagacccaaccctattttttttttatttggtctggggactttaaggagttctagctttcttaatttgccttattctgatttggagattcacttctgatgttggggttcaaaactttgatactttacattctactctaatttctaaaacaggcttcattctcctaaactgctgttaacatgaaaaattttaaattccatttctccaggaatggtgacctaaccttctcttgttggttcattgataggagtaaagtcatcaccaaggctgggctgctgctattggctgccacattacctgcttggttatctgcaaatgacaagacccttgtttctacatccttcctgcaggtacttagcactaacttctggctcaaaatgctttgatgccatctccctaaagaaaaaccaataacttttggt

SEQ ID NO: 53720 - DNA, 351 bp, Homo sapiens
gccgcgcccggccaggcttttttttctctaggcctgctgtggccaccaaggctggggaccagggggcctccagggacagggatcccaagttgcacgttaatacacggagccctttctgagatgcaggttctacagggaactggattccacctcttttggggagatcaacccagcagcccaaggatcccctgatggtgcctgagcacagctgtgagaagggggtatctggatccttggggtgacaggatgggagaggtggagcatgggcctgcaggctggcccccagaggccttaggtctctgctgactagctagaattctgaaaactgtgttatgtaagacgtttagcatc

SEQ ID NO: 53721 - DNA, 3565 bp, Homo sapiens
ccggtgcagcggctggcgatcggccgcggaggtgcgtgcagggcccgcgccgccgccggtatctccaccgccaacacctcagccactgccactgccacagccacacgaggccccccaccgtgcgctccgccgctgcggtcccggatccgcgctccacgcccgcagcccgcggcgccaccagcccagcatgcaccagaaaaccccagaaatttactccgtggagctcagcggaactaaggacatcgtgaaaacagacaagggggatggcaaggagaagtataggggtctgaagaacaactgcctggaactcaaaaagaaaaatcacaaagaggagtttcagaaagaactccatctggatgaccacaaactcagcaatagggaattggaagagaaatatggcacagacatcattatgggtctctccagcaccagagctgccgagctcctggcccgggatgggcccaactccctcacccctcccaagcagacgcctgagatcgtcaagttcctcaagcagatggtgggggggttctctatcctcctgtgggtgggcgcctttctctgttggattgcatatgggattcagtactccagcgacaagtctgcatccctgaacaacgtgtacttgggctgtgtgcttggtctggtggtcattttaacggggatctttgcttattaccaagaggcaaaaagcaccaacatcatgtccagcttcaataagatgatccctcagcaagctctcgtcatccgagattccgagaagaagaccatcccttcagagcagctggtggtgggggacattgtggaggtcaaaggaggagaccagatccctgcagacatcagggtgctgtcttctcaggggtgtcgggtggataactcatctctcacgggggagtctgagccccagccccgctcctctgagtttacccatgaaaaccccctggaaacaaagaacatctgcttctattccacaacgtgtctggaaggcactgtcaccggcatggttatcaacacgggtgaccgcaccatcattggccatattgcctcattggcctcaggagttggaaatgagaagacgcccattgccattgagatcgagcactttgttcacattgtggcaggagtggctgtctccatcggcatccttttcttcatcatcgctgtgtccctgaagtatcaagtcctggactccatcatcttcctcattggcatcattgtggccaatgtgcccgagggcctcctggccactgtcactgtgaccctgtcgctgacagcaaaacggatggccaagaagaactgcctggtgaagaacctggaggctgtggagaccctcggctccacctccatcatctgctcggacaagactgggacactgacccagaacaggatgacagtggcccatctgtggttcgacaatcagatctttgtggctgacaccagtgaggaccattcaaaccaagtctttgaccaaagctctaggacttgggcctccttatccaagataataacattgtgtaaccgagcagagttcaagccaggacaggaaaatgtccccatcatgaagaaagctgtgattggagatgcctcagaaactgctcttttaaaattctcagaggtcattttgggtgatgtgatggaaattagaaaaagaaaccgcaaagtagctgaaatcccttttaactctactaataaatttcagctctccatccacgagatggatgacccccacggcaagcgcttcctcatggtgatgaagggggcccctgagcgcattctagagaaatgcagcaccatcatgatcaacggcgaggagcacccactggacaagagcactgccaagaccttccacacagcctacatggagctgggcgggttgggcgagcgtgtgctgggtttctgtcatctctacctgccagcagacgagtttccagaaacctactcatttgacatagacgctatgaactttccgacctccaacctctgttttgtgggactcttgtcaatgatcgatccccctcggtccaccgtgccagatgcagtcaccaaatgccggagtgcagggatcaaggttattatggttactggtgatcatcccatcacagccaaagctattgccaagagtgtggggatcatttcagccaacagtgaaacagtggaagacattgcacatcgcctcaacattgctgtggagcaagttaacaaacgggatgccaaggccgctgtggtgactggcatggagctgaaggacatgagctcagaacagctggatgagatcttagccaactaccaggagattgtctttgcccggacatccccccagcagaagctgatcattgtggagggctgtcagaggcaggatgctgttgttgctgtgaccggggatggagttaatgactctccggctctaaagaaggcagacattgggattgccatggggatagcaggttctgatgcagccaaaaatgcagccgacatggtcttgctggacgacaacttcgcatccatcgtcacaggggtggaggaaggtcgcctgatctttgacaacctcaagaagactattgcttattccctgaccaagaacattgccgagctgtgcccctttctgatctacatcattgtcgggctccccctgcccattggcaccatcaccattctgttcattgacttggggacagacattatcccctccattgccttggcgtacgagaaagctgaaagtgacatcatgaacaggaagcctcgccacaagaataaggacaggctggtgaaccagccgctcgctgtgtactcatacctgcacattggcctcatgcaagccctgggagctttccttgtgtatttcaccgtctatgcacaagagggctttctgccccgcactctcattaacctgcgggtagaatgggagaaggactacgtgaatgacttgaaagacagctatgggcaggaatggacaaggtaccagagggaatacctagaatggacgggctacacggctttctttgttggcatcctagtccagcaaatagcagatctgatcatcaggaaaacccggaggaattccatcttccagcagggtctcttcagaaataaagtcatctgggtggggatcacctcacagatcatcattggtctgatcctctcctatggcctcggaagtgtcacagccttgagtttcaccatgcttagggctcagtactggtttgtggctgtgccgcacgccatcctgatctgggtgtatgatgaggtgcggaagctcttcatcaggctctaccctggaagctggtgggataagaacatgtattattaagaccacctcccttcctatgtctctcagcagcacgttggggcacacttgttcatcttctgaccgtttgctgggctattcccctgcagtgcagacatcgtcaaaattcatacaagaggaaattttcatgcagaaagctgtatgcaggatgctcactgatgttttgcactttaaaactgaaattcaactctttatataggattttcttttctatctccatctcctcattaaaaaatacgtacatttcgaggtaatggtata

SEQ ID NO: 53722 - DNA, 262 bp, Homo sapiens
tccatcttccagcagggtctcttcaggtactgcctgtgcccggcctcctggggcagccctgggcctgccgtgcaaggatgatgatgatttgtttttcacaagacagagttctggccacacttgtaaccccagaggcattgatttttctggtggcatggtctgctgggtgtatgatcatgaagccacaagaatcccaagtctgtctgcttttgtgtgtcttgcagaaataaagtcatctgggtggggatcacctcacagatca

SEQ ID NO: 53723 - DNA, 439 bp, Homo sapiens
gacgtgggcggggcgggcggcatttaaggctggtgccacctccccggtgcagcggctggcgatcggccgcggaggtgcgtgcagggcccgcgccgccgccggtatctccaccgccaacacctcagccactgccactgccacagccacacgaggccccccaccgtgcgctccgccgctgcggtcccggatccgcgctccacgcccgcagcccgcggcgccaccagcccagcatgcaccaggtgcgtgcagcccccgcgccggccgaggatgcgagacgctgggccaaggccccggggaccggagcaggctgacgggaagcgaggaaaaggcgaagaggagaaacgccccgtcccggggcaaggggaggccgcctttcctctgagcgccccccggcctgggcaccgcttctctgactccccgccacggctccgtgcggccg

SEQ ID NO: 53724 - DNA, 1812 bp, Homo sapiens
gtggcactcaacaggtgctctgagtggcacccacggccaggtcctgggagaggacagaaaacaactgggactcctcagcccccggcagctcccagtgcccagccacccacaacacaacccaaagccttctagacaagctcagtggaatctgaagggcccaccccatggaggaatgctgggtgacagagatagccaatggctccaaggatggcttggattccaaccctatgaaggattacatgatcctgagtggtccccagaagacagctgttgctgtgttgtgcactcttctgggcctgctaagtgccctggagaacgtggctgtgctctatctgatcctgtcctcccaccaactccgccggaagccctcatacctgttcattggcagcttggctggggctgacttcctggccagtgtggtctttgcatgcagctttgtgaatttccatgttttccatggtgtggattccaaggctgtcttcctgctgaagattggcagcgtgactatgaccttcacagcctctgtgggtagcctcctgctgaccgccattgaccgatacctctgcctgcgctatccaccttcctacaaagctctgctcacccgtggaagggcactggtgaccctgggcatcatgtgggtcctctcagcactagtctcctacctgcccctcatgggatggacttgctgtcccaggccctgctctgagcttttcccactgatccccaatgactacctgctgagctggctcctgttcatcgccttcctcttttccggaatcatctacacctatgggcatgttctctggaaggcccatcagcatgtggccagcttgtctggccaccaggacaggcaggtgccaggaatggcccgaatgaggctggatgtgaggttggccaagaccctagggctagtgttggctgtgctcctcatctgttggttcccagtgctggccctcatggcccacagcctggccactacgctcagtgaccaggtcaagaaggcctttgctttctgctccatgctgtgcctcatcaactccatggtcaaccctgtcatctatgctctacggagtggagagatccgctcctctgcccatcactgcctggctcactggaagaagtgtgtgaggggccttgggtcagaggcaaaagaagaagccccgagatcctcagtcaccgagacagaggctgatgggaaaatcactccgtggccagattccagagatctagacctctctgattgctgatgaggcctcttcccaatttaaacaactcaagtcagaaatcagttcactccctggaagagagagaggggtcttggcactctcttcttacttaaaccagtcccagacacctagacacggacccctttttgctgatgagtgttgggactgactcctggaagacagcctggccttgcccacctgcacacagtctgttggataggtagggccacgaggagtagccaggtaggcgagacacaaaaaggcctgggacagggtcagtacaagtcaggtcaggcttcatgcctgcatcctccagagaccacaggagccaaagcgagcctccaggcccagcaatgagggacttgggagaaatctgagaagaatgggttgttctcttgggaagtcagggtatcagatgggatggacatccaggtcttctccctgcctaattgtcaaggcctccttggctctggagctatgaaaggccccactttcaagtcacccttgccactgaggaccgaggactatgctatgatgaggattaaggtgttgacttgcctctttcagagataaatgacaagccttc

SEQ ID NO: 53725 - DNA, 398 bp, Homo sapiens
ccatgttggccaggttggtctcaaactcctgaccttgtgatctgcctgccttggtctcccagagtgctgggattacaggtgtgagccaccgtgcctggccacccccccgccgccaccctttttctttcctaggacagattctcgctatgtcgcccaggttgcagtgagccgagattgcaccactgcactccagcctgggtgacagagcaagactgtctcaaaaaaataaaataaaatagatcccagggtactcatttttcatatgagggaggctgggttcctcccagaggagcctaaaacagccaacaagagaaattgttggcggcaggaagattgcagaggaattctaatgcaattatttgggacctcaaatggaataaaatgaaagatattggtta

SEQ ID NO: 53726 - DNA, 2706 bp, Homo sapiens
gtggcactcaacaggtgctctgagtggcacccacggccaggtcctgggagaggacagaaaacaactgggactcctcagcccccggcagctcccagtgcccagccacccacaacacaacccaaagccttctagacaagctcagtggaatctgaagggcccaccccatggaggaatgctgggtgacagagatagccaatggctccaaggatggcttggattccaaccctatgaaggattacatgatcctgagtggtccccagaagacagctgttgctgtgttgtgcactcttctgggcctgctaagtgccctggagaacgtggctgtgctctatctgatcctgtcctcccaccaactccgccggaagccctcatacctgttcattggcagcttggctggggctgacttcctggccagtgtggtctttgcatgcagctttgtgaatttccatgttttccatggtgtggattccaaggctgtcttcctgctgaagattggcagcgtgactatgaccttcacagcctctgtgggtagcctcctgctgaccgccattgaccgatacctctgcctgcgctatccaccttcctacaaagctctgctcacccgtggaagggcactggtgaccctgggcatcatgtgggtcctctcagcactagtctcctacctgcccctcatgggatggacttgctgtcccaggccctgctctgagcttttcccactgatccccaatgactacctgctgagctggctcctgttcatcgccttcctcttttccggaatcatctacacctatgggcatgttctctggaaggcccatcagcatgtggccagcttgtctggccaccaggacaggcaggtgccaggaatggcccgaatgaggctggatgtgaggttggccaagaccctagggctagtgttggctgtgctcctcatctgttggttcccagtgctggccctcatggcccacagcctggccactacgctcagtgaccaggtcaagaaggcctttgctttctgctccatgctgtgcctcatcaactccatggtcaaccctgtcatctatgctctacggagtggagagatccgctcctctgcccatcactgcctggctcactggaagaagtgtgtgaggggccttgggtcagaggcaaaagaagaagccccgagatcctcagtcaccgagacagaggctgatgggaaaatcactccgtggccagattccagagatctagacctctctgattgctgatgaggcctcttcccaatttaaacaactcaagtcagaaatcagttcactccctggaagagagagaggggtcttggcactctcttcttacttaaaccagtcccagacacctagacacggacccctttttgctgatgagtgttgggactgactcctggaagacagcctggccttgcccacctgcacacagtctgttggataggtagggccacgaggagtagccaggtaggcgagacacaaaaaggcctgggacagggtcagtacaagtcaggtcaggcttcatgcctgcatcctccagagaccacaggagccaaagcgagcctccaggcccagcaatgagggacttgggagaaatctgagaagaatgggttgttctcttgggaagtcagggtatcagatgggatggacatccaggtcttctccctgcctaattgtcaaggcctccttggctctggagctatgaaaggccccactttcaagtcacccttgccactgaggaccgaggactatgctatgatgaggattaaggtgttgacttgcctctttcagagataaatgacaagccttcagtttggggcatcctgttgtttgggcgaggaccctctctgatattctgataatccccacctgtaacctcaggtccctggaaatacagaggaggctgggatcgcctgagacacaaaaatctttggagaattttcttgaccctctgaagtccttccagcagcagtcctggtggtgctgctggaagcaggcaatgtcctagtctaacctaactcgaagaaaaaaaggaagatattcacaaagattgtataaatctccaaactgttcccctatctgcccccaattcagctcccttgcctcctccacacccctattacatataataagcagagcaagtgggaggaggggaaatgtccttcctatatgccaggtatggggctgacatttcagtctattgaccccagctagaatatagctccatgattttaaagatctcaggggccaggcatggtagctcatgcctgtaatcccagcactttgggaggccaaggcaggtggatcacctgaggtcaggagtttgagaccagcctgaccaatatggtgaaaccctgtctctactaaaaatacaaaaattagcagggcatggtggcaggcacctgtagtcccagctactcgggaggctgagacaggagaattgcttgaaccctggaggcagaggttgcagtgagccgagattgcaccactgcactccagcctgggtgacagagcaagactgtctcaaaaaaataaaataaaatagatcccagggtactcatttttcatatgagggaggctgggttcctcccagaggagcctaaaacagccaacaagagaaattgttggcggcaggaagattgcagaggaattctaatgcaattatttgggacctcaaatggaataaaatgaaagatattggtta

SEQ ID NO: 53727 - DNA, 833 bp, Homo sapiens
gtggcactcaacaggtgctctgagtggcacccacggccaggtcctgggagaggacagaaaacaactgggactcctcagcccccggcagctcccagtgcccagccacccacaacacaaccgtgagtagctttttttgttgtttattttaggcttcttcctcattccccaacacctgtattcttttttgtttgtttgtttgtttttgagacggagttttgctctgttgaccaggctaaagtacagtggcacaatctcggctcatgcaacctctgcctcctgggttcaagcagttctcctgccttagcctcccatgtagctgggattacaggtgcccgccaccatgcccagctaatttttgtattgttagtagagatggagtttcaccatattggccaggctggtcttgaactcctgacttcaagtgatccacccaccttagcctcccaaagtgctaggattacaggtgtgagccaccactcccagcccctatgtctgctttaagtggagaagcagagcttatgagggaggagaacaagggtgcaaaagggacctagatatcactgagaactgcccttgttgtttggttgaggaaatgggcccagacagtggacaagacttgctcagggagacaaacgagatggtgtccagtgcaacaaacctaggtttcctaacttccagttctgtccactctacatcagtgcctctcacctgtccctgcaggttcacattttggttatgtggataaggagaaataaattgaagatcacaatgtcccattttatcttccccaagacaagctctgtaacattaaagaccactatgcaaaccgaaaa

SEQ ID NO: 53728 - DNA, 2667 bp, Homo sapiens
gtggcactcaacaggtgctctgagtggcacccacggccaggtcctgggagaggacagaaaacaactgggactcctcagcccccggcagctcccagtgcccagccacccacaacacaacccaaagccttctagacaagctcagtggaatctgaagggcccaccccatggaggaatgctgggtgacagagatagccaatggctccaaggatggcttggattccaaccctatgaaggattacatgatcctgagtggtccccagaagacagctgttgctgtgttgtgcactcttctgggcctgctaagtgccctggagaacgtggctgtgctctatctgatcctgtcctcccaccaactccgccggaagccctcatacctgttcattggcagcttggctggggctgacttcctggccagtgtggtctttgcatgcagctttgtgaatttccatgttttccatggtgtggattccaaggctgtcttcctgctgaagattggcagcgtgactatgaccttcacagcctctgtgggtagcctcctgctgaccgccattgaccgatacctctgcctgcgctatccaccttcctacaaagctctgctcacccgtggaagggcactggtgaccctgggcatcatgtgggtcctctcagcactagtctcctacctgcccctcatgggatggacttgctgtcccaggccctgctctgagcttttcccactgatccccaatgactacctgctgagctggctcctgttcatcgccttcctcttttccggaatcatctacacctatgggcatgttctctggaaggcccatcagcatgtggccagcttgtctggccaccaggacaggcaggtgccaggaatggcccgaatgaggctggatgtgaggttggccaagaccctagggctagtgttggctgtgctcctcatctgttggttcccagtgctggccctcatggcccacagcctggccactacgctcagtgaccaggtcaagaaggcctttgctttctgctccatgctgtgcctcatcaactccatggtcaaccctgtcatctatgctctacggagtggagagatccgctcctctgcccatcactgcctggctcactggaagaagtgtgtgaggggccttgggtcagaggcaaaagaagaagccccgagatcctcagtcaccgagacagaggctgatgggaaaatcactccgtggccagattccagagatctagacctctctgattgctgatgaggcctcttcccaatttaaacaactcaagtcagaaatcagttcactccctggaagagagagaggggtcttggcactctcttcttacttaaaccagtcccagacacctagacacggacccctttttgctgatgagtgttgggactgactcctggaagacagcctggccttgcccacctgcacacagtctgttggataggtagggccacgaggagtagccaggtaggcgagacacaaaaaggcctgggacagggtcagtacaagtcaggtcaggcttcatgcctgcatcctccagagaccacaggagccaaagcgagcctccaggcccagcaatgagggacttgggagaaatctgagaagaatgggttgttctcttgggaagtcagggtatcagatgggatggacatccaggtcttctccctgcctaattgtcaaggcctccttggctctggagctatgaaaggccccactttcaagtcacccttgccactgaggaccgaggactatgctatgatgaggattaaggtgttgacttgcctctttcagagataaatgacaagccttcagtttggggcatcctgttgtttgggcgaggaccctctctgatattctgataatccccacctgtaacctcaggtccctggaaatacagaggaggctgggatcgcctgagacacaaaaatctttggagaattttcttgaccctctgaagtccttccagcagcagtcctggtggtgctgctggaagcaggcaatgtcctagtctaacctaactcgaagaaaaaaaggaagatattcacaaagattgtataaatctccaaactgttcccctatctgcccccaattcagctcccttgcctcctccacacccctattacatataataagcagagcaagtgggaggaggggaaatgtccttcctatatgccaggtatggggctgacatttcagtctattgaccccagctagaatatagctccatgattttaaagatctcaggggccaggcatggtagctcatgcctgtaatcccaaagtgctaggattacaggtgtgagccaccactcccagcccctatgtctgctttaagtggagaagcagagcttatgagggaggagaacaagggtgcaaaagggacctagatatcactgagaactgcccttgttgtttggttgaggaaatgggcccagacagtggacaagacttgctcagggagacaaacgagatggtgtccagtgcaacaaacctaggtttcctaacttccagttctgtccactctacatcagtgcctctcacctgtccctgcaggttcacattttggttatgtggataaggagaaataaattgaagatcacaatgtcccattttatcttccccaagacaagctctgtaacattaaagaccactatgcaaaccgaaaa

SEQ ID NO: 53729 - DNA, 2024 bp, Homo sapiens
gtggcactcaacaggtgctctgagtggcacccacggccaggtcctgggagaggacagaaaacaactgggactcctcagcccccggcagctcccagtgcccagccacccacaacacaacccaaagccttctagacaagctcagtggaatctgaagggcccaccccatggaggaatgctgggtgacagagatagccaatggctccaaggatggcttggattccaaccctatgaaggattacatgatcctgagtggtccccagaagacagctgttgctgtgttgtgcactcttctgggcctgctaagtgccctggagaacgtggctgtgctctatctgatcctgtcctcccaccaactccgccggaagccctcatacctgttcattggcagcttggctggggctgacttcctggccagtgtggtctttgcatgcagctttgtgaatttccatgttttccatggtgtggattccaaggctgtcttcctgctgaagattggcagcgtgactatgaccttcacagcctctgtgggtagcctcctgctgaccgccattgaccgatacctctgcctgcgctatccaccttcctacaaagctctgctcacccgtggaagggcactggtgaccctgggcatcatgtgggtcctctcagcactagtctcctacctgcccctcatgggatggacttgctgtcccaggccctgctctgagcttttcccactgatccccaatgactacctgctgagctggctcctgttcatcgccttcctcttttccggaatcatctacacctatgggcatgttctctggaaggcccatcagcatgtggccagcttgtctggccaccaggacaggcaggtgccaggaatggcccgaatgaggctggatgtgaggttggccaagaccctagggctagtgttggctgtgctcctcatctgttggttcccagtgctggccctcatggcccacagcctggccactacgctcagtgaccaggtcaagaaggcctttgctttctgctccatgctgtgcctcatcaactccatggtcaaccctgtcatctatgctctacggagtggagagatccgctcctctgcccatcactgcctggctcactggaagaagtgtgtgaggggccttgggtcagaggcaaaagaagaagccccgagatcctcagtcaccgagacagaggctgatgggaaaatcactccgtggccagattccagagatctagacctctctgattgctgatgaggcctcttcccaatttaaacaactcaagtcagaaatcagttcactccctggaagagagagaggggtcttggcactctcttcttacttaaaccagtcccagacacctagacacggacccctttttgctgatgagtgttgggactgactcctggaagacagcctggccttgcccacctgcacacagtctgttggataggtagggccacgaggagtagccaggtaggcgagacacaaaaaggcctgggacagggtcagtacaagtcaggtcaggcttcatgcctgcatcctccagagaccacaggagccaaagcgagcctccaggcccagcaatgagggacttgggagaaatctgagaagaatgggttgttctcttgggaagtcagggtatcagatgggatggacatccaggtcttctccctgcctaattgtcaaggcctccttggctctggagctatgaaaggccccactttcaagtcacccttgccactgaggaccgaggactatgctatgatgaggattaaggtgttgacttgcctctttcagagataaatgacaagccttcagtttggggcatcctgttgtttgggcgaggaccctctctgatattctgataatccccacctgtaacctcaggtccctggaaatacagaggaggctgggatcgcctgagacacaaaaatctttgaacacccctccaaaaccaccgacaagtgccttcgctctgtttttatgccctgaattgaaggtttattttttaatatatattatctaagt

SEQ ID NO: 53730 - DNA, 2752 bp, Homo sapiens
cgttgtaagtgcacagtaagtttgctgaaagaatgaggactgctctcctcccctttctgccccacttgtaagtgaaaaaggggaagaaagagaatattgttcagttgattatgccagccagatgcagccgccgccgctccactgtcactctccaaggccagcgccacctctcactcaccgagctccagccgaaggagaagggggcaaagccttctagacaagctcagtggaatctgaagggcccaccccatggaggaatgctgggtgacagagatagccaatggctccaaggatggcttggattccaaccctatgaaggattacatgatcctgagtggtccccagaagacagctgttgctgtgttgtgcactcttctgggcctgctaagtgccctggagaacgtggctgtgctctatctgatcctgtcctcccaccaactccgccggaagccctcatacctgttcattggcagcttggctggggctgacttcctggccagtgtggtctttgcatgcagctttgtgaatttccatgttttccatggtgtggattccaaggctgtcttcctgctgaagattggcagcgtgactatgaccttcacagcctctgtgggtagcctcctgctgaccgccattgaccgatacctctgcctgcgctatccaccttcctacaaagctctgctcacccgtggaagggcactggtgaccctgggcatcatgtgggtcctctcagcactagtctcctacctgcccctcatgggatggacttgctgtcccaggccctgctctgagcttttcccactgatccccaatgactacctgctgagctggctcctgttcatcgccttcctcttttccggaatcatctacacctatgggcatgttctctggaaggcccatcagcatgtggccagcttgtctggccaccaggacaggcaggtgccaggaatggcccgaatgaggctggatgtgaggttggccaagaccctagggctagtgttggctgtgctcctcatctgttggttcccagtgctggccctcatggcccacagcctggccactacgctcagtgaccaggtcaagaaggcctttgctttctgctccatgctgtgcctcatcaactccatggtcaaccctgtcatctatgctctacggagtggagagatccgctcctctgcccatcactgcctggctcactggaagaagtgtgtgaggggccttgggtcagaggcaaaagaagaagccccgagatcctcagtcaccgagacagaggctgatgggaaaatcactccgtggccagattccagagatctagacctctctgattgctgatgaggcctcttcccaatttaaacaactcaagtcagaaatcagttcactccctggaagagagagaggggtcttggcactctcttcttacttaaaccagtcccagacacctagacacggacccctttttgctgatgagtgttgggactgactcctggaagacagcctggccttgcccacctgcacacagtctgttggataggtagggccacgaggagtagccaggtaggcgagacacaaaaaggcctgggacagggtcagtacaagtcaggtcaggcttcatgcctgcatcctccagagaccacaggagccaaagcgagcctccaggcccagcaatgagggacttgggagaaatctgagaagaatgggttgttctcttgggaagtcagggtatcagatgggatggacatccaggtcttctccctgcctaattgtcaaggcctccttggctctggagctatgaaaggccccactttcaagtcacccttgccactgaggaccgaggactatgctatgatgaggattaaggtgttgacttgcctctttcagagataaatgacaagccttcagtttggggcatcctgttgtttgggcgaggaccctctctgatattctgataatccccacctgtaacctcaggtccctggaaatacagaggaggctgggatcgcctgagacacaaaaatctttggagaattttcttgaccctctgaagtccttccagcagcagtcctggtggtgctgctggaagcaggcaatgtcctagtctaacctaactcgaagaaaaaaaggaagatattcacaaagattgtataaatctccaaactgttcccctatctgcccccaattcagctcccttgcctcctccacacccctattacatataataagcagagcaagtgggaggaggggaaatgtccttcctatatgccaggtatggggctgacatttcagtctattgaccccagctagaatatagctccatgattttaaagatctcaggggccaggcatggtagctcatgcctgtaatcccaaagtgctaggattacaggtgtgagccaccactcccagcccctatgtctgctttaagtggagaagcagagcttatgagggaggagaacaagggtgcaaaagggacctagatatcactgagaactgcccttgttgtttggttgaggaaatgggcccagacagtggacaagacttgctcagggagacaaacgagatggtgtccagtgcaacaaacctaggtttcctaacttccagttctgtccactctacatcagtgcctctcacctgtccctgcaggttcacattttggttatgtggataaggagaaataaattgaagatcacaatgtcccattttatcttccccaagacaagctctgtaacattaaagaccactatgcaaaccgaaaa

SEQ ID NO: 53731 - DNA, 2797 bp, Homo sapiens
aaagtttaaatgttttactagccacatttaaaaagaaacacatgaagttattattatttgttttagagacggggtcttgctttgtcgtccacgctggtctccaactccttggctccctcaagcaatcctccagactaggcctcacaaagtgctgagattacaggcctgggccactgcccccggcctgaagttaattttaatatttcacctaacccaatatatccaaaatatcatttcaacatataaaaattattgagattttacctcaccagtcttagacatccagcgtgtggtttatgcatacagtacatatcaattccacactaaattttcagcatttaaagggaaatatggtcctgaaaaaaaaacaacaaaacaaaaaaacgcctgtttaaggagaaagcattccacactgcttgttttaatataattaaaattaatgtatcaattaataaatcaatagcccacgttggctagtggctgccttactgggcagaccaggtctggattgtaaatacgttcagacgttccacgcaaaagcaaagttccctgcagacgctccattaagttctgggtgcaaggaagcgcggatccttcagttctgggcgttttcaccaggtggcactcagaacaccctcacgtgacaagcgtcccacccggaagcgaaatctccccttctacagagttcctccggcgcttcctccaccccgggatacacagaacctcatctcctacggtgctgaagcctgcagcagggcaggatgggcaggagagcagagccgcggagtctgcggcgcgggtgaagagcggcgcgtaattcccgcagcaagattgttccgcgcccgcagcccctggactagcaggatccgaaccccggcggctgcgtgcttataggcgcagacgtcagagagcccgcggcttaaagcgcgtcgcctggctagcgccaccccctagccttcttcaaggcctccagggctgggcccaagcgcccgtcgacggcaccctgggcccagaggactcgcgggcctcatctccaatgattcagaactcacgtccgtcgctgctgcaaccccaagatgtcggagacacggtggaaacgcttatgttacatccggtgatcaaggctttcctgtgtggctccatcagtgggacctgctctaccctccttttccaacctctggatctccttaaaacacgcctacaaaccctccagccctcagatcatgggtctagacgtgttgggatgttggctgtactcttgaaggtggttcgcacggagagtcttttgggcctttggaaagggatgtccccttccattgtgagatgtgtccctggcgttggaatctactttggcactctctactctttgaagcagtatttcttgcgaggccatcccccaaccgccctggagtcagtcatgctgggggtgggctctcgctctgttgcaggggtctgtatgtcacctatcactgtaatcaagacgcgctatgagagtgggaaatatggctatgagagtatctacgctgccctgaggagcatctatcacagtgaggggcaccggggcctcttcagtggcctgacagcaactctccttcgagatgcgcccttctcaggaatctacctgatgttttacaaccagaccaaaaatatagtgcctcatgaccaggtggatgcaacccttattcctattacaaatttcagctgtgggatatttgctggtattctggcctcactggtaactcaacctgcggatgttatcaaaactcatatgcagctttatccactgaagtttcaatggattggccaagcagtgacacttattttcaaagactatggactacgtggcttcttccaaggtggcatcccccgagccctccgcagaactctaatggcagcaatggcgtggacggtgtatgaagagatgatggccaagatgggcctgaagtcctgaccaagagaggactgggaacgggtgaaatctgttgccctgcttggtttctgccaagggctgctgcttcttactattctgcagtaagatgaagtcctacctggaaaaccaggcagaaattgtgttgcctttgccttcagtaatccccttaaggagaaaatatatggacctgatttcagccttcagaatctccaaaagaggagtcatcaattcatagagcacactagggtgttaggagagagctttgcatactctgagaggctacttggaaaggcattttcccaggagagctctgtcaggtggctgcgcttcagccccacccctacaccacagggtctccttgggtatgttcttgggcaagcaatcacaaagccagagaagctgtaagctgcctgccgggcctgaggagctccaaccagggaagactggatgtgaggagaggagtcactgtcaccaggtcacagactgactgaggtgatggtaggatgaggaggaacagatgcccttctttaattggttctcagttaacttctcagaggctctggagaacgggacagtggctttctagcctctgaatgttccaaataaaattttttggtcttggcccctgtactgttttacctctaaattctggcatttttttttccctgcaattaaagtgctgtactttatttattgaactttatcattgaaagctgtttggaaaacctaaaagatgttgtcacacttctgttttctttacctgtgccttataaaaatggaccaaacccttttctaaaataaaatagttctagggtggctggttattgacctatgtaggtccctaaaacctaatttctgttcaaaaaa

SEQ ID NO: 53732 - DNA, 2746 bp, Homo sapiens
aaagtttaaatgttttactagccacatttaaaaagaaacacatgaagttattattatttgttttagagacggggtcttgctttgtcgtccacgctggtctccaactccttggctccctcaagcaatcctccagactaggcctcacaaagtgctgagattacaggcctgggccactgcccccggcctgaagttaattttaatatttcacctaacccaatatatccaaaatatcatttcaacatataaaaattattgagattttacctcaccagtcttagacatccagcgtgtggtttatgcatacagtacatatcaattccacactaaattttcagcatttaaagggaaatatggtcctgaaaaaaaaacaacaaaacaaaaaaacgcctgtttaaggagaaagcattccacactgcttgttttaatataattaaaattaatgtatcaattaataaatcaatagcccacgttggctagtggctgccttactgggcagaccaggtctggattgtaaatacgttcagacgttccacgcaaaagcaaagttccctgcagacgctccattaagttctgggtgcaaggaagcgcggatccttcagttctgggcgttttcaccaggtggcactcagaacaccctcacgtgacaagcgtcccacccggaagcgaaatctccccttctacagagttcctccggcgcttcctccaccccgggatacacagaacctcatctcctacggtgctgaagcctgcagcagggcaggatgggcaggagagcagagccgcggagtctgcggcgcgggtgaagagcggcgcgtaattcccgcagcaagattgttccgcgcccgcagcccctggactagcaggatccgaaccccggcggctgcgtgcttataggcgcagacgtcagagagcccgcggcttaaagcgcgtcgcctggctagcgccaccccctagccttcttcaaggcctccagggctgggcccaagcgcccgtcgacggcaccctgggcccagaggactcgcgggcctcatctccaatgattcagaactcacgtccgtcgctgctgcaaccccaagatgtcggagacacggtggaaacgcttatgttacatccggtgatcaaggctttcctgtgtggctccatcagtgggacctgctctaccctccttttccaacctctggatctccttaaaacacgcctacaaaccctccagccctcagatcatgggtctagacgtgttgggatgttggctgtactcttgaaggtggttcgcacggagagtcttttgggcctttggaaagggatgtccccttccattgtgagatgtgtccctggcgttggaatctactttggcactctctactctttgaagcagtatttcttgcgaggccatcccccaaccgccctggagtcagtcatgctgggggtgggctctcgctctgttgcaggggtctgtatgtcacctatcactgtaatcaagacgcgctatgagagtgggaaatatggctatgagagtatctacgctgccctgaggagcatctatcacagtgaggggcaccggggcctcttcagtggcctgacagcaactctccttcgagatgcgcccttctcaggaatctacctgatgttttacaaccagaccaaaaatatagtgcctcatgaccaggtggatgcaacccttattcctattacaaatttcagctgtgggatatttgctggtattctggcctcactggtaactcaacctgcggatgttatcaaaactcatatgcagctttatccactgaagtttcaatggattggccaagcagtgacacttattttcaaagactatggactacgtggcttcttccaaggtggcatcccccgagccctccgcagaactctaatggcagcaatggcgtggacggtgtatgaagagatgatggccaagatgggcctgaagtcctgaccaagagaggactgggaacgggtgaaatctgttgccctgcttggtttctgccaagggctgctgcttcttactattctgcagtaagatgaagtcctacctggaaaaccaggcagaaattgtgttgcctttgccttcagtaatccccttaaggagaaaatatatggacctgatttcagccttcagaatctccaaaagaggagtcatcaattcatagagcacactagggtgttaggagagagctttgcatactctgagaggctacttggaaaggcattttcccaggagagctctgtcaggtggctgcgcttcagccccacccctacaccacagggtctccttgggtatgttcttgggcaagcaatcacaaagccagagaagctgtaagctgcctgccgggcctgaggagctccaaccagggaagactggatgtgaggagaggagtcactgtcaccaggtcacagactgactgaggtgatggtaggatgaggaggaacagatgcccttctttaattggttctcagttaacttctcagaggctctggagaacgggacagtggctttctagcctctgaatgttccaaataaaattttttggtcttggcccctgtactgttttacctctaaattctggcatttttttttccctgcaattaaagtgctgtactttatttattgaactttatcattgaaagctgtttggaaaacctaaaagatgttgtcacacttctgttttctttacctgtgccttataaaaatggaccaaacccttttctaaaataaaatagttctagggtg

SEQ ID NO: 53733 - DNA, 2017 bp, Homo sapiens
ccagcgctggtacggcccgcgtatttgatatgtcgaccaggcgctcgccacgcgctcggttcctccggcgcttcctccaccccgggatacacagaacctcatctcctacggtgctgaagcctgcagcagggcaggatgggcaggagagcagagccgcggagtctgcggcgcgggtgaagagcggcgcgtaattcccgcagcaagattgttccgcgcccgcagcccctggactagcaggatccgaaccccggcggctgcgtgcttataggcgcagacgtcagagagcccgcggcttaaagcgcgtcgcctggctagcgccaccccctagccttcttcaaggcctccagggctgggcccaagcgcccgtcgacggcaccctgggcccagaggactcgcgggcctcatctccaatgattcagaactcacgtccgtcgctgctgcaaccccaagatgtcggagacacggtggaaacgcttatgttacatccggtgatcaaggctttcctgtgtggctccatcagtgggacctgctctaccctccttttccaacctctggatctccttaaaacacgcctacaaaccctccagccctcagatcatgggtctagacgtgttgggatgttggctgtactcttgaaggtggttcgcacggagagtcttttgggcctttggaaagggatgtccccttccattgtgagatgtgtccctggcgttggaatctactttggcactctctactctttgaagcagtatttcttgcgaggccatcccccaaccgccctggagtcagtcatgctgggggtgggctctcgctctgttgcaggggtctgtatgtcacctatcactgtaatcaagacgcgctatgagagtgggaaatatggctatgagagtatctacgctgccctgaggagcatctatcacagtgaggggcaccggggcctcttcagtggcctgacagcaactctccttcgagatgcgcccttctcaggaatctacctgatgttttacaaccagaccaaaaatatagtgcctcatgaccaggtggatgcaacccttattcctattacaaatttcagctgtgggatatttgctggtattctggcctcactggtaactcaacctgcggatgttatcaaaactcatatgcagctttatccactgaagtttcaatggattggccaagcagtgacacttattttcaaagactatggactacgtggcttcttccaaggtggcatcccccgagccctccgcagaactctaatggcagcaatggcgtggacggtgtatgaagagatgatggccaagatgggcctgaagtcctgaccaagagaggactgggaacgggtgaaatctgttgccctgcttggtttctgccaagggctgctgcttcttactattctgcagtaagatgaagtcctacctggaaaaccaggcagaaattgtgttgcctttgccttcagtaatccccttaaggagaaaatatatggacctgatttcagccttcagaatctccaaaagaggagtcatcaattcatagagcacactagggtgttaggagagagctttgcatactctgagaggctacttggaaaggcattttcccaggagagctctgtcaggtggctgcgcttcagccccacccctacaccacagggtctccttgggtatgttcttgggcaagcaatcacaaagccagagaagctgtaagctgcctgccgggcctgaggagctccaaccagggaagactggatgtgaggagaggagtcactgtcaccaggtcacagactgactgaggtgatggtaggatgaggaggaacagatgcccttctttaattggttctcagttaacttctcagaggctctggagaacgggacagtggctttctagcctctgaatgttccaaataaaattttttggtcttggcccctgtactgttttacctctaaattctggcatttttttttccctgcaattaaagtgctgtactttatttattgaactttatcattgaaag

SEQ ID NO: 53734 - DNA, 2604 bp, Homo sapiens
aaagtttaaatgttttactagccacatttaaaaagaaacacatgaagttattattatttgttttagagacggggtcttgctttgtcgtccacgctggtctccaactccttggctccctcaagcaatcctccagactaggcctcacaaagtgctgagattacaggcctgggccactgcccccggcctgaagttaattttaatatttcacctaacccaatatatccaaaatatcatttcaacatataaaaattattgagattttacctcaccagtcttagacatccagcgtgtggtttatgcatacagtacatatcaattccacactaaattttcagcatttaaagggaaatatggtcctgaaaaaaaaacaacaaaacaaaaaaacgcctgtttaaggagaaagcattccacactgcttgttttaatataattaaaattaatgtatcaattaataaatcaatagcccacgttggctagtggctgccttactgggcagaccaggtctggattgtaaatacgttcagacgttccacgcaaaagcaaagttccctgcagacgctccattaagttctgggtgcaaggaagcgcggatccttcagttctgggcgttttcaccaggtggcactcagaacaccctcacgtgacaagcgtcccacccggaagcgaaatctccccttctacagagttcctccggcgcttcctccaccccgggatacacagaacctcatctcctacggtgctgaagcctgcagcagggcaggatgggcaggagagcagagccgcggagtctgcggcgcgggtgaagagcggcgcgtaattcccgcagcaagattgttccgcgcccgcagcccctggactagcaggatccgaaccccggcggctgcgtgcttataggcgcagacgtcagagagcccgcggcttaaagcgcgtcgcctggctagcgccaccccctagccttcttcaaggcctccagggctgggcccaagcgcccgtcgacggcaccctgggcccagaggactcgcgggcctcatctccaatgattcagaactcacgtccgtcgctgctgcaaccccaagatgtcggagacacggtggaaacgcttatgttacatccggtgatcaaggctttcctgtgtggctccatcagtgggacctgctctaccctccttttccaacctctggatctccttaaaacacgcctacaaaccctccagccctcagatcatgggtctagacgtgttgggatgttggctgtactcttgaaggtggttcgcacggagagtcttttgggcctttggaaagggatgtccccttccattgtgagatgtgtccctggcgttggaatctactttggcactctctactctttgaagcagtatttcttgcgaggccatcccccaaccgccctggagtcagtcatgctgggggtgggctctcgctctgttgcaggggtctgtatgtcacctatcactgtaatcaagacgcgctatgagagtgggaaatatggctatgagagtatctacgctgccctgaggagcatctatcacagtgaggggcaccggggcctcttcagtggcctgacagcaactctccttcgagatgcgcccttctcaggaatctacctgatgttttacaaccagaccaaaaatatagtgcctcatgaccaggtggatgcaacccttattcctattacaaatttcagctgtgggatatttgctggtattctggcctcactggtaactcaacctgcggatgttatcaaaactcatatgcagctttatccactgaagtttcaatggattggccaagcagtgacacttattttcaaagactatggactacgtggcttcttccaaggtggcatcccccgagccctccgcagaactctaatggcagcaatggcgtggacggtgtatgaagagatgatggccaagatgggcctgaagtcctgaccaagagaggactgggaacgggtgaaatctgttgccctgcttggtttctgccaagggctgctgcttcttactattctgcagtaagatgaagtcctacctggaaaaccaggcagaaattgtgttgcctttgccttcagtaatccccttaaggagaaaatatatggacctgatttcagccttcagaatctccaaaagaggagtcatcaattcatagagcacactagggtgttaggagagagctttgcatactctgagaggctacttggaaaggcattttcccaggagagctctgtcaggtggctgcgcttcagccccacccctacaccacagggtctccttgggtatgttcttgggcaagcaatcacaaagccagagaagctgtaagctgcctgccgggcctgaggagctccaaccagggaagactggatgtgaggagaggagtcactgtcaccaggtcacagactgactgaggtgatggtaggatgaggaggaacagatgcccttctttaattggttctcagttaacttctcagaggctctggagaacgggacagtggctttctagcctctgaatgttccaaataaaattttttggtcttggcccaaaaaaaaaaacgaaaacgaaagcgggcgctcgttgtcgacgcggccgg

SEQ ID NO: 53735 - DNA, 2605 bp, Homo sapiens
aaagtttaaatgttttactagccacatttaaaaagaaacacatgaagttattattatttgttttagagacggggtcttgctttgtcgtccacgctggtctccaactccttggctccctcaagcaatcctccagactaggcctcacaaagtgctgagattacaggcctgggccactgcccccggcctgaagttaattttaatatttcacctaacccaatatatccaaaatatcatttcaacatataaaaattattgagattttacctcaccagtcttagacatccagcgtgtggtttatgcatacagtacatatcaattccacactaaattttcagcatttaaagggaaatatggtcctgaaaaaaaaacaacaaaacaaaaaaacgcctgtttaaggagaaagcattccacactgcttgttttaatataattaaaattaatgtatcaattaataaatcaatagcccacgttggctagtggctgccttactgggcagaccaggtctggattgtaaatacgttcagacgttccacgcaaaagcaaagttccctgcagacgctccattaagttctgggtgcaaggaagcgcggatccttcagttctgggcgttttcaccaggtggcactcagaacaccctcacgtgacaagcgtcccacccggaagcgaaatctccccttctacagagttcctccggcgcttcctccaccccgggatacacagaacctcatctcctacggtgctgaagcctgcagcagggcaggatgggcaggagagcagagccgcggagtctgcggcgcgggtgaagagcggcgcgtaattcccgcagcaagattgttccgcgcccgcagcccctggactagcaggatccgaaccccggcggctgcgtgcttataggcgcagacgtcagagagcccgcggcttaaagcgcgtcgcctggctagcgccaccccctagccttcttcaaggcctccagggctgggcccaagcgcccgtcgacggcaccctgggcccagaggactcgcgggcctcatctccaatgattcagaactcacgtccgtcgctgctgcaaccccaagatgtcggagacacggtggaaacgcttatgttacatccggtgatcaaggctttcctgtgtggctccatcagtgggacctgctctaccctccttttccaacctctggatctccttgtctagacgtgttgggatgttggctgtactcttgaaggtggttcgcacggagagtcttttgggcctttggaaagggatgtccccttccattgtgagatgtgtccctggcgttggaatctactttggcactctctactctttgaagcagtatttcttgcgaggccatcccccaaccgccctggagtcagtcatgctgggggtgggctctcgctctgttgcaggggtctgtatgtcacctatcactgtaatcaagacgcgctatgagagtgggaaatatggctatgagagtatctacgctgccctgaggagcatctatcacagtgaggggcaccggggcctcttcagtggcctgacagcaactctccttcgagatgcgcccttctcaggaatctacctgatgttttacaaccagaccaaaaatatagtgcctcatgaccaggtggatgcaacccttattcctattacaaatttcagctgtgggatatttgctggtattctggcctcactggtaactcaacctgcggatgttatcaaaactcatatgcagctttatccactgaagtttcaatggattggccaagcagtgacacttattttcaaagactatggactacgtggcttcttccaaggtggcatcccccgagccctccgcagaactctaatggcagcaatggcgtggacggtgtatgaagagatgatggccaagatgggcctgaagtcctgaccaagagaggactgggaacgggtgaaatctgttgccctgcttggtttctgccaagggctgctgcttcttactattctgcagtaagatgaagtcctacctggaaaaccaggcagaaattgtgttgcctttgccttcagtaatccccttaaggagaaaatatatggacctgatttcagccttcagaatctccaaaagaggagtcatcaattcatagagcacactagggtgttaggagagagctttgcatactctgagaggctacttggaaaggcattttcccaggagagctctgtcaggtggctgcgcttcagccccacccctacaccacagggtctccttgggtatgttcttgggcaagcaatcacaaagccagagaagctgtaagctgcctgccgggcctgaggagctccaaccagggaagactggatgtgaggagaggagtcactgtcaccaggtcacagactgactgaggtgatggtaggatgaggaggaacagatgcccttctttaattggttctcagttaacttctcagaggctctggagaacgggacagtggctttctagcctctgaatgttccaaataaaattttttggtcttggcccctgtactgttttacctctaaattctggcatttttttttccctgcaattaaagtgctgtactttatttattgaactttatcattgaaag

SEQ ID NO: 53736 - DNA, 2493 bp, Homo sapiens
aaagtttaaatgttttactagccacatttaaaaagaaacacatgaagttattattatttgttttagagacggggtcttgctttgtcgtccacgctggtctccaactccttggctccctcaagcaatcctccagactaggcctcacaaagtgctgagattacaggcctgggccactgcccccggcctgaagttaattttaatatttcacctaacccaatatatccaaaatatcatttcaacatataaaaattattgagattttacctcaccagtcttagacatccagcgtgtggtttatgcatacagtacatatcaattccacactaaattttcagcatttaaagggaaatatggtcctgaaaaaaaaacaacaaaacaaaaaaacgcctgtttaaggagaaagcattccacactgcttgttttaatataattaaaattaatgtatcaattaataaatcaatagcccacgttggctagtggctgccttactgggcagaccaggtctggattgtaaatacgttcagacgttccacgcaaaagcaaagttccctgcagacgctccattaagttctgggtgcaaggaagcgcggatccttcagttctgggcgttttcaccaggtggcactcagaacaccctcacgtgacaagcgtcccacccggaagcgaaatctccccttctacagagttcctccggcgcttcctccaccccgggatacacagaacctcatctcctacggtgctgaagcctgcagcagggcaggatgggcaggagagcagagccgcggagtctgcggcgcgggtgaagagcggcgcgtaattcccgcagcaagattgttccgcgcccgcagcccctggactagcaggatccgaaccccggcggctgcgtgcttataggcgcagacgtcagagagcccgcggcttaaagcgcgtcgcctggctagcgccaccccctagccttcttcaaggcctccagggctgggcccaagcgcccgtcgacggcaccctgggcccagaggactcgcgggcctcatctccaatgattcagaactcacgtccgtcgctgctgcaaccccaagatgtcggagacacggtggaaacgcttatgttacatccggtgatcaaggctttcctgtgtggctccatcagtgggacctgctctaccctccttttccaacctctggatctccttaaaacacgcctacaaaccctccagccctcagatcatgggtctagacgtgttgggatgttggctgtactcttgaaggtggttcgcacggagagtcttttgggcctttggaaagggatgtccccttccattgtgagatgtgtccctggcgttggaatctactttggcactctctactctttgaagcagtatttcttgcgaggccatcccccaaccgccctggagtcagtcatgctgggggtgggctctcgctctgttgcaggggtctgtatgtcacctatcactgtaatcaagacgcgctatgagagtgggaaatatggctatgagagtatctacgctgccctgaggagcatctatcacagtgaggggcaccggggcctcttcagtggcctgacagcaactctccttcgagatgcgcccttctcaggaatctacctgatgttttacaaccagaccaaaaatatagtgcctcatgaccaggtggatgcaacccttattcctattacaaatttcagctgtgggatatttgctggtattctggcctcactggtaactcaacctgcggatgttatcaaaactcatatgcagctttatccactgaagtttcaatggattggccaagcagtgacacttattttcaaagactatggactacgtggcttcttccaaggtggcatcccccgagccctccgcagaactctaatggcagcaatggcgtggacggtgtatgaagagatgatggccaagatgggcctgaagtcctgaccaagagaggactgggaacgggtgaaatctgttgccctgcttggtttctgccaagggctgctgcttcttactattctgcagtaagatgaagtcctacctggaaaaccaggcagaaattgtgttgcctttgccttcagtaatccccttaaggagaaaatatatggacctgatttcagccttcagaatctccaaaagaggagtcatcaattcatagagcacactagggtgttaggagagagctttgcatactctgagaggctacttggaaaggcattttcccaggagaaggagtcactgtcaccaggtcacagactgactgaggtgatggtaggatgaggaggaacagatgcccttctttaattggttctcagttaacttctcagaggctctggagaacgggacagtggctttctagcctctgaatgttccaaataaaattttttggtcttggcccctgtactgttttacctctaaattctggcatttttttttccctgcaattaaagtgctgtactttatttattgaactttatcattgaaag

SEQ ID NO: 53737 - DNA, 1626 bp, Homo sapiens
gagaaaccagaaactgtgaggagaggcactcagctatatggcatgtaccagagaggccaagtatgaagaaaacatgaggcaccaccagttacatccggtgatcaaggctttcctgtgtggctccatcagtgggacctgctctaccctccttttccaacctctggatctccttaaaacacgcctacaaaccctccagccctcagatcatgggtctagacgtgttgggatgttggctgtactcttgaaggtggttcgcacggagagtcttttgggcctttggaaagggatgtccccttccattgtgagatgtgtccctggcgttggaatctactttggcactctctactctttgaagcagtatttcttgcgaggccatcccccaaccgccctggagtcagtcatgctgggggtgggctctcgctctgttgcaggggtctgtatgtcacctatcactgtaatcaagacgcgctatgagagtgggaaatatggctatgagagtatctacgctgccctgaggagcatctatcacagtgaggggcaccggggcctcttcagtggcctgacagcaactctccttcgagatgcgcccttctcaggaatctacctgatgttttacaaccagaccaaaaatatagtgcctcatgaccaggtggatgcaacccttattcctattacaaatttcagctgtgggatatttgctggtattctggcctcactggtaactcaacctgcggatgttatcaaaactcatatgcagctttatccactgaagtttcaatggattggccaagcagtgacacttattttcaaagactatggactacgtggcttcttccaaggtggcatcccccgagccctccgcagaactctaatggcagcaatggcgtggacggtgtatgaagagatgatggccaagatgggcctgaagtcctgaccaagagaggactgggaacgggtgaaatctgttgccctgcttggtttctgccaagggctgctgcttcttactattctgcagtaagatgaagtcctacctggaaaaccaggcagaaattgtgttgcctttgccttcagtaatccccttaaggagaaaatatatggacctgatttcagccttcagaatctccaaaagaggagtcatcaattcatagagcacactagggtgttaggagagagctttgcatactctgagaggctacttggaaaggcattttcccaggagagctctgtcaggtggctgcgcttcagccccacccctacaccacagggtctccttgggtatgttcttgggcaagcaatcacaaagccagagaagctgtaagctgcctgccgggcctgaggagctccaaccagggaagactggatgtgaggagaggagtcactgtcaccaggtcacagactgactgaggtgatggtaggatgaggaggaacagatgcccttctttaattggttctcagttaacttctcagaggctctggagaacgggacagtggctttctagcctctgaatgttccaaataaaattttttggtcttggcccctgtactgttttacctctaaattctggcatttttttttccctgcaattaaagtgctgtactttatttattgaactttatcattgaaag

SEQ ID NO: 53738 - DNA, 1668 bp, Homo sapiens
ttatgaggaattccagttataactggcttctttggtggaatttgagatacactctcttctctgttaagcaaatactgcagattacaaatatttcagttccaggtatgaagaaaacatgaggcaccaccagttacatccggtgatcaaggctttcctgtgtggctccatcagtgggacctgctctaccctccttttccaacctctggatctccttaaaacacgcctacaaaccctccagccctcagatcatgggtctagacgtgttgggatgttggctgtactcttgaaggtggttcgcacggagagtcttttgggcctttggaaagggatgtccccttccattgtgagatgtgtccctggcgttggaatctactttggcactctctactctttgaagcagtatttcttgcgaggccatcccccaaccgccctggagtcagtcatgctgggggtgggctctcgctctgttgcaggggtctgtatgtcacctatcactgtaatcaagacgcgctatgagagtgggaaatatggctatgagagtatctacgctgccctgaggagcatctatcacagtgaggggcaccggggcctcttcagtggcctgacagcaactctccttcgagatgcgcccttctcaggaatctacctgatgttttacaaccagaccaaaaatatagtgcctcatgaccaggtggatgcaacccttattcctattacaaatttcagctgtgggatatttgctggtattctggcctcactggtaactcaacctgcggatgttatcaaaactcatatgcagctttatccactgaagtttcaatggattggccaagcagtgacacttattttcaaagactatggactacgtggcttcttccaaggtggcatcccccgagccctccgcagaactctaatggcagcaatggcgtggacggtgtatgaagagatgatggccaagatgggcctgaagtcctgaccaagagaggactgggaacgggtgaaatctgttgccctgcttggtttctgccaagggctgctgcttcttactattctgcagtaagatgaagtcctacctggaaaaccaggcagaaattgtgttgcctttgccttcagtaatccccttaaggagaaaatatatggacctgatttcagccttcagaatctccaaaagaggagtcatcaattcatagagcacactagggtgttaggagagagctttgcatactctgagaggctacttggaaaggcattttcccaggagagctctgtcaggtggctgcgcttcagccccacccctacaccacagggtctccttgggtatgttcttgggcaagcaatcacaaagccagagaagctgtaagctgcctgccgggcctgaggagctccaaccagggaagactggatgtgaggagaggagtcactgtcaccaggtcacagactgactgaggtgatggtaggatgaggaggaacagatgcccttctttaattggttctcagttaacttctcagaggctctggagaacgggacagtggctttctagcctctgaatgttccaaataaaattttttggtcttggcccctgtactgttttacctctaaattctggcatttttttttccctgcaattaaagtgctgtactttatttattgaactttatcattgaaag

SEQ ID NO: 53739 - DNA, 2463 bp, Homo sapiens
aaagtttaaatgttttactagccacatttaaaaagaaacacatgaagttattattatttgttttagagacggggtcttgctttgtcgtccacgctggtctccaactccttggctccctcaagcaatcctccagactaggcctcacaaagtgctgagattacaggcctgggccactgcccccggcctgaagttaattttaatatttcacctaacccaatatatccaaaatatcatttcaacatataaaaattattgagattttacctcaccagtcttagacatccagcgtgtggtttatgcatacagtacatatcaattccacactaaattttcagcatttaaagggaaatatggtcctgaaaaaaaaacaacaaaacaaaaaaacgcctgtttaaggagaaagcattccacactgcttgttttaatataattaaaattaatgtatcaattaataaatcaatagcccacgttggctagtggctgccttactgggcagaccaggtctggattgtaaatacgttcagacgttccacgcaaaagcaaagttccctgcagacgctccattaagttctgggtgcaaggaagcgcggatccttcagttctgggcgttttcaccaggtggcactcagaacaccctcacgtgacaagcgtcccacccggaagcgaaatctccccttctacagagttcctccggcgcttcctccaccccgggatacacagaacctcatctcctacggtgctgaagcctgcagcagggcaggatgggcaggagagcagagccgcggagtctgcggcgcgggtgaagagcggcgcgtaattcccgcagcaagattgttccgcgcccgcagcccctggactagcaggatccgaaccccggcggctgcgtgcttataggcgcagacgtcagagagcccgcggcttaaagcgcgtcgcctggctagcgccaccccctagccttcttcaaggcctccagggctgggcccaagcgcccgtcgacggcaccctgggcccagaggactcgcgggcctcatctccaatgattcagaactcacgtccgtcgctgctgcaaccccaagatgtcggagacacggtggaaacgcttatgttacatccggtgatcaaggctttcctgtgtggctccatcagtgggacctgctctaccctccttttccaacctctggatctccttaaaacacgcctacaaaccctccagccctcagatcatgggtctagacgtgttgggatgttggctgtactcttgaaggtggttcgcacggagagtcttttgggcctttggaaagggatgtcccctagtgggaaatatggctatgagagtatctacgctgccctgaggagcatctatcacagtgaggggcaccggggcctcttcagtggcctgacagcaactctccttcgagatgcgcccttctcaggaatctacctgatgttttacaaccagaccaaaaatatagtgcctcatgaccaggtggatgcaacccttattcctattacaaatttcagctgtgggatatttgctggtattctggcctcactggtaactcaacctgcggatgttatcaaaactcatatgcagctttatccactgaagtttcaatggattggccaagcagtgacacttattttcaaagactatggactacgtggcttcttccaaggtggcatcccccgagccctccgcagaactctaatggcagcaatggcgtggacggtgtatgaagagatgatggccaagatgggcctgaagtcctgaccaagagaggactgggaacgggtgaaatctgttgccctgcttggtttctgccaagggctgctgcttcttactattctgcagtaagatgaagtcctacctggaaaaccaggcagaaattgtgttgcctttgccttcagtaatccccttaaggagaaaatatatggacctgatttcagccttcagaatctccaaaagaggagtcatcaattcatagagcacactagggtgttaggagagagctttgcatactctgagaggctacttggaaaggcattttcccaggagagctctgtcaggtggctgcgcttcagccccacccctacaccacagggtctccttgggtatgttcttgggcaagcaatcacaaagccagagaagctgtaagctgcctgccgggcctgaggagctccaaccagggaagactggatgtgaggagaggagtcactgtcaccaggtcacagactgactgaggtgatggtaggatgaggaggaacagatgcccttctttaattggttctcagttaacttctcagaggctctggagaacgggacagtggctttctagcctctgaatgttccaaataaaattttttggtcttggcccctgtactgttttacctctaaattctggcatttttttttccctgcaattaaagtgctgtactttatttattgaactttatcattgaaag

SEQ ID NO: 53740 - DNA, 1584 bp, Homo sapiens
aaagtttaaatgttttactagccacatttaaaaagaaacacatgaagttattattatttgttttagagacggggtcttgctttgtcgtccacgctggtctccaactccttggctccctcaagcaatcctccagactaggcctcacaaagtgctgagattacaggcctgggccactgcccccggcctgaagttaattttaatatttcacctaacccaatatatccaaaatatcatttcaacatataaaaattattgagattttacctcaccagtcttagacatccagcgtgtggtttatgcatacagtacatatcaattccacactaaattttcagcatttaaagggaaatatggtcctgaaaaaaaaacaacaaaacaaaaaaacgcctgtttaaggagaaagcattccacactgcttgttttaatataattaaaattaatgtatcaattaataaatcaatagcccacgttggctagtggctgccttactgggcagaccaggtctggattgtaaatacgttcagacgttccacgcaaaagcaaagttccctgcagacgctccattaagttctgggtgcaaggaagcgcggatccttcagttctgggcgttttcaccaggtggcactcagaacaccctcacgtgacaagcgtcccacccggaagcgaaatctccccttctacagagttcctccggcgcttcctccaccccgggatacacagaacctcatctcctacggtgctgaagcctgcagcagggcaggatgggcaggagagcagagccgcggagtctgcggcgcgggtgaagagcggcgcgtaattcccgcagcaagattgttccgcgcccgcagcccctggactagcaggatccgaaccccggcggctgcgtgcttataggcgcagacgtcagagagcccgcggcttaaagcgcgtcgcctggctagcgccaccccctagccttcttcaaggcctccagggctgggcccaagcgcccgtcgacggcaccctgggcccagaggactcgcgggcctcatctccaatgattcagaactcacgtccgtcgctgctgcaaccccaagatgtcggagacacggtggaaacgcttatggtgagggcactgcggggaaggaagggcaggggtccgaaccgcgggctcgggccggagaattcggggcgttgctaaggctcggctacccttttccgcgccccagggtgcgctcaggatttaggatgcggcgggagaggagtctgactaagggaattgagaagggggcagggagtgaggagaggccaggagctgcaggccagccctgggggcaggcgctgtagggccgatgtcccggtaaagggcggaattgccggggcctggactggacgcgtgccggggagtgtgcccgcgcggcccccacaaggtgcgagtaggctgccaggtggaagggcacccgggcagatttgggacggtcacaaggcctgataatagcgctgacgctgagaagccgttgatgccgcagcgagctggccgggtagcgctgtgcgcccgcgggcggcggcctacctggaggggccagtcgtggcggcacccttcca

SEQ ID NO: 53741 - DNA, 468 bp, Homo sapiens
ttttaaaatcagtcaatgattcttgcctgagtcagttattgtgatggtggtttgaaaaaggtgcttttctaactctatcattccatccacataaatttactagttgcacctttaagttttgaattcgtagcctcatttgaatccagacctttcttggtttggggaagaattggtgggcaacttgcactgacctttatctgattaatataagatctatgtccacatgttacctttgttctatttcagaccaggtggatgcaacccttattcctattacaaatttcagctgtgggatatttgctggtattctggcctcactggtaactcaacctgcggatgttatcaaaactcatatgcagctttatccactgaagtttcaatggattggccaagcagtgacacttattttcaaagtaagactacaaaataagtactggttcttgtggtgtttaagggatctctgttcta

SEQ ID NO: 53742 - DNA, 2643 bp, Homo sapiens
aaagtttaaatgttttactagccacatttaaaaagaaacacatgaagttattattatttgttttagagacggggtcttgctttgtcgtccacgctggtctccaactccttggctccctcaagcaatcctccagactaggcctcacaaagtgctgagattacaggcctgggccactgcccccggcctgaagttaattttaatatttcacctaacccaatatatccaaaatatcatttcaacatataaaaattattgagattttacctcaccagtcttagacatccagcgtgtggtttatgcatacagtacatatcaattccacactaaattttcagcatttaaagggaaatatggtcctgaaaaaaaaacaacaaaacaaaaaaacgcctgtttaaggagaaagcattccacactgcttgttttaatataattaaaattaatgtatcaattaataaatcaatagcccacgttggctagtggctgccttactgggcagaccaggtctggattgtaaatacgttcagacgttccacgcaaaagcaaagttccctgcagacgctccattaagttctgggtgcaaggaagcgcggatccttcagttctgggcgttttcaccaggtggcactcagaacaccctcacgtgacaagcgtcccacccggaagcgaaatctccccttctacagagttcctccggcgcttcctccaccccgggatacacagaacctcatctcctacggtgctgaagcctgcagcagggcaggatgggcaggagagcagagccgcggagtctgcggcgcgggtgaagagcggcgcgtaattcccgcagcaagattgttccgcgcccgcagcccctggactagcaggatccgaaccccggcggctgcgtgcttataggcgcagacgtcagagagcccgcggcttaaagcgcgtcgcctggctagcgccaccccctagccttcttcaaggcctccagggctgggcccaagcgcccgtcgacggcaccctgggcccagaggactcgcgggcctcatctccaatgattcagaactcacgtccgtcgctgctgcaaccccaagatgtcggagacacggtggaaacgcttatgttacatccggtgatcaaggctttcctgtgtggctccatcagtgggacctgctctaccctccttttccaacctctggatctccttaaaacacgcctacaaaccctccagccctcagatcatgggtctagacgtgttgggatgttggctgtactcttgaaggtggttcgcacggagagtcttttgggcctttggaaagggatgtccccttccattgtgagatgtgtccctggcgttggaatctactttggcactctctactctttgaagcagtatttcttgcgaggccatcccccaaccgccctggagtcagtcatgctgggggtgggctctcgctctgttgcaggggtctgtatgtcacctatcactgtaatcaagacgcgctatgagagtgggaaatatggctatgagagtatctacgctgccctgaggagcatctatcacagtgaggggcaccggggcctcttcagtggcctgacagcaactctccttcgagatgcgcccttctcaggaatctacctgatgttttacaaccagaccaaaaatatagtgcctcatgaccaggtggatgcaacccttattcctattacaaatttcagctgtgggatatttgctggtattctggcctcactggtaactcaacctgcggatgttatcaaaactcatatgcagctttatccactgaagtttcaatggattggccaagcagtgacacttattttcaaagactatggactacgtggcttcttccaaggtggcatcccccgagccctccgcagaactctaatggcagcaatggcgtggacggtgtatgaagagatgatggccaagatgggcctgaagtcctgaccaagagaggactgggaacgggtgaaatctgttgccctgcttggtttctgccaagggctgctgcttcttactattctgcagtaagatgaagtcctacctggaaaaccaggcagaaattgtgttgcctttgccttcagtaatccccttaaggagaaaatatatggacctgatttcagccttcagaatctccaaaagaggagtcatcaattcatagagcacactagggtgttaggagagagctttgcatactctgagaggctacttggaaaggcattttcccaggagagctctgtcaggtggctgcgcttcagccccacccctacaccacagggtctccttgggtatgttcttgggcaagcaatcacaaagccagagaagctgtaagctgcctgccgggcctgaggagctccaaccagggaagactggatgtgaggagaggagtcactgtcaccaggtcacagactgactgaggtgatggtaggatgaggaggaacagatgcccttctttaattggttctcagttaacttctcagaggctctggagaacgggacagtggctttctagcctctgaatgttccaaataaaattttttggtcttggcccctgtactgttttacctctaaattctggcatttttttttccctgcaattaaagtgctgtactttatttattgaactttatcattgaaag

SEQ ID NO: 53743 - DNA, 2820 bp, Homo sapiens
aaagtttaaatgttttactagccacatttaaaaagaaacacatgaagttattattatttgttttagagacggggtcttgctttgtcgtccacgctggtctccaactccttggctccctcaagcaatcctccagactaggcctcacaaagtgctgagattacaggcctgggccactgcccccggcctgaagttaattttaatatttcacctaacccaatatatccaaaatatcatttcaacatataaaaattattgagattttacctcaccagtcttagacatccagcgtgtggtttatgcatacagtacatatcaattccacactaaattttcagcatttaaagggaaatatggtcctgaaaaaaaaacaacaaaacaaaaaaacgcctgtttaaggagaaagcattccacactgcttgttttaatataattaaaattaatgtatcaattaataaatcaatagcccacgttggctagtggctgccttactgggcagaccaggtctggattgtaaatacgttcagacgttccacgcaaaagcaaagttccctgcagacgctccattaagttctgggtgcaaggaagcgcggatccttcagttctgggcgttttcaccaggtggcactcagaacaccctcacgtgacaagcgtcccacccggaagcgaaatctccccttctacagagttcctccggcgcttcctccaccccgggatacacagaacctcatctcctacggtgctgaagcctgcagcagggcaggatgggcaggagagcagagccgcggagtctgcggcgcgggtgaagagcggcgcgtaattcccgcagcaagattgttccgcgcccgcagcccctggactagcaggatccgaaccccggcggctgcgtgcttataggcgcagacgtcagagagcccgcggcttaaagcgcgtcgcctggctagcgccaccccctagccttcttcaaggcctccagggctgggcccaagcgcccgtcgacggcaccctgggcccagaggactcgcgggcctcatctccaatgattcagaactcacgtccgtcgctgctgcaaccccaagatgtcggagacacggtggaaacgcttatgttacatccggtgatcaaggctttcctgtgtggctccatcagtgggacctgctctaccctccttttccaacctctggatctccttaaaacacgcctacaaaccctccagccctcagatcatgggtctagacgtgttgggatgttggctgtactcttgaaggtggttcgcacggagagtcttttgggcctttggaaagggatgtccccttccattgtgagatgtgtccctggcgttggaatctactttggcactctctactctttgaagcagtatttcttgcgaggccatcccccaaccgccctggagtcagtcatgctgggggtgggctctcgctctgttgcaggggtctgtatgtcacctatcactgtaatcaagacgcgctatgagagtgggaaatatggctatgagagtatctacgctgccctgaggagcatctatcacagtgaggggcaccggggcctcttcagtggcctgacagcaactctccttcgagatgcgcccttctcaggaatctacctgatgttttacaaccagaccaaaaatatagtgcctcatgaccaggtggatgcaacccttattcctattacaaatttcagctgtgggatatttgctggtattctggcctcactggtaactcaacctgcggatgttatcaaaactcatatgcagctttatccactgaagtttcaatggattggccaagcagtgacacttattttcaaagactatggactacgtggcttcttccaaggtggcatcccccgagccctccgcagaactctaatggcagcaatggcgtggacggtgtatgaagagatgatggccaagatgggcctgaagtcctgaccaagagaggactgggaacgggtgaaatctgttgccctgcttggtttctgccaagggctgctgcttcttactattctgcagtaagatgaagtcctacctggaaaaccaggcagaaattgtgttgcctttgccttcagtaatccccttaaggagaaaatatatggacctgatttcagccttcagaatctccaaaagaggagtcatcaattcatagagcacactagggtgttaggagagagctttgcatactctgagaggctacttggaaaggcattttcccaggagagctctgtcaggtggctgcgcttcagccccacccctacaccacagggtctccttgggtatgttcttgggcaagcaatcacaaagccagagaagctgtaagctgcctgccgggcctgaggagctccaaccagggaagactggatgtgaggagaggagtcactgtcaccaggtcacagactgactgaggtgatggtaggatgaggaggaacagatgcccttctttaattggttctcagttaacttctcagaggctctggagaacgggacagtggctttctagcctctgaatgttccaaataaaattttttggtcttggcccctgtactgttttacctctaaattctggcatttttttttccctgcaattaaagtgctgtactttatttattgaactttatcattgaaagtgtggcaaccttaaaaaaaaaaagggggcgtctaaattacccagagggccagttacgccccgtttgaaaaggcccagagggatatagaaggcagggggtaaaacggaaggacacgtctggctttgggaggccaccgcgggggttgggcacacaagcagcggaaagtgtgaggacgca

SEQ ID NO: 53744 - DNA, 3156 bp, Homo sapiens
aaagtttaaatgttttactagccacatttaaaaagaaacacatgaagttattattatttgttttagagacggggtcttgctttgtcgtccacgctggtctccaactccttggctccctcaagcaatcctccagactaggcctcacaaagtgctgagattacaggcctgggccactgcccccggcctgaagttaattttaatatttcacctaacccaatatatccaaaatatcatttcaacatataaaaattattgagattttacctcaccagtcttagacatccagcgtgtggtttatgcatacagtacatatcaattccacactaaattttcagcatttaaagggaaatatggtcctgaaaaaaaaacaacaaaacaaaaaaacgcctgtttaaggagaaagcattccacactgcttgttttaatataattaaaattaatgtatcaattaataaatcaatagcccacgttggctagtggctgccttactgggcagaccaggtctggattgtaaatacgttcagacgttccacgcaaaagcaaagttccctgcagacgctccattaagttctgggtgcaaggaagcgcggatccttcagttctgggcgttttcaccaggtggcactcagaacaccctcacgtgacaagcgtcccacccggaagcgaaatctccccttctacagagttcctccggcgcttcctccaccccgggatacacagaacctcatctcctacggtgctgaagcctgcagcagggcaggatgggcaggagagcagagccgcggagtctgcggcgcgggtgaagagcggcgcgtaattcccgcagcaagattgttccgcgcccgcagcccctggactagcaggatccgaaccccggcggctgcgtgcttataggcgcagacgtcagagagcccgcggcttaaagcgcgtcgcctggctagcgccaccccctagccttcttcaaggcctccagggctgggcccaagcgcccgtcgacggcaccctgggcccagaggactcgcgggcctcatctccaatgattcagaactcacgtccgtcgctgctgcaaccccaagatgtcggagacacggtggaaacgcttatgttacatccggtgatcaaggctttcctgtgtggctccatcagtgggacctgctctaccctccttttccaacctctggatctccttaaaacacgcctacaaaccctccagccctcagatcatgggtctagacgtgttgggatgttggctgtactcttgaaggtggttcgcacggagagtcttttgggcctttggaaagggatgtccccttccattgtgagatgtgtccctggcgttggaatctactttggcactctctactctttgaagcagtatttcttgcgaggccatcccccaaccgccctggagtcagtcatgctgggggtgggctctcgctctgttgcaggggtctgtatgtcacctatcactgtaatcaagacgcgctatgagagtgggaaatatggctatgagagtatctacgctgccctgaggagcatctatcacagtgaggggcaccggggcctcttcagtggcctgacagcaactctccttcgagatgcgcccttctcaggaatctacctgatgttttacaaccagaccaaaaatatagtgcctcatgaccaggtggatgcaacccttattcctattacaaatttcagctgtgggatatttgctggtattctggcctcactggtaactcaacctgcggatgttatcaaaactcatatgcagctttatccactgaagtttcaatggattggccaagcagtgacacttattttcaaagactatggactacgtggcttcttccaaggtggcatcccccgagccctccgcagaactctaatggcagcaatggcgtggacggtgtatgaagagatgatggccaagatgggcctgaagtcctgaccaagagaggactgggaacgggtgaaatctgttgccctgcttggtttctgccaagggctgctgcttcttactattctgcagtaagatgaagtcctacctggaaaaccaggcagaaattgtgttgcctttgccttcagtaatccccttaaggagaaaatatatggacctgatttcagccttcagaatctccaaaagaggagtcatcaattcatagagcacactagggtgttaggagagagctttgcatactctgagaggctacttggaaaggcattttcccaggagagctctgtcaggtggctgcgcttcagccccacccctacaccacagggtctccttgggtatgttcttgggcaagcaatcacaaagccagagaagctgtaagctgcctgccgggcctgaggagctccaaccagggaagactggatgtgaggagaggagtcactgtcaccaggtcacagactgactgaggtgatggtaggatgaggaggaacagatgcccttctttaattggttctcagttaacttctcagaggctctggagaacgggacagtggctttctagcctctgaatgttccaaataaaattttttggtcttggcccaaaaaaaaaaaaaaaaaaaaaaaaaaaaaaaacaaaaaaaaaaaaacaaaaaaaaaaaaacaaaaaaaaaaaaaaaaacaacaacaaaaaaaaaaaagagagagcggagcggcgcgcaccaacaaaatctccccactctgagggaggcggccacactatctcgcacgcggacccaccgattctctgataggacaagggaggggcgcccatattagaagggaggagcggaaaataacgaacggaggaggagtcagcggcgcgtaagtgatacgcatagagagcaaagagtgggaggaaaaacgatgaggagagtagtggatacataatagagggaagacgagcacacccactggcgtgggagaggtgcagcaaacagtggtcgggcgccaccagcccagcgacagagcgaagacacgtggcaccggcgcacgcagggcgggaagaatacacgctcacgagcgaggcgggaacgatcgaacctgcgccctgcaaaccaacccgtggtgcgttcgcttcgtagagctgccagcataggaaacacagaccggttaaagacagaagagaggcgatgtgtgctgcgcacggtgttaaaccagccgag

SEQ ID NO: 53745 - DNA, 2595 bp, Homo sapiens
aaagtttaaatgttttactagccacatttaaaaagaaacacatgaagttattattatttgttttagagacggggtcttgctttgtcgtccacgctggtctccaactccttggctccctcaagcaatcctccagactaggcctcacaaagtgctgagattacaggcctgggccactgcccccggcctgaagttaattttaatatttcacctaacccaatatatccaaaatatcatttcaacatataaaaattattgagattttacctcaccagtcttagacatccagcgtgtggtttatgcatacagtacatatcaattccacactaaattttcagcatttaaagggaaatatggtcctgaaaaaaaaacaacaaaacaaaaaaacgcctgtttaaggagaaagcattccacactgcttgttttaatataattaaaattaatgtatcaattaataaatcaatagcccacgttggctagtggctgccttactgggcagaccaggtctggattgtaaatacgttcagacgttccacgcaaaagcaaagttccctgcagacgctccattaagttctgggtgcaaggaagcgcggatccttcagttctgggcgttttcaccaggtggcactcagaacaccctcacgtgacaagcgtcccacccggaagcgaaatctccccttctacagagttcctccggcgcttcctccaccccgggatacacagaacctcatctcctacggtgctgaagcctgcagcagggcaggatgggcaggagagcagagccgcggagtctgcggcgcgggtgaagagcggcgcgtaattcccgcagcaagattgttccgcgcccgcagcccctggactagcaggatccgaaccccggcggctgcgtgcttataggcgcagacgtcagagagcccgcggcttaaagcgcgtcgcctggctagcgccaccccctagccttcttcaaggcctccagggctgggcccaagcgcccgtcgacggcaccctgggcccagaggactcgcgggcctcatctccaatgattcagaactcacgtccgtcgctgctgcaaccccaagatgtcggagacacggtggaaacgcttatgttacatccggtgatcaaggctttcctgtgtggctccatcagtgggacctgctctaccctccttttccaacctctggatctccttaaaacacgcctacaaaccctccagccctcagatcatgggtctagacgtgttgggatgttggctgtactcttgaagtccattgtgagatgtgtccctggcgttggaatctactttggcactctctactctttgaagcagtatttcttgcgaggccatcccccaaccgccctggagtcagtcatgctgggggtgggctctcgctctgttgcaggggtctgtatgtcacctatcactgtaatcaagacgcgctatgagagtgggaaatatggctatgagagtatctacgctgccctgaggagcatctatcacagtgaggggcaccggggcctcttcagtggcctgacagcaactctccttcgagatgcgcccttctcaggaatctacctgatgttttacaaccagaccaaaaatatagtgcctcatgaccaggtggatgcaacccttattcctattacaaatttcagctgtgggatatttgctggtattctggcctcactggtaactcaacctgcggatgttatcaaaactcatatgcagctttatccactgaagtttcaatggattggccaagcagtgacacttattttcaaagactatggactacgtggcttcttccaaggtggcatcccccgagccctccgcagaactctaatggcagcaatggcgtggacggtgtatgaagagatgatggccaagatgggcctgaagtcctgaccaagagaggactgggaacgggtgaaatctgttgccctgcttggtttctgccaagggctgctgcttcttactattctgcagtaagatgaagtcctacctggaaaaccaggcagaaattgtgttgcctttgccttcagtaatccccttaaggagaaaatatatggacctgatttcagccttcagaatctccaaaagaggagtcatcaattcatagagcacactagggtgttaggagagagctttgcatactctgagaggctacttggaaaggcattttcccaggagagctctgtcaggtggctgcgcttcagccccacccctacaccacagggtctccttgggtatgttcttgggcaagcaatcacaaagccagagaagctgtaagctgcctgccgggcctgaggagctccaaccagggaagactggatgtgaggagaggagtcactgtcaccaggtcacagactgactgaggtgatggtaggatgaggaggaacagatgcccttctttaattggttctcagttaacttctcagaggctctggagaacgggacagtggctttctagcctctgaatgttccaaataaaattttttggtcttggcccctgtactgttttacctctaaattctggcatttttttttccctgcaattaaagtgctgtactttatttattgaactttatcattgaaag

SEQ ID NO: 53746 - DNA, 3873 bp, Homo sapiens
ctttggtttgcggagcggtcgggtgtattctccgccgcccccacgccctcgaggtccccgccaccgaaccagcggcggagcccgcccgcgcctcccgcggcattcccgcaccggatcgctcctcgctggggcgggacctggcctggcggctctggtcactatgagtgaaacatctttcaacctaatatcagaaaaatgtgacattctatccattcttcgggaccatcctgaaaacaggatttaccggaggaaaatcgaggaactcagcaaaaggttcaccgccatccgcaagaccaaaggggatgggaactgcttctacagggccttgggctattcctacctggagtccctgctggggaagagcagggagatcttcaagttcaaagaacgcgtactgcagaccccaaatgaccttctggctgctggctttgaggagcacaagttcagaaacttcttcaatgctttttacagtgtggtggaactggtagagaaggacggctcagtgtccagcctgctgaaggtgttcaacgaccagagtgcctcggaccacatcgtgcagttcctgcgcctgctcacgtcggccttcatcaggaaccgagcagacttcttccggcacttcattgatgaggagatggacatcaaagacttctgcactcacgaagtagagcccatggccacggagtgtgaccacatccagatcacggcgttgtcgcaggccctgagcattgccctgcaagtggagtacgtggacgagatggataccgccctgaaccaccacgtgttccctgaggccgccaccccttccgtttacctgctctataaaacatcccactacaacatcctttatgcagccgataaacattgattaattttaggccatgcagtggaacctgtcacctaatgggactgcattctgaatggaacattccggctcttcaattttttaagcaatttagactgtagcaagaaaatgtgcagccttttgggcaaagcccctgggaacgaggcctatccactatggactatggtaacttggtaggatttttagtatttattttaatggagggacaaatgctttctaactgggcccccgactccgcaccccagttcgcagtgaggccctgggtgggtcacctgccctctctggacttgtttcttcaactggaggaggtccctgcctatgctgacattccattgtagaaaaatggggcctctggtgtctctttaccaggggcagtgcctctctgcgggggaggaaaagctcaaggttagctgtcttaacccaagtgacttaccaggcctacaaaagagtccagtccagtcacttgttggactgggctctgacagatggcctattgaggtcaacttgaatgtgagggctgcggtgtggtttcaaacattcatgatggatgtattttcctacccctaacttaaggagaaaaaaaaaaagacttcctttttttgccaaagtccagaaaggggcctttagcctttagtaggagctcaaattgttggggcccctctacctctctcagggctagaactgcctgactcttggtggacgagcccttcagggttctgctttcagccccacctggacagaggcttacaagactagggtctggaccagaatctgtgtatttctgtctgggaccaggaagctgcagctgtcccatcatccccagcaaatcctagaagtggagtctggatacttcaaggatagaagtgttggcacgcacagccatggacccagctgagcagagcagacgctttgcaggctgcccctggcttcttcctccctttcccgcttctgctctctttatggactggtcagagggtaggtgggaaagaacagacaagccatggaagttggcagtggggagatttccactgtggaaaccgcctgggaattccggccagcagcttcctccttcagccacctggccataccccttaaataagcccctcaccttgctgcctcaggaccttcaagattccatctgtgggctggccggcaagatggcaccagtggggacccacaccctggctgggcagaggtgctgctagcaacctctcttcctctataagaggaaatggaaaatgcagggtgtggaattgccctttggggtccttccttaattgaaggccaccttctcacaggtttcattctgcagggatttactggaatctattggtgctgctgcatgagtctgctgacaacctgactgcacaaggactgggtagcagactcctcagagtcctcttgacacaaatgtcagatttgtgtcactcttctgccttcgtgaaaagccaatagcactctcagatatcaggggattttagttccaagcagggaccctggtttccatactgccctcagctggagtttggatccaaaggctctggctaagtcattatgtcactttttcacaggaatgtaaatttgactgtcacctctgaatttgttcagtgtcccaccatggtctatgagaagtacactggaagcgtggggggaacacatgacatgatttgtgaatatcatcatctttgccagacaagtctccaggggatccctgtttcccaactgaaaggtgtgaacggacacacacacagcctggatgacgccttggctgttctaaggggctgtaaggtgggctctgggccttccagctaggctctcaagcacagcagaagcctcactgggctgctatgtctctgtatttgtggcttgtgtggtagcctcagaagcagagctgtttggcagactggctggagaaattccctctaggagacttgcctgtgctgtgcttccaggtcacagagccccccggaaactcacaggggccctcttcccagaaaagaatctattctatcacttcagaatcaggacactcaagctctggcagaggaaggccaagttactttcatggtcttaccctctgcttttcccctttttgcaaaaaaccactggccaaatccgaaccattgcccttgtttcccccacgttctctctcagatctttgtctcgaagggaaaacatagtggatgaaaaggtgtggcaggctttggcaccttgttaaaatttctagtcatctgtggatgttaccttgcttgtccacagcagccagtcaccctggccagtcccacttcctggataattctctaccctcaccccacagagccatctctctccagaccaaaagctggaaggagagttgctttgagagcttgtttttacaactgcatgtttattatgatactttctctccaaaggaaacttttaaatcaatgggaacaattagcaacagaaagagcacagtccctgcttttgactgggttcctattttaagcacaaatgagagctctggagccagaatgccagggttctaacttcagcattcacttactagctgtatgatcttggccaagtcacttcacctccctgagccccaattcccaagtttgtgaaatggcaacaatacctatgtgtcactggattattggttaaaacagaatgagattccttgtgtgaaaatagctattatacctgacacactcatcgtatgggctctgcaaagggatattccccaacctgtccttcccgacaggaagcatagggcactgcagatggggaagcatgtcaccttggcagtgactcggtggcttcccaagcaggagtgtcaggggaaccatgagagagagtctaggagccaaacacatcaccaccctgagcagatacaggagtggggagggggctgtaactcagtgagtggcttccaggggccccaggccctgctggatgtgggccaagccctacagcttccctaggcagtaagtaaaaacattctcctagcattaaaatggtttccataa

SEQ ID NO: 53747 - DNA, 896 bp, Homo sapiens
ggccgctcacctggtccttgtgggaggcagcccttcctccatacctcgttgctgccactaaacttgggagtgtccttgggccagggccaggcccaggcctgggtttcttgccataccccctgagggcaccaggacaggtcccagaaagggctgcgccatgagggggcctgcagtaggtgcagagagtaacaacccagcatgcgcagagcaagggcctgtggagtgggtccccaagggtaacttggtgctggcagatgcttaacagccggctgtgggcgtgcgggaggcctgatgtgtgttgtcagccgattgctgtggtgtcagtattcaatattatcatgactgagtcaagctgccctcatgaggtcactgagtagggagttggaaaagatgcaaaatcacacacgcccttgtcgtatcgtctttccaccatgcacacacacacaatgcagctcagccaccagggcccggcagggccagggtggagatgtgcacggtgcatgtggctgtgtgttgggggcaggggcgggaggttctgcggctggactagagatgaggttggtgggcgcagtgggttgagagggggacgcacagttgccaatcacagcactctcgctgtgtttccctgtaaacactcagtcttccccctctgtaggttcaaagaacgcgtactgcagaccccaaatgaccttctggctgctggctttgaggagcacaagttcagaaacttcttcaatgctgtgagttcacctggtccctccttccacactggcagagcagacaggagtgggcactggctggagcccctacacagcccacagctctgctcctcctggctggggaaggacagagggttccttcctgcttgtgggggtgtgtgggcacagggagccctc

SEQ ID NO: 53748 - DNA, 682 bp, Homo sapiens
ctttggtttgcggagcggtcgggtgtattctccgccgcccccacgccctcgaggtccccgccaccgaaccagcggcggagcccgcccgcgcctcccgcggcattcccgcaccggatcgctcctcgctggggcgggacctggcctggcggctctggtcactatgagtgaaacatctttcaacctaatatcagaaaaatgtgacattctatccattcttcgggaccatcctgaaaacaggatttaccggaggaaaatcgaggaactcagcaaaaggttcaccgccatccgcaagaccaaaggggatgggaactgcttctacagggccttgggctattcctacctggagtccctgctggggaagagcagggagatcttcaagtgagtgccggggccccttggcctgtcagggctgtgttctctgtgctaggtcagcctcaagtctctcggaggttttcgttacactcaggctggttaacccagagaatgagctgaagagctgcctggcagaggcgtttgatgttgggggtgcccagctgcctgctgtggtgaagttgggggcagccaaggggtggaggatggaatctgtgacctcccagatgctttccagcctctgcttccaccacaggcctgggtcagcccaggtgagtcgcagggagcaggtacttcgtgacccactctgaaa

SEQ ID NO: 53749 - DNA, 4093 bp, Homo sapiens
ctttggtttgcggagcggtcgggtgtattctccgccgcccccacgccctcgaggtccccgccaccgaaccagcggcggagcccgcccgcgcctcccgcggcattcccgcaccggatcgctcctcgctggggcgggacctggcctggcggctctggtcactatgagtgaaacatctttcaacctaatatcagaaaaatgtgacattctatccattcttcgggaccatcctgaaaacaggatttaccggaggaaaatcgaggaactcagcaaaaggttcaccgccatccgcaagaccaaaggggatgggaactgcttctacagggccttgggctattcctacctggagtccctgctggggaagagcagggagatcttcaagttcaaagaacgcgtactgcagaccccaaatgaccttctggctgctggctttgaggagcacaagttcagaaacttcttcaatgctttttacagtgtggtggaactggtagagaaggacggctcagtgtccagcctgctgaaggtgttcaacgaccagagtgcctcggaccacatcgtgcagttcctgcgcctgctcacgtcggccttcatcaggaaccgagcagacttcttccggcacttcattgatgaggagatggacatcaaagacttctgcactcacgaagtagagcccatggccacggagtgtgaccacatccagatcacggcgttgtcgcaggccctgagcattgccctgcaagtggagtacgtggacgagatggataccgccctgaaccaccacgtgttccctgaggccgccaccccttccgtttacctgctctataaaacatcccactacaacatcctttatgcagccgataaacattgattaattttaggccatgcagtggaacctgtcacctaatgggactgcattctgaatggaacattccggctcttcaattttttaagcaatttagactgtagcaagaaaatgtgcagccttttgggcaaagcccctgggaacgaggcctatccactatggactatggtaacttggtaggatttttagtatttattttaatggagggacaaatgctttctaactgggcccccgactccgcaccccagttcgcagtgaggccctgggtgggtcacctgccctctctggacttgtttcttcaactggaggaggtccctgcctatgctgacattccattgtagaaaaatggggcctctggtgtctctttaccaggggcagtgcctctctgcgggggaggaaaagctcaaggttagctgtcttaacccaagtgacttaccaggcctacaaaagagtccagtccagtcacttgttggactgggctctgacagatggcctattgaggtcaacttgaatgtgagggctgcggtgtggtttcaaacattcatgatggatgtattttcctacccctaacttaaggagaaaaaaaaaaagacttcctttttttgccaaagtccagaaaggggcctttagcctttagtaggagctcaaattgttggggcccctctacctctctcagggctagaactgcctgactcttggtggacgagcccttcagggttctgctttcagccccacctggacagaggcttacaagactagggtctggaccagaatctgtgtatttctgtctgggaccaggaagctgcagctgtcccatcatccccagcaaatcctagaagtggagtctggatacttcaaggatagaagtgttggcacgcacagccatggacccagctgagcagagcagacgctttgcaggctgcccctggcttcttcctccctttcccgcttctgctctctttatggactggtcagagggtaggtgggaaagaacagacaagccatggaagttggcagtggggagatttccactgtggaaaccgcctgggaattccggccagcagcttcctccttcagccacctggccataccccttaaataagcccctcaccttgctgcctcaggaccttcaagattccatctgtgggctggccggcaagatggcaccagtggggacccacaccctggctgggcagaggtgctgctagcaacctctcttcctctataagaggaaatggaaaatgcagggtgtggaattgccctttggggtccttccttaattgaaggccaccttctcacaggtttcattctgcagggatttactggaatctattggtgctgctgcatgagtctgctgacaacctgactgcacaaggactgggtagcagactcctcagagtcctcttgacacaaatgtcagatttgtgtcactcttctgccttcgtgaaaagccaatagcactctcagatatcaggggattttagttccaagcagggaccctggtttccatactgccctcagctggagtttggatccaaaggctctggctaagtcattatgtcactttttcacaggaatgtaaatttgactgtcacctctgaatttgttcagtgtcccaccatggtctatgagaagtacactggaagcgtggggggaacacatgacatgatttgtgaatatcatcatctttgccagacaagtctccaggggatccctgtttcccaactgaaaggtgtgaacggacacacacacagcctggatgacgccttggctgttctaaggggctgtaaggtgggctctgggccttccagctaggctctcaagcacagcagaagcctcactgggctgctatgtctctgtatttgtggcttgtgtggtagcctcagaagcagagctgtttggcagactggctggagaaattccctctaggagacttgcctgtgctgtgcttccaggtcacagagccccccggaaactcacaggggccctcttcccagaaaagaatctattctatcacttcagaatcaggacactcaagctctggcagaggaaggccaagttactttcatggtcttaccctctgcttttcccctttttgcaaaaaaccactggccaaatccgaaccattgcccttgtttcccccacgttctctctcagatctttgtctcgaagggaaaacatagtggatgaaaaggtgtggcaggctttggcaccttgttaaaatttctagtcatctgtggatgttaccttgcttgtccacagcagccagtcaccctggccagtcccacttcctggataattctctaccctcaccccacagagccatctctctccagaccaaaagctggaaggagagttgctttgagagcttgtttttacaactgcatgtttattatgatactttctctccaaaggaaacttttaaatcaatgggaacaattagcaacagaaagagcacagtccctgcttttgactgggttcctattttaagcacaaatgagagctctggagccagaatgccagggttctaacttcagcattcacttactagctgtatgatcttggccaagtcacttcacctccctgagccccaattcccaagtttgtgaaatggcaacaatacctatgtgtcactggattattggttaaaacagaatgagattccttgtgtgaaaatagctattatacctgacacactcatcgtatgggctctgcaaagggatattccccaacctgtccttcccgacaggaagcatagggcactgcagatggggaagcatgtcaccttggcagtgactcggtggcttcccaagcaggagtgtcaggggaaccatgagagagagtctaggagccaaacacatcaccaccctgagcagatacaggagtggggagggggctgtaactcagtgagtggcttccaggggccccaggccctgctggatgtgggccaagccctacagcttccctaggcagtaagtaaaaacattctcctagcattaaaatggtttccataactacttttgtcctggcttcttaatactgggtacctggcatgcagccaagaactctgcttttccgtggtgcttatgtattaagtagattagctggggagggatattccttgtttaatggcagatccaggacactccggaagctctgcccaccaacttcaccttaccaggcgagagtagcactgcttggaaggctgctcctgccttttaaagcctgtctacg

SEQ ID NO: 53750 - DNA, 352 bp, Homo sapiens
aaagtttcaagctaaatgcaaataaacaaaagaacttacagctataaatgacatcaaagattcatttaattagaaaataatagtactctcaccccaatcaagactattttggagactctgattttgtgctttcttgcttaccaggcaaagaaattggtgcaaaataattcagcttcaggaaagatctggcaagatggctgaataggaacagctccggtcgcagctcccagcgagaccaacacaggagggtgatttctgcatttccaactgaggtacccggttcatctcattaggactggtcaggcagtgggtacagcccacggagggtgagcagaagcaggttggggcatca

SEQ ID NO: 53751 - DNA, 365 bp, Homo sapiens
gtattttttaaagtttcataataaaaagacaaaagaatttctgtgacacattttgagtatcattttgtgtcttcagttaatactgaataaaaattaaaaaactaatatttatcattttgtggagcattatgggtattgccaattaaggcttaaaagtctggagtatagcaaatttacattaaccttataagcgatgttaatgagacatatacatatttttctcccaaaagattaagtttctttggaagaaaacatgtgcagtaagttttatatagtataacttaattcatgaggactttattttatttgtagatgtacaaaatgataaacttatctgcattattaatatgtccattaaaaaatta

SEQ ID NO: 53752 - DNA, 171 bp, Homo sapiens
attcttcagcttgccttgcagccagatgtggccatgtgactaagttctgatggatgtgagaagaaagatttgcaactttcaggtcttgcctttaaagtgaaaggcatcttctcttttccttcttccaaaggctaaaacagagacttgcaagcaatagctagagcaaccact

SEQ ID NO: 53753 - DNA, 874 bp, Homo sapiens
atcagcctggccaacatggtgaaaccccatctctaccaaaaaaaaaaaaaaaaacattacccgggcatggtgttatgtgcctgtagtcgcagctactcgggaggctaagtggggaagatcacttgagcccgaaacttctgcatttagtttgtatctttccaggcaaaacaaatgggtattcttttcatacaaccattttcaaatgaaccttagaaaagtcttaacatttaaggtattttatgcacagaatacacttagattgataggaaagaactcgtaatggagtttgagtaaagaaaatgactgatgtactaaacccagtaaaaattgttgaaaatgttaaaggtcagcatgttctaattgggaatctagatatagcttagatttcctattggcttagagtatttgctataacaaatgaagtgcaatgacaattatatattccctactcggtcatactggactggcttcgttctcttaacatactcagtaatgactcaagcctctggctattaacataccctagttgccattttttaattgccatgagccaaatacttcttggtatacaattgatccatttattttaatggctgccttttcattttcatcttttcttgctgctacccatctatgtatgtagtcattggggggaaaatgtagccacattttttatgggaagactttgtgttaaaagtgaacattttgaaggtttttaactggtgaaactagcctggaataatgccaccagagactgagtggaaatcgccccttttgaaggtgccattcttatgagccaaaagtttgtcatttaaaagttcattttgcgggaataacatgtaatataatttgaaataaaggtatagtaacctta

SEQ ID NO: 53754 - DNA, 102 bp, Homo sapiens
gggaagaatcccccatccatggcagcttccatgggtggcaagtccccagcatccaagggctgcctctgagtgtcacccacccccacctgagaccttagtggc

SEQ ID NO: 53755 - DNA, 437 bp, Homo sapiens
tggtatacttttgtctttttttctacttgttagttgtattagtatcaaatggcataataaagttactttgtttgccatttcccactcatctgaaaatcacaaaaagcatttatttctaagatttatatccactgaccttttccccaaagttattttcctgttacttgtatttcatctttgcccttatttctttaatatttgtattagaattagcttgctcttgtttccttcacggcaaatgtgttacattgcccactgggtggcttctgcggatgcccctacccacccctcgtctggagcagagaagtcctgttagcctagcagcatagtggctgctgtcagtgcgaggagttgtgcttctctagcatggtctgtgatgtcatctggacataattattagactaatcgaatagaggaacaagacagccctgcctgcg

SEQ ID NO: 53756 - DNA, 326 bp, Homo sapiens
ttgatagatgctatgggcgttattttctgcttataaaatcttagaacagttatgtctttacagataagatttgatttttatcaaacggtggaaaatgctgtgactggcacggtcttcacactctctcttggaaatctgcgatcctgggtcggtttaatttaaaacattccagtaataactttcagactttacaactcaattttattttgagaagtcatcatgaaggaaatatttaagaagtctcattcctttaagtttaaaaatgttccacaggattcatttgcaacagccagccactcaccccaaccccaaacttccagaaaaaa

SEQ ID NO: 53757 - DNA, 604 bp, Homo sapiens
ttaaggcatggacaagctgaatctaaaatgtttatgacaaataatctataacagccaaataactttgaaagaacaaagttgaaagatttaaatcatatgacttcaacatttattataaagttatagtaatcaagacatgtagtaatgccaactaagatagacaaatcagagagtccagaaatagaaccacacatctatgataaatggtcaactgatttttcataaagtgaaaatgcagctcaggagaaaaagaatagttttttaaacagtgctggaccactggatacccataaacaaaaccaaaaattttaaaaactcattttggctgagtgcaatgccttatgccctgtaatcccagcactctggggaggcagaggtgggaggactgcttgaggccaggagtttgagacctgcctggtcaacatagtgaaaccccatctctacaaaagaaaaaaattagtcaggcacggttgcatgtgcctgtagtcccagctacttgggagcctgaggccaaccatcacttaagcccagcagtttggggctgcagtgagctatgatcccatcactgcactccagcctgagccacacagcaagaccttgtttc

SEQ ID NO: 53758 - DNA, 1040 bp, Homo sapiens
agttccataataagcaaatacaactttgggacagtctgagacagcgttttctgaattttttctgaccacaacccataatgagcaatacatgttataatgtgatccagtatgtgaacacatgcacactcacccaaaaaagtctgacacaacaatatttaccctttttgcatccaattcactttacaatttttcattatttttctatcctattccatttacattttgaagaaagctggtgagtagtcagctaaaatggctccacaacctactctgcaaaggagttgcaatctgcacttggaaaaacactggtctatggacagggctctggtcagtgttctcaataacagtttggagactttaagcagtaacacgacagctttcaaaaacaaaacaagggctgggcgcaatggtacgttcctgtaatcccagctattcaggaggctgacgggagaattgcttgagccttggagctggagaccagctggggcaacatagtgaaaccttgtcttaagaggaaaaaaaaatacaaaatcaggtacacaaaatgaaattctcatccaaaataaaccattctatatccttccttgaaaaaccacaccaacgctggactttgtagcacaaagacttgtaaggaggtcggggctagactagatccagatatgcctaatattcaactaggccaaaagaactgccccctcgcccgccaatgaaatgaaatgcctccaaagtgatcctctggctatgtacatccgctagcatgcaggtgggtaatgaagagagtggagacaaccagccgatttcttcctggactttctgagtttcaaagtgctttcacttctattatttcatttaatgagatgctgtcagaaagttcatttccagaactggaaagtattaggtggtagagaaaagcatttcagggccgagcacggtggcttatgcctgtaatcccagcacttttgggaagctgaggcaggagcatcacttgagtccaggggttcgagaccagcctgggcaaaataaggagaccttgtctctac

SEQ ID NO: 53759 - DNA, 122 bp, Homo sapiens
ggtctgcagagcacacagggcccaggagcagacgccagagggacagtgacatcttaggctgatggagcaatcgatcctcttctccctttatttcctttgaccttccaaatggtcttcattag

SEQ ID NO: 53760 - DNA, 368 bp, Homo sapiens
caaaacaaaaactagccaggcatggtggtacatgcctgttgtcccagctactcaagaagctgaggtggaaggaccacttgagcctgggaggtcagggctgctgggagccgtgctcccaccactgtactctagcctgggcaagagaatgagaccttgtttaagaaaaaaaagaagccacagatcccttgctgcaaggcgtagcatttttagcagaactgccaggtagagaattcaattcaactaacacacactgagcacctattaatatttttatacaaagtcctgttcacctgtatgatactggtgtctattaacaaatttgatttgttgatttatctacaaacctagatttatccagaatgcaacca

SEQ ID NO: 53761 - DNA, 245 bp, Homo sapiens
atgctaacttgtatagctaatgcatcctccctttattctcttattctttgctttttccctttccacaaatatgtattagtcttttaccaaagatcagctactgtgcccagttctgggacagagataaagcaaggcttttccgctcaggagttaattgtccaggtataggaagtaagtcagatccattattaatcataatggggctggacagtgacgggtaccatggagcatcaagaggaagagag

SEQ ID NO: 53762 - DNA, 407 bp, Homo sapiens
gagtctcgctctgtcgcccaggctggagtgcggtggcgccatcttggctccctgcaagctccgccccccgggttcacgtcattctcctgcctcagcctcccgagtagctgggactacaggcgcccgccaccacgcccggctaattttttctattttttagtagagacggggtttcaccgtgttagccaagatggtctccatctcctgacctcgtgatccacccgcctcggcctcccaaagtgctgggattacaggcgtgagccaccgcgcccggccaccagtctttctggttttgaggctcactcctgccactgagtcccatctagattgcagaaatgcaaacagacacatacagcttcagcccttcaaacaaaagatgtacctcaactccacctaacggagccaga

SEQ ID NO: 53763 - DNA, 1042 bp, Homo sapiens
tatagcatcaagttctagaggaattgggagccattgcaaatctgagggtcaggaggaatctttcgtcccacagagctcagtgcaaccaccagaaggagacagtgaaacaaaagctcctgaagaatcatcagaggatgcgacaaaatatcaggaaggagtatctgcagaaaacccagttgagaaccatatcaatataacacaatcagataagttcacagccaagccattggattccaactcaggagaaagaaatgacctcaatcttgatcgctcttgtggggttccagaagaatctgcttcatctgaaaaagccaaggaaccagaaacttcagatcagactagcactgagagtgctaccaatgaaaataacaccaatcctgagcctcagttccaaacagaagccactgggccttcagctcatgaagaaacatccaccagggactctgctcttcaggacacagatgacagtgatgatgacccagtcctgatcccaggtgcaaggtatcgagcaggacctggtgatagatttaatatcagaggaacaacaataggtgatagaataatgagacgctctgctgttgcccgtattcaggagttcttcagacggagaaaagaaaggaaagaaatggaagaattggatactttgaacattagaaggccgctagtaaaaatggtttataaaggccatcgcaactccaggacaatgataaaagaagccaatttctggggtgctaactttgtaatgagtggttctgactgtggccacattttcatctgggatcggcacactgtgagcatttgatgcttctggaagctgataatcatgtggtaaactgctggagcacatccgttgtgagccaattttagcctcatctggcatagattatgacatagagatctggtcaccattagaagagtcaggatttttaaccgaaaattgctgacagagtataactcgaaagaatccatgctggagaaactagacaccccttcaggtccaggctctttactgttgacgatgttggttcacttatcaatatcg

SEQ ID NO: 53764 - DNA, 279 bp, Homo sapiens
ggaacaaggcctctgaagcggctaaatacccaaccgtctaccccccacacacaaaaaaggcggtatggttgggggaggaaaacggccagcaaaaggaaaaaacagagaaaagatttttaaattttcactgctaaagggattttatttacataacaacgccacctttttgccagccagaccaaaccgaaagagcaatggctgtatttctgaaagtagcattctgtccggccgaaatatggtaatgagatttaaaaagatttttttaaaggagctcaatgg

SEQ ID NO: 53765 - DNA, 1266 bp, Homo sapiens
  misc_feature (513)..(513): n is a, c, g, or t
  misc_feature (1251)..(1251): n is a, c, g, or t
atggatgtgctcagccctggtcagggcaacaacaccacatcaccaccggctccctttgagaccggcggcaacactactggtatctccgacgtgaccgtcagctaccaagtgatcacctctctgctgctgggcacgctcatcttctgcgcggtgctgggcaatgcgtgcgtggtggctgccatcgccttggagcgctccctgcagaacgtggccaattatcttattggctctttggcggtcaccgacctcatggtgtcggtgttggtgctgcccatggccgcgctgtatcaggtgctcaacaagtggacactgggccaggtaacctgcgacctgttcatcgccctcgacgtgctgtgctgcacctcatccatcttgcacctgtgcgccatcgcgctggacaggtactgggccatcacggaccccatcgactacgtgaacaagaggacgccccggccgcgtgcgctcatctcgctcacttggcttattggcttcctcatctctatcccgcccatnctgggctggcgcaccccggaagaccgctcggaccccgacgcatgcaccattagcaaggatcatggctacactatctattccacctttggagctttctacatcccgctgctgctcatgctggttctctatgggcgcatattccgagctgcgcgcttccgcatccgcaagacggtcaaaaaggtggagaagaccggagcggacacccgccatggagcatctcccgccccgcagcccaagaagagtgtgaatggagagtcggggagcaggaactggaggctgggcgtggagagcaaggctgggggtgctctgtgcgccaatggcgcggtgaggcaaggtgacgatggcgccgccctggaggtgatcgaggtgcaccgagtgggcaactccaaagagcacttgcctctgcccagcgaggctggtcctaccccttgtgcccccgcctctttcgagaggaaaaatgagcgcaacgccgaggcgaagcgcaagatggccctggcccgagagaggaagacagtgaagacgctgggcatcatcatgggcaccttcatcctctgctggctgcccttcttcatcgtggctcttgttctgcccttctgcgagagcagctgccacatgcccaccctgttgggcgccataatcaattggctgggctactccaactctctgcttaaccccgtcatttacgcatacttcaacaaggactttcaaaacgcgtttaagaagatcattaagtgtaanttctgccgccagtga

SEQ ID NO: 53766 - DNA, 382 bp, Homo sapiens
agtgctgaaagctagagtttcataagcacaatgcatcatgaaatcagagccaccagcaatatagagttaaaagactaaaaaacaatacaaaacaagcaacaacaacaaaaaaaaaaccaaagagataaagtgtaagttaaaaacattggatttaaaaacaaaatacgtcgcattcttagatgagagtttttaccttcttcctgccaactgatacttttaaaaaaaaattagaactttgtcagttctttcataaaagatcatttttattcatttggctgtaaaatttcctacatatgttaaaatatgtgtgaatgtgtccatttttcaaaacaagagaaaataactacattggatgaatttgcaatctatggttctgcaatac

SEQ ID NO: 53767 - DNA, 315 bp, Homo sapiens
atataatttctaaaggagatgtacttttaatataatcataggattttcagcaatattatacaccaaccttaaaaatacaagcattacctctactgaaatcagaagttttgggtcattttaccaaagattcatgagagaacataagtattctaacagaaatgggagttagtttattctaagtcactgctataccagtatctgcagagtggaattaaaaaaaaatcaaatcctatgaaactcccatagtttagggttaaagaataacataggaggctaagaagaactggtagatatttttggtaaagtagaaaatat

SEQ ID NO: 53768 - DNA, 353 bp, Homo sapiens
tcccattctttacacacctgattttgtgaattttcttgtaccaaagaattcatttttcctgctgctagtttcttaaaaattatccagcctgctagcccgaggtttgcaatgtttgcttgcatatgagagaaataaactaaagctggttaagccaagaaacgttttatccagagattattcaggtgtcttgaaacctaagagccaaaattcaattgttccaaaggaagaaactagagccaggggcctcaagcctagtgaactatttgccatctctgctccctgcttctctctgtccacctgcctcattctcgtctctgtagactggctttctttccttcacagggacatggaag

SEQ ID NO: 53769 - DNA, 356 bp, Homo sapiens
aactgggtaacttgcttttctcacttagtgaaaccacagacatgtcaacagatgcagaactaactctgcttcgcagaggcgacctgatacttcatactatggagaccctaccctcgatttgattcctttagtaatgtttattaattttgttttcagggtttttttttgcctctagaaacaatgctgccataaatatctttttttcctatatgtaacttttacacggagcttttattggtgtgggcagattcccaggaacagggttgctgggttatgggatttgtgtattgccagctcactttccagaaaaatgttgagcgactcacattccctcaccagtgtgtgagagggcctgt

SEQ ID NO: 53770 - DNA, 411 bp, Homo sapiens
ccactcgggtgctctgctgcctactgcctgagaaagttcagatgggccacttcacctctcggagccccattcttcaccctgaaattggacaacagccttccctctcagggcagcattgaaagtgaaatgaggctgggcgcggtggctcacacctgtaatttcagcactttgggaggccgaggtgggtggatcacaaggtcaggagttcgagaccagcctgtccaatatggtgaaaccctgtctctactagaaaatacaaaaattagccgggcatggtggcacacgcctgtagtcccagctacatgggaggctgaggcaggagaatcacttgaacctgggaggtggaggttgcagtgagccaagatcgcgccactgcactccagcctgggtgacagagagagactccatcta

SEQ ID NO: 53771 - DNA, 312 bp, Homo sapiens
attggagatgcctttgtcaaattttcccattttaaatggccaggaaaaacaataattatttttctgatgctgaggttttatatcttagtagaagaacttaaactatgacttgtattcaagtctaacaggaatagaggtaatgaatgaaagtagtcattgacctgggacaagatcactttgaacatgacactattatacaaagtgtaatatttatttttaaacaaccacttttcaaaagcagttgtgcatacattccaaagaataaaatgctagctactaggttttgagaagcagaataaaatatgatactga

SEQ ID NO: 53772 - DNA, 317 bp, Homo sapiens
cccatcttaataagggactaattggattaaattttaattatccagatataaagtaaaacatacagtagtgaatttgtgtaacatttattactataaaaaagataagtggttatttataaaataatgtgtgaaacttttcttgatcctgaggggtcaaaggaacaggtaatgactaataatactgataaaccgtatgtggaagactgtggtgaataaaataaaaaggccccagggatattttgttgtgcctgatttggcccaatctgttgatcaccttggcttttaatgcctctcattaggaagagtcttcagcaaag

SEQ ID NO: 53773 - DNA, 997 bp, Homo sapiens
ccagggcacagtgtatcctattgatattaataggtagtgatggcttaattatcttgataaaacagtaactccattttaatgtgggttctctagagatagagttataactaatttggaaggttacaaacaggattgcggtcaattttgggatatgagaaccctttgatatccctcaaattaaactagaggatattttgatggatatttccctctgcaatttatcatactctctcctgcaccttcaatttgtcagttactacagaatcatttacattattgtacagtctgccattttaaaataaaatggtttcttgatccagtgttctgcttcagtgactgcctcatttctttttatttatttatttttataaatagaagcgggatctcgctgtgttgcccaggctggtcttgaactcttgggctcaagcagtccacccacctcagcctcccaaagtgttaggattacaggcgtgagccacggcgtctggccctgcctcatttctctacctcaccttgaggaagcgtagttttttgacagaacaaaaaataaatacaggagtgagaaccagaaactaattagttacctacaggcaccgggtaggaactgagtaaatgggaacaacagaaggaatggccttgttctgaatgtacttttttgcatagttttgagttttggaaactgttagtcttttttatgttcaaaaataaaattaacaagatgtggagagtgggactccaaaacaatacaaacagcaacaacaaaccgtgtatttatgtgaataatataaactcccagaagaaaaaaaaaaaaaccaagtaagttttgagcacaggattaaagattaaagaactgaaaaaataatcttgaactctgtgtagtaggctattatttgtatggtagaggtgtagcaattctgaaactattttgtgtgcattataggattgagcaaatgagtaaattcattgatattttgggaactagggtttccaacgtgga

SEQ ID NO: 53774 - DNA, 1324 bp, Homo sapiens
gctgatgcagcttcggcttcattaacgccagatttcttatctccaggaagttcaaatgtctcttctcccttaccttgttttggatcctcattccactctacaacttcctttgtcattagtgacatcaccgaggagacagaggtggaggtccctgagcttccatcagtccccctgctttgttctgccagccctgaatgttgcaaaccagaacacaaagctgcctgcagttcgtctgaagaggatgactgcgtctctttgtccaaggccagcagctttgcagacatgatgggtatcctgaaggactttcaccgaatgaaacagagtcaagatctgaaccggagtttattgaaggaggaagaccctgctgtgcttatctctgaggtcctaaggaggaagtttgctctaaaggaagaagatatcagtagaaaaggaaattgacaaccctcagctctgcaaactcagtctcatgctcctggaataccttcaatagctgccttcctcaccgcagatgtttctgcctcttaaggatagatcttctgcaacagtcttgctgacaagctagagcttggactgaaagagaagagctggattatatatttcccagacttcaaaccctagcagaagctaaggcttgtgatttgacctgagacatttgtttcaggtaatcgtgtagaatgaagtatcttagtttaaagggtaagagagaagttgtttctggtttttccttgcccctgtgtgaaaataggtcctaaatgactgacttcactgcattagaccctatagctggtctcacaagacactttgtgcccagctgtcactcactctcagcagcttccttgcagcagagcagggctgaggggaaggggctatgaatgtttgtatacgtgttcacagggcacggaaaatcttatgctgctccgtcataaacctacaccaatgcccagcaatcaccctcctcacttccttgtctagatgtagaggtcaggctgctgaaccagccaacacatgggctactgctgggaagcctgggctgttttttttcttaaacacattttatattactgaacaaccaaatctaccctccacggccctgaggccttatcagttccactgattaaaaactttctcttccacggactttaagcccggtaggaaagagagaggaggagggggaaagagcaaaccatctttcttccaggcccttgactgctcctttgggctgggccaaggtttgtttgtaccacaccatgcatgactcagatgccctcaggtccctttttctatggtatgtatactgcttgtgtttgggttgaagcactacctg

SEQ ID NO: 53775 - DNA, 585 bp, Homo sapiens
  misc_feature (23)..(23): n is a, c, g, or t
  misc_feature (556)..(556): n is a, c, g, or t
ctagggtggaaagcgacgtctanggtggagagcgaggagttgtcaggaaagctgcaggttactttgtgcccagctgtcactcactctcagcagcttccttgcagcagagcagggctgaggggaaggggctatgaatgtttgtatacgtgttcacagggcacggaaaatcttatgctgctccgtcataaacctacaccaatgcccagcaatcaccctcctcacttccttgtctagatgtagaggtcaggctgctgaaccagccaacacatgggctactgctgggaagcctgggctgttttttttcttaaacacattttatattactgaacaaccaaatctaccctccacggccctgaggccttatcagttccactgattaaaaactttctcttccacggactttaagcccggtaggaaagagagaggaggagggggaaagagcaaaccatcgcagggcctttcagtggccttcgttttttttttttattttttaaacgtgtggtacgggactctcggtttcttccgggctcatctttccagcctcacccctttgggngtacttgactctgtccaggtcgctttcca

SEQ ID NO: 53776 - DNA, 331 bp, Homo sapiens
gaacttttgggggagttgggaggttgacttcatgggcaccttcaaccatatgtatgctcacacacggattgatggggagaaagaggttgactaagctttccaaacaaaaatgggaatacgggacccagtaaatggtctttgtccagcttctaggaggtaatgtggtgctgaaaataggaacacttctcagatatttcaatgtcttatgggagcaaagagacaatatttgaaaatgaggcctcctacgccgggtgcggtggctcacgcctgtaatcccagcactttgggaggcggaggcaggtggttcacatggtcaggagatggagcccat

SEQ ID NO: 53777 - DNA, 573 bp, Homo sapiens
atgagtaccagtgtcacagccatcctcatgtaagtggcactctgcatggcggcctcatgcagaagaaaggctactctttgaataactcgtgtattgtcatagtttttacatccttccccctcctccttaccttctcaatttcactcttctatgtcctattctttagtaatgttttttaaaaaattccctcttttcttgtctgtcttttcctgttcttaaatatgtcgtgttactggcaattatggatttctttacgactagggtcatatctgttgtgagtctttcccagtgccttgccttcctccccaccaaaaaaaaaaaaaaaaaaaaaaggctctgacttgataagaaattctttgacattttgagctgggaaacttcattcagcgggatattgccggcaggaggtctgccgcccagcttagggtgcaagcagggctggggtgtgggcgttttcctgggagctcctgatttacatcgacctcaagtatgaagccagtaaaagtgccagcgatgctgtgtctttgaggttaaaaaatctcttgtgttgatatggctaattctgggccacaa

SEQ ID NO: 53778 - DNA, 1372 bp, Homo sapiens
tatctctaagaaatatttcctcttagtttcttttcaccttgacttcaactttgatattaatattcctacacccactttgtgctagtgttttccagatatggtaagttgatcaaaaaaatgacacaataactccttcccttcctgaatccatatgccttgtgactttgcctctgttctaataagaggtgaagtccatttccttattcgttgaatcatgtttggcattgtgacttgtgaatacagaaggcagcagaactaatgctatgggacatctgagtctagtcctcaccaggtctcccagctgctgatctcatcacctggaacgctgctcccaccatgtgtagaagcctgggttagtgtcctggaggatgagagacaatgtggagggtgaggctggccaacagcctgcaccagctgtgtaagaccatctgagatgactgtagctgcatgagtgaacccaggggagacatgcagagacttgcccagctgtcttacttgttactttaagccattcagttttttctaagataaaaaaggttagtttatctaggcagaaatagtatgtaaataattatacaagtagtacatggatatgacgaaaaccttgaagctgatgtgcaaagagctgaaacttggaaaatacttaatgagagaatggcctaaagagctattcggtactctgaattccccaaaggcaaggaccaatatttatccacctccgatatctcctccggaaccttacacagtacttggaacacagtggactctctacaaataccaaattgggaattaactcttattataaatactgagtgtcagccctggttcttccgggctccaaaactaacatatgagtagatttctccaggtagacaagagtgaggtaaacccccaagaatcaggaactagagccaagtaaagaataagccccgagaagctttgagtaaaaaaggatactgtttgcacattgcgtattggaaaacaagtagaaagtccaaaaacaaaataaaaacttacagcaggaagaaaaaaaaaaaaagccccacaaactctacagcttaagttagcctaaccacagctgagatatttcttccgaaagaactaaatgacaagttgagagaaaggccccattgtcaggtcagctgttcctgagaagaactaaattcaaaactagacaaaactctctcactactaaaaacgcatatagacagggaagcattttttcaagttatactaataagttgacttggatgctttaatagctttcatgaataattctgaaaattgtttagcatatttgaggaactccacaactacttagaataaaaagaaaagcaactttttaaaatttagtagtatctcaaaaaagaaa

SEQ ID NO: 53779 - DNA, 432 bp, Homo sapiens
gaggtcatagattttggtgggtaagagtgctgcttgcttagaggggttttggcagctgccttcaggcagtgagaaactgttaaggtaggaaggagaacagacaacttcggcttagatgagaaattgtgagcactttccaacagtgacatcccagtactctgtttaagtgaaaagctgaactctcttaaaactctcttgccatgcctcatgtcatcatttctccaggattggaatgtgtgccactcctagaaaggattattggcagagtttcaatgtctctctcctgtctttcttttcctctcttcattccatgtgaatatacgaaggaaggtggctccccacccagtgctcagaggttgggtggaggcagcacacagacaggtagtgacccttcaagcatggggaggccagagttcagaggacggtgtgtgg

SEQ ID NO: 53780 - DNA, 448 bp, Homo sapiens
cccctaggattccagataagacaatgcacagaagtatacattataaaccatttgaaaatggcttctgatgagctacttttccccagtaggaacagagtatctcctcatgagatttcaagtggttactgggtgtttggctatgataatgcattaatgtgtataattatagtttttgcactttctcggtatgttttacccttttgaagaatttaaaaatacaagccattagccaggagaactatacgcaatgcatattttcaacaaagtaacaatctccagaaaaactcctatgcctctgtaagaaaaatacaaatcattgaggaggaaaggggccagaaacataaacagatatttcacaggtgaataagcataagtactaataaatgtaaaatatctaaactgtattaataataaaaaagtcagaattatgactataatgacatataat

SEQ ID NO: 53781 - DNA, 429 bp, Homo sapiens
atgtgaggcccagcccttctagcctggggtgttgatggaagtagaagggaggatgtgtgcttagtttactcaggagccatgctgggggcattgtgggattatcttaatccccatgacaacactctttaaagtagatctgtctctattttattttcttaaagacaaggtctcactctgttgcccaggctgaagtgcagtaacaccttcttagctcactgcagccttgaacccttgggcccaagcaattctctcgcctcgtcctcctgagtagctaagactacaggtgtacaccaccacgctcggctaatttttgttattaaatttttttgtagagaccggggggtctcactatatttcccaggctggtcttgaactcctggcctcaagtgatcttcacaccttggcctcccaaagtgctgagattacagg

SEQ ID NO: 53782 - DNA, 606 bp, Homo sapiens
atcagttctcttgtgacacagagaagaagagcagggagaaaggccaggaatggatcttgacagcagacaggcctggaccggcagccttgtcttgaaggaataaacctgagaaaggatagtggctctagagaaacagtaatagcacctttctagcacctttgatttttctcagtccacctttctctaggaaaagacttgtttggaaggctctcattgatacctgggcagatcagtgtagaagagggtttagtgtacttggggagttgtcaccttcccttggtttcccagtgaaccatgctagcggagcacttgaaggagcagtcacttagagccgagagagcattacacactcagccacgctgcccatggcacctgtgggatctctgtccctgagggttaccaggagctgtcattggggggtatacatattgataaacatgctgtgccttaaagcagctgtacagtactagagaaagcctcgatctgtcaggcacgtcaggcctgagtgcctccttgttgatgactggcccggtcccttttgaaccacttctacttcctgccatagaaagacaagcataatttcttcatagccagaaaaaaaaggaa

SEQ ID NO: 53783 - DNA, 769 bp, Homo sapiens
aagcagtggtatcaacgcagactggtcattatggccggttgattaaaagacggaattttgactcgtgtctgtatcatacaagtacaaatactaattttgccctatgtatccgtaaatgtcatttgtgattttgacttatttatttaatgccctttcttatgccgtgggttttcaagtttactcatttctatggttgcaaataactctaaaacttattatataaactttcatattataggcagaacacaatggctaaatatctgttgcatgtactttaaagtttattataaaatataaacagatatataaagatgttgactcttacctgtgattttgcatggtcagactcggtgtcaggtacggagaggattctcatgactgtcttacctctactgaatattctagtgagttatatgatttacggagtgattaacagaggtctatataaagttacttttcccctttacttaattatattgtagtgtgcagataacaaaactgctaccttctcatccaagtggtctgtagaattcatgtcccttacagtggtcatttaaagtcaatatttatttatgtatgtaataaaaaaagttggatttttgtgtatgtctgtcacattatttagagagaagtaatcttgtaaaaatgttttgtaaaaaacaaaaaagtattgtaaatagtcttgatattctgtgactcattattttcatgttagagtttgtacatactggttcaataataaagtatccttaaaccagaaaaaaaagtc

SEQ ID NO: 53784 - DNA, 1771 bp, Homo sapiens
  misc_feature (62)..(62): n is a, c, g, or t
gggtcggcgaggagggtccggccggagttgaaggattgaactttccggctcagtcgcggcgnctgcctggtcctcagcagtgcagccccggcgcggagcagggagcctcggcccgcgcccggcgccctcgccctcgccctcgacccgcagccatggtgcccggggtgcccggcgcggtcctgaccctctgcctctggctggcggcctccagcggctgcctggcggccggccccggcgcggctgctgcgcggcggctggacgagtcgctgtctgccgggagcgtccagcgcgctccgtgcgcctccaggtgcctgagcctgcagatcactcgcatctccgccttcttccagcacttccagaacaatggttccctggtttggtgccagaatcacaagcaatgttctaagtgcctggagccctgcaaggaatcaggggacctgaggaaacaccagtgccaaagcttttgtgagcctctcttccccaagaagagctacgaatgcttgaccagctgtgagttcctcaaatacatcctgttggtgaagcagggggactgtccggctcctgagaaagccagtggatttgcggccgcctgtgttgaaagctgcgaagttgacaatgagtgctctggggtgaagaaatgttgttcgaatgggtgtggacacacctgtcaagtacccaagactctgtacaaaggtgtccccctgaagcccagaaaagagttacgatttacagaactgcagtctggacagctggaggttaagtggtcctcgaaattcaatatttctattgagcctgtgatctatgtggtacaaagaagatggaattatggaatccatcctagcgaagatgacgccactcactggcagacagtggcccagaccacagacgagcgagttcaactgactgacataagacccagccgatggtaccagtttcgagtggctgctgtgaatgtgcatggaactcgaggcttcactgcccccagcaaacacttccgttcttccaaagatccatctgccccaccagcaccggctaacctccggctggccaactccaccgtcaacagtgatgggagtgtgaccgtcactatagtttgggatctccccgaggagccggacatccctgtgcatcattacaaggtcttttggagctggatggtcagcagtaagtctcttgtcccaacaaagaagaagcggagaaagactacggatgggtttcaaaattctgtgatcctggagaaactccagccagactgtgactatgttgtggaattgcaagccataacgtactggggacagacacggctgaagagtgcaaaggtgtcccttcacttcacatcgacacatgcaaccaacaacaacagaactacaggaaacagtggaagcagaaatgaccaacatggagttggggaatgagagtcacatcatccctcatgaagtcctgaagagtgagcgatctgcaggcccacaaggaatggacatcattccacacaaacgcagcagcgtggatgagtgtagagagttagagaagcgcattgcatgggcagagaactcagcgtgaggaaagaatgaaggtggatgggccactggtctctcccctggaggtctcattgagttgcaaggatttaaccaccatctgtgtgctaatgactccctgccctcccaccctgaccactctttgaactccagagtcctgcattcagccacccacttagcacctccccttggatggcttgcagatatttcaaataaaacgttcaaacacaaaaaaa

SEQ ID NO: 53785 - DNA, 417 bp, Homo sapiens
tcctaacagtgcccaatctgagaccatctactctttaccgactggaagtgcaagtgctgaccccaggaggggaggggccggccaccatcaagacgttccggacgccggagctcccaccctcttcagcacacagtgagtggggtgccagggcattaagccatcctgtcaggtcttgtggacatagagaaaaatcttgctggaaaatgaaaacaaataaatacactagtacaggtttctatgagatagggaaattgtcatcatctgaaattctttctccctgtttgtaccgacttactagattctattccaggcacctgtagtatacattgcatagttgatgcttaattgttctttttctccctccctccctcttccccgcttttctccctttctttgctccttccttgtttcctttct

SEQ ID NO: 53786 - DNA, 6327 bp, Homo sapiens
  misc_feature (62)..(62): n is a, c, g, or t
gggtcggcgaggagggtccggccggagttgaaggattgaactttccggctcagtcgcggcgnctgcctggtcctcagcagtgcagccccggcgcggagcagggagcctcggcccgcgcccggcgccctcgccctcgccctcgacccgcagccatggtgcccggggtgcccggcgcggtcctgaccctctgcctctggctggcggcctccagcggctgcctggcggccggccccggcgcggctgctgcgcggcggctggacgagtcgctgtctgccgggagcgtccagcgcgctccgtgcgcctccaggtgcctgagcctgcagatcactcgcatctccgccttcttccagcacttccagaacaatggttccctggtttggtgccagaatcacaagcaatgttctaagtgcctggagccctgcaaggaatcaggggacctgaggaaacaccagtgccaaagcttttgtgagcctctcttccccaagaagagctacgaatgcttgaccagctgtgagttcctcaaatacatcctgttggtgaagcagggggactgtccggctcctgagaaagccagtggatttgcggccgcctgtgttgaaagctgcgaagttgacaatgagtgctctggggtgaagaaatgttgttcgaatgggtgtggacacacctgtcaagtacccaagactctgtacaaaggtgtccccctgaagcccagaaaagagttacgatttacagaactgcagtctggacagctggaggttaagtggtcctcgaaattcaatatttctattgagcctgtgatctatgtggtacaaagaagatggaattatggaatccatcctagcgaagatgacgccactcactggcagacagtggcccagaccacagacgagcgagttcaactgactgacataagacccagccgatggtaccagtttcgagtggctgctgtgaatgtgcatggaactcgaggcttcactgcccccagcaaacacttccgttcttccaaagatccatctgccccaccagcaccggctaacctccggctggccaactccaccgtcaacagtgatgggagtgtgaccgtcactatagtttgggatctccccgaggagccggacatccctgtgcatcattacaaggtcttttggagctggatggtcagcagtaagtctcttgtcccaacaaagaagaagcggagaaagactacggatgggtttcaaaattctgtgatcctggagaaactccagccagactgtgactatgttgtggaattgcaagccataacgtactggggacagacacggctgaagagtgcaaaggtgtcccttcacttcacatcgacacatgcaaccaacaacaaagaacagcttgtgaaaactagaaaaggtggaattcaaacacaactcccttttcaaagacgacgacccactcgcccgctggaagtcggagctcccttctatcaggatggccaactgcaagttaaagtctactggaagaagacagaagatcccactgtcaaccgatatcatgtgcggtggtttcctgaagcgtgtgcccacaacagaacaaccggatcagaggcatcatctggcatgacccacgaaaattacataattcttcaagatctgtcattttcctgcaagtataaggtgactgtccaaccaatacggccaaaaagtcactccaaggcagaagctgttttcttcactactccaccatgctctgctcttaaggggaagagccacaagcctattggctgcctgggcgaagcaggtcatgttctttctaaggtgctagctaagcctgagaacctttctgcttcattcatcgtccaggatgtgaacatcaccggtcacttttcttggaagatggccaaggccaatctctatcagcccatgactgggtttcaagtgacttgggctgaggtcactacggaaagcagacagaacagcctacccaacagcattatttcacagtcccagattctgccttccgatcattatgtcctaacagtgcccaatctgagaccatctactctttaccgactggaagtgcaagtgctgaccccaggaggggaggggccggccaccatcaagacgttccggacgccggagctcccaccctcttcagcacacagatctcatcttaagcatcgtcatccacatcattacaagccttctccagaaagatactaaactgttcaaaaagattttgtgaaattgcacagatgtgtaagcttgttgaacttcggccacgagacatgcacacttccagaggcagtgggaactgctcagaggcccggactctcctatgtgactttagtgcaggaagaacttctgtcaatcatggacgcatctggagacaagtgagaaacagtagattggtgaagacagacaccagttccctacaagcatggagaaaatgaagaataggcctgtttaatgctaaattttgttttcatgtatggtgtcgctcatttctattgaattacaacagaactcagttttccctgaatttggagcaccaaactccgccccaaaaaggagagtaacaaatacacaattcacacataacactaagcgtaaatctaatcaataaaatatatttttgactaaattattgattcgatatgaaaaatcaactaagattacacagctttgtttttttgaatctttcctaagatcatttttatcctaggtgatttttaaatgaaaatgtgtaatctaaaatataccagcgaatttaaatctaaaaatgctcctactttaagtaccttgtgctgctctttatgcaaaggtaaatcaaagttccctctataaattatgatttacaaaagacacccaagccagaggaactcaatgaaataagctgctaatcagattttaccttggagaaatgaaaattatttcttggggatgccttttaatatttgatcctattatgtgagagattttcctgatatgttatcttatttatattttcccttattttcctcaatgcagataatagcttttggtgcacttttgtttcaccatctgaaaattcacaaaacttcttgcttcaaatgaaaaaatcccaactattgagcatgtttaaatctttgcagagatttgccttttcttaatcaaagaaaggtctttgtgtgctagaatattattggtaatgttttaaaaattcctttgattgatagagaaggacagttatttgcatttaattcacccatatgctttcaaatctagtatatcttactttttggaaatgttttatgctacaaattagtgccttgtagcatgaacttaagtcaaaacgtgttatcaatatagagtgttgcagtgtatattgtaacaacctaaaacgcagagaagtttaatttaatactgttttttttcttgaaggaatactcacatacatggtttgaaatgtgcatagatatgcatgtctatataattataaatgcatgtgtatatatatgcaaatatatgtacatatacatgtatatacacacagacacatgcatatacatgaatataccttgagcatgaatccctggagaaatcgttttcgtaggctcaccaatggtgagtaaagatacagctcttttaaaggtcataaggataatatattttccccatcaatgctgattctgagaaaagagcaatttatcaaaattaaacactgtaaaagaaaggtgtccatatgtctttacctacctaagtaaaacaggaagaaaatcagtaacattatccttaggttttgacaatggtacttgcttcttgttgttttattgtttcctgaattcatgcagatgcctggccattcctgggaagagtggataactcagaagtcactgtactccacagagcctcactgcagtgtctaaaggtagatgcaaattaaaatgcagggaaaataacttttctgatgttgatgcatgtctttgggaaacacatttataaacatggatacctgataatagatattgaaacccatttcctgtgtgttaaaatatttaaaaagtggatattccaggaatgttttgcagctttgtacaagtaacataaattggacacctcagaatgaaagttcatgttggttctgaatggttcactgcagctcctgtcacaagctgggatggatttatcacattgagttatgaaattacctggttctaagaatttttgagtggcaaaaatagaaaacaatcttcatttgaaaacatccctaagcttgaataaatggataccatagatagcttctcttttttattctggtgtcattaccagcatctgaatttcaagttcttaaaatttcaaaaattaaaatttttcattattagctatccatttatcttttacatgaacttgtcatgaacaaattcaaatgtttatgccagcaaatttttgtactgttgcatagttaaaaatgctgggagtctctgcatagatacaaaatattattaaattattacataaatttaattttataaaatttaatcatgcttcttttgtctgggtaatagacattggacagatatttttagttcagatggtgattctgaagcttacatctcccttaaaaaaatctaaagcagctcttatgggcttctaattttaatataaataaataatttaaattttattggtgttattggaagaaaaatgctattaatgggctaataaaaaacatgtgtttctcttatggattttaataagctccagtattattcaaatgatcaaaaatatagttataattttttgaattttaaaaatgtgattgctctaataaagaataaaatctatgctttttaacaaacatagttttggtgcctaattctgtaatatgttttattgaaattagattcatttctctaatgtgagaaaaatatatccagtaatagtattgactgtttaaaaaattgagctcatcaaaaatattgtcatcaaatacaggtggttaatctgacatacattgcagttacatgcattatttttatttacaacatttgctccttaatgatgaatttatctgtgttaccctgtttttctacctggaactccatagaatgatgtttgcaaaccaacatgtgctcttttcagtcattcactgttttaatatgacatggtagagaagataaggtttatggcaggtaattttttgtaatgtgtattaaacgaagttcaaagattagaaatacatctgtgtcctgaaaaccttagatacatagccgactgtatacagaggttcatctcaacctcaacactattgacttttggggctggatagttctctgttgtgggggtttgtcttgtgcactgtaggtttttagtagcatccacactttctcctcaccagatgccagttgcaccctcccccaagttgagacaaccaaaaatgtctccagatattgccagctaccccttgagggatggtacctctggttgagaaccattgctagagaatgatctttactgaatttgccctttataagaaacccagtgaatttctagagcaagtcccaaaaactaagggacagctaagaagttattatggttgacttcaaaggcctaaactgtgttttttatgtccactaaacaacttgattaaaagacggaattttgactcgtgtctgtatcatacaagtacaaatactaattttgccctatgtatccgtaaatgtcatttgtgattttgacttatttatttaatgccctttcttatgccgtgggttttcaagtttactcatttctatggttgcaaataactctaaaacttattatataaactttcatattataggcagaacacaatggctaaatatctgttgcatgtactttaaagtttattataaaatataaacagatatataaagatgttgactcttacctgtgattttgcatggtcagactcggtgtcaggtacggagaggattctcatgactgtcttacctctactgaatattctagtgagttatatgatttacggagtgattaacagaggtctatataaagttacttttcccctttacttaattatattgtagtgtgcagataacaaaactgctaccttctcatccaagtggtctgtagaattcatgtcccttacagtggtcatttaaagtcaatatttatttatgtatgtaataaaaaaagttggatttttgtgtatgtctgtcacattatttagagagaagtaatcttgtaaaaatgttttgtaaaaaacaaaaaagtattgtaaatagtcttgatattctgtgactcattattttcatgttagagtttgtacatactggttcaataataaagtatccttaaaccagaaaaaaaagtc

SEQ ID NO: 53787 - DNA, 2404 bp, Homo sapiens
  misc_feature (62)..(62): n is a, c, g, or t
gggtcggcgaggagggtccggccggagttgaaggattgaactttccggctcagtcgcggcgnctgcctggtcctcagcagtgcagccccggcgcggagcagggagcctcggcccgcgcccggcgccctcgccctcgccctcgacccgcagccatggtgcccggggtgcccggcgcggtcctgaccctctgcctctggctggcggcctccagcggctgcctggcggccggccccggcgcggctgctgcgcggcggctggacgagtcgctgtctgccgggagcgtccagcgcgctccgtgcgcctccaggtgcctgagcctgcagatcactcgcatctccgccttcttccagcacttccagaacaatggttccctggtttggtgccagaatcacaagcaatgttctaagtgcctggagccctgcaaggaatcaggggacctgaggaaacaccagtgccaaagcttttgtgagcctctcttccccaagaagagctacgaatgcttgaccagctgtgagttcctcaaatacatcctgttggtgaagcagggggactgtccggctcctgagaaagccagtggatttgcggccgcctgtgttgaaagctgcgaagttgacaatgagtgctctggggtgaagaaatgttgttcgaatgggtgtggacacacctgtcaagtacccaagactctgtacaaaggtgtccccctgaagcccagaaaagagttacgatttacagaactgcagtctggacagctggaggttaagtggtcctcgaaattcaatatttctattgagcctgtgatctatgtggtacaaagaagatggaattatggaatccatcctagcgaagatgacgccactcactggcagacagtggcccagaccacagacgagcgagttcaactgactgacataagacccagccgatggtaccagtttcgagtggctgctgtgaatgtgcatggaactcgaggcttcactgcccccagcaaacacttccgttcttccaaagatccatctgccccaccagcaccggctaacctccggctggccaactccaccgtcaacagtgatgggagtgtgaccgtcactatagtttgggatctccccgaggagccggacatccctgtgcatcattacaaggtcttttggagctggatggtcagcagtaagtctcttgtcccaacaaagaagaagcggagaaagactacggatgggtttcaaaattctgtgatcctggagaaactccagccagactgtgactatgttgtggaattgcaagccataacgtactggggacagacacggctgaagagtgcaaaggtgtcccttcacttcacatcgacacatgcaaccaacaacaaagaacagcttgtgaaaactagaaaaggtggaattcaaacacaactcccttttcaaagacgacgacccactcgcccgctggaagtcggagctcccttctatcaggatggccaactgcaagttaaagtctactggaagaagacagaagatcccactgtcaaccgatatcatgtgcggtggtttcctgaagcgtgtgcccacaacagaacaaccggatcagaggcatcatctggcatgacccacgaaaattacataattcttcaagatctgtcattttcctgcaagtataaggtgactgtccaaccaatacggccaaaaagtcactccaaggcagaagctgttttcttcactactccaccatgctctgctcttaaggggaagagccacaagcctattggctgcctgggcgaagcaggtcatgttctttctaaggtgctagctaagcctgagaacctttctgcttcattcatcgtccaggatgtgaacatcaccggtcacttttcttggaagatggccaaggccaatctctatcagcccatgactgggtttcaagtgacttgggctgaggtcactacggaaagcagacagaacagcctacccaacagcattatttcacagtcccagattctgccttccgtaggtcccacctcttgtactatgtctgtgtcattggtatctactgctcctttttactgaccttcagaggtggctacctctgtcattctgtgtgctgcactattgagtcttatttttgcattttcttcttctgagtgtatcttttgcaagcattaacacatcacaaatgtgactgcatagctaagaagtagcataagctgccatctagataaagtttgatggctagagccaactcatgaaaagaccttaccctatcttgtatataagtgattgagccattttcttctatctttgttaacctcatgtctctctggtccaagtgaacatgccctgtttgaagtgttgaattgggaagggcaggaatagctaaaagaagcttgttgtttgtccgtcttccccgcaacttcaaa

SEQ ID NO: 53788 - DNA, 454 bp, Homo sapiens
tggacccccgcacacaggtacttccacagcaccggagtccactcagcccacaagcaccgcccaggcacctctgcgcgtggctagaaaaggttgatgacactccatggggctgcactgtcttctagaaggtcctcagcccacatgtgccaagaaaggccaggatcctccagaaactacctgtgccccagcctggacgtctgtctggcgcagcagctcttctcagtcagcacagccccagtccctggttccatgatggaaacagctccctaatccatgtgagactgaagtgtgactacatgtgtctgcaggagagcctgtgggtgacctgtatgtgcgcacgtgtgagggtgttgctggtggttgtggggagagacacaaaataacctggaaacccctgaatcccccacaggagctgagattagaggtaacaattctcaagagaaaccctgagttc

SEQ ID NO: 53789 - DNA, 308 bp, Homo sapiens
atcactgccttaggcttttttttctttttttaaaccatgatcctcttgcaaaccaaacatacaatcgtctcagaacctctccatataaggaatttccagacagactgattctatgcaatatttcttgggcttaatggagaaagtcattctagggcattgtccagctttctgagtcatgccatcagggtactgagaggctggctcacccaggacaaggcctggcctttctgagcctcaggaaagccatgagtgagaaaggtcactccgaggctactgatccctaagcaatgcatttatgatttcaagag

SEQ ID NO: 53790 - DNA, 262 bp, Homo sapiens
tgacacggtaaggcccgaggaggcctgaggcactctctgaagggcgtggatagagaagagtgacatttgcacaatccttctctttttctaatgtgtgtttccctttctagaaggcagggatcttgtctgtcctatttatccttgtgcccatggtatcttgcacctggtaggcattctgtaaatcaggggtccccaagccctgggctgcagacctgtttggaactgggctgcgtagcaggaggtgagcggtggccaccgtgca

SEQ ID NO: 53791 - DNA, 391 bp, Homo sapiens
  misc_feature (384)..(384): n is a, c, g, or t
cctgtacttcggatccagggtttttgacagaagaggaagaagggggaggggtagaagtgttaaggggagtctgctgagaaaagctgtttttgaagccagaaggggtttttgtttttataatgccatttgacagagtggaataacagtatctaaggaaacgggtagaggacaacaaagaatggagcatattcatggcgaggagcaaaagctctaccccattgaaaggcttcttttcctccctggcgacaaggacacatgcattggtggccaaaagagagaggagacaaaaccgctgcagatggctgatgtgaatctagtggaaagagctactggggatgagagaaagaggaggaggcaggtaatgcagagcgtgaatggtgcagntggttgg

SEQ ID NO: 53792 - DNA, 349 bp, Homo sapiens
acgggacttgctcctccttgccttccaccatgattgtgaggcttccccagtcacatggaactgtaagtccaattaaacctctttctttataaattgcccagttttgggtatgtctttatctgcagcgtgaaaatggactaatacgttaagttgataccagtagagtggggtgcttctgaaaagatacctgaaaatgtttttctcaaaagatcaatatcattttatattttaattgattttaaaaagctttcctctaggttgtctctggacagttttaaaaatgactaaggctaatgggtgttccctcacttacatgagagaaataaaccaggaattttggtttatgaat

SEQ ID NO: 53793 - DNA, 299 bp, Homo sapiens
cagagtgagaccctgttacacacgcacatacacacacacacacacacaaatctatagtctagaggaagttataaggcacataggtgtaatgcttataattgataggaagtgatgagtatgaaagcaggttgacagataaagtgctctttgtttctagagaaagaaatcacttctgttctaggatattagggaaggcctcagtgaggaggatgataattttgctatatgttcagcagccattttcagatgagatcaggcacgttcagggtggcatggccatagacacagcagccattgtc

SEQ ID NO: 53794 - DNA, 451 bp, Homo sapiens
gctgccatggcgatgagctcccttccccggtaatagaatggagtagagtggatagggaaagacctgcacctgtgagggccccccagagaccacctccccgcccccttcccaggcaaatgggaaagcccagccatccttgagatagaccacagtgcctggcagcagagggtggtgggcttccctgagtgtgcctggattcttgagtgcctttctgcatgtgagggcagttctatgtactgtgagctggtgtgtgtctaggtatagacctgctagcaagtagattattcagtgtctgaaagagactgagtagcacttgtgagtgagaagcaggtgtcagttattctaacagataacaggaggtggaacgtgcacacgatatgcaggcatgtgtctttgtgagcccacagaattcttgtgtgtagaatatacgggtgcatgtccacatgaaaaa

SEQ ID NO: 53795 - DNA, 107 bp, Homo sapiens
ggactgggggggaggatcgcttgaaaccagcaggttgcggttacagtgagctgtgttgttcacaccactgcactctagcctgggccacagagtgagactctatcgtt

SEQ ID NO: 53796 - DNA, 434 bp, Homo sapiens
ggaggcttccagttgtggcaaatgccaaatgtaggagatttatgctaacacccagtaaagctgctgctgcctctgcagaggcccgctgagagcaggatatttatcgtcgtcaagagtgatgacttaggagtcacacagacctggattcaaatctcaactaggcacttaaaagctgtgtgacctcagggaaatcacttaatgtctctgagtctcagctttgccttctctaaagcaaagataatgcactaggtgacacctgagtcccttctaggtcctagagtctatagggaggaatcttctcttttccttctcaaacaggcttcagaaaacaaagctgttaggataattaaatgttaagaaaatagctgcccacctccaaggactcttcacttctgctagaaagacatcaaatgctcttctttgctagactaaga

SEQ ID NO: 53797 - DNA, 321 bp, Homo sapiens
gagacattcctggttttcctcttaagtttttagttaaactttcttattcttccttatggtttcctcttcctctacctttcccttaaatctgcatctcaggtaattgattttaaaagtaccaagttatgacatggacacagagaggggaacaacacacaccagggcctcctgggggtggtgggggaagacgggaaggaacttaagagtatgggtcagtaggtgcagcaaaccaccatggcatatgtatacctgtgtaacaaacctgtatgttctgcacatgtatcccattattttttagaagaaataaaaaaataaaaaagt

SEQ ID NO: 53798 - DNA, 430 bp, Homo sapiens
tggagaaacagtgacctcgcctgtggaatgggagggatagggatgaggggtaaactgttcacagaccgctttagttgttgtggagcttggagcttagcaaggggctggtacaaaaacacaaatcaacgcaatgcaataaattgtgaaagaattgtcttctaggagggacctctgttctcctgcaaatggcagatgagaggagtcacaggttttctctcctcttaattattcagatcttggcacctgaggagcagaccagctggggttaggaatccaaagcagggcaggatccgtccacacactcgtgtgtttatttatttatgcagctccagcaaagaaaattaaaaacagggctggcccctggctgggagatggagcctgacactgcatatgcgtctgtgagactcagtctggtcccggatgcccgact

SEQ ID NO: 53799 - DNA, 2817 bp, Homo sapiens
  misc_feature (286)..(287): n is a, c, g, or t
ggctccgacttggactccctgctccgctgctgccgcttcggccccgcacgcagccagccgccagccgcccgcccggcccagctcccgccgcggccccttgccgcggtccctctcctggtcccctcccggttggtccgggggtgcgcagggggcagggcgggcgcccaggggaagctcgagggacgcgcgcgcgaaggctcctttgtggacttcacggccgccaacatctgggcgcagcgcgggccaccgctggccgtctcgccgccgcgtcgccttggggacccgnnggggctcagccccaaggacggagacttcgattcgggaccagccccccgggatgcggtagcggccgctgtgcggaggccgcgaagcagctgcagccgccgccgcgcagatccacgctggctccgtgcgccatggtcacccacagcaagtttcccgccgccgggatgagccgccccctggacaccagcctgcgcctcaagaccttcagctccaagagcgagtaccagctggtggtgaacgcagtgcgcaagctgcaggagagcggcttctactggagcgcagtgaccggcggcgaggcgaacctgctgctcagtgccgagcccgccggcacctttctgatccgcgacagctcggaccagcgccacttcttcacgctcagcgtcaagacccagtctgggaccaagaacctgcgcatccagtgtgaggggggcagcttctctctgcagagcgatccccggagcacgcagcccgtgccccgcttcgactgcgtgctcaagctggtgcaccactacatgccgccccctggagccccctccttcccctcgccacctactgaaccctcctccgaggtgcccgagcagccgtctgcccagccactccctgggagtccccccagaagagcctattacatctactccgggggcgagaagatccccctggtgttgagccggcccctctcctccaacgtggccactcttcagcatctctgtcggaagaccgtcaacggccacctggactcctatgagaaagtcacccagctgccggggcccattcgggagttcctggaccagtacgatgccccgctttaaggggtaaagggcgcaaagggcatgggtcgggagaggggacgcaggcccctctcctccgtggcacatggcacaagcacaagaagccaaccaggagagagtcctgtagctctggggggaaagagggcggacaggcccctccctctgccctctccctgcagaatgtggcaggcggacctggaatgtgttggagggaagggggagtaccacctgagtctccagcttctccggaggagccagctgtcctggtgggacgatagcaaccacaagtggattctccttcaattcctcagcttcccctctgcctccaaacaggggacacttcgggaatgctgaactaatgagaactgccagggaatcttcaaactttccaacggaacttgtttgctctttgatttggtttaaacctgagctggttgtggagcctgggaaaggtggaagagagagaggtcctgagggccccagggctgcgggctggcgaaggaaatggtcacaccccccgcccaccccaggcgaggatcctggtgacatgctcctctccctggctccggggagaagggcttggggtgacctgaagggaaccatcctggtgccccacatcctctcctccgggacagtcaccgaaaacacaggttccaaagtctacctggtgcctgagagcccagggcccttcctccgttttaagggggaagcaacatttggaggggacggatgggctggtcagctggtctccttttcctactcatactataccttcctgtacctgggtggatggagcgggaggatggaggagacgggacatctttcacctcaggctcctggtagagaagacaggggattctactctgtgcctcctgactatgtctggctaagagattcgccttaaatgctccctgtcccatggagagggacccagcataggaaagccacatactcagcctggatgggtggagaggctgagggactcactggagggcaccaagccagcccacagccagggaagtggggagggggggcggaaacccatgcctcccagctgagcactgggaatgtcagcccagtaagtattggccagtcaggcgcctcgtggtcagagcagagccaccaggtcccactgccccgagccctgcacagccctccctcctgcctgggtgggggaggctggaggtcattggagaggctggactgctgccaccccgggtgctcccgctctgccatagcactgatcagtgacaatttacaggaatgtagcagcgatggaattacctggaacagttttttgtttttgtttttgtttttgtttttgtgggggggggcaactaaacaaacacaaagtattctgtgtcaggtattgggctggacagggcagttgtgtgttggggtggtttttttctctatttttttgtttgtttcttgttttttaataatgtttacaatctgcctcaatcactctgtcttttataaagattccacctccagtcctctctcctcccccctactcaggcccttgaggctattaggagatgcttgaagaactcaacaaaatcccaatccaagtcaaactttgcacatatttatatttatattcagaaaagaaacatttcagtaatttataataaagagcactattttttaatgaaaacacaacttaattatgagtaacttaatactcgatacacaacctctaggctaaggttttcattaacctgaatttgaattctgcccg

SEQ ID NO: 53800 - DNA, 2205 bp, Homo sapiens
  misc_feature (286)..(287): n is a, c, g, or t
ggctccgacttggactccctgctccgctgctgccgcttcggccccgcacgcagccagccgccagccgcccgcccggcccagctcccgccgcggccccttgccgcggtccctctcctggtcccctcccggttggtccgggggtgcgcagggggcagggcgggcgcccaggggaagctcgagggacgcgcgcgcgaaggctcctttgtggacttcacggccgccaacatctgggcgcagcgcgggccaccgctggccgtctcgccgccgcgtcgccttggggacccgnnggggctcagccccaaggacggagacttcgattcgggaccagccccccgggatgcggtagcggccgctgtgcggaggccgcgaagcagctgcagccgccgccgcgcagatccacgctggctccgtgcgccatggtcacccacagcaagtttcccgccgccgggatgagccgccccctggacaccagcctgcgcctcaagaccttcagctccaagagcgagtaccagctggtggtgaacgcagtgcgcaagctgcaggagagcggcttctactggagcgcagtgaccggcggcgaggcgaacctgctgctcagtgccgagcccgccggcacctttctgatccgcgacagctcggaccagcgccacttcttcacgctcagcgtcaagacccagtctgggaccaagaacctgcgcatccagtgtgaggggggcagcttctctctgcagagcgatccccggagcacgcagcccgtgccccgcttcgactgcgtgctcaagctggtgcaccactacatgccgccccctggagccccctccttcccctcgccacctactgaaccctcctccgaggtgcccgagcagccgtctgcccagccactccctgggagtccccccagaagagcctattacatctactccgggggcgagaagatccccctggtgttgagccggcccctctcctccaacgtggccactcttcagcatctctgtcggaagaccgtcaacggccacctggactcctatgagaaagtcacccagctgccggggcccattcgggagttcctggaccagtacgatgccccgctttaaggggtaaagggcgcaaagggcatgggtcgggagaggggacgcaggcccctctcctccgtggcacatggcacaagcacaagaagccaaccaggagagagtcctgtagctctggggggaaagagggcggacaggcccctccctctgccctctccctgcagaatgtggcaggcggacctggaatgtgttggagggaagggggagtaccacctgagtctccagcttctccggaggagccagctgtcctggtgggacgatagcaaccacaagtggattctccttcaattcctcagcttcccctctgcctccaaacaggggacacttcgggaatgctgaactaatgagaactgccagggaatcttcaaactttccaacggaacttgtttgctctttgatttggtttaaacctgagctggttgtggagcctgggaaaggtggaagagagagaggtcctgagggccccagggctgcgggctggcgaaggaaatggtcacaccccccgcccaccccaggcgaggatcctggtgacatgctcctctccctggctccggggagaagggcttggggtgacctgaagggaaccatcctggtgccccacatcctctcctccgggacagtcaccgaaaacacaggttccaaagtctacctggtgcctgagagcccagggcccttcctccgttttaagggggaagcaacatttggaggtgacaatttacaggaatgtagcagcgatggaattacctggaacagttttttgtttttgtttttgtttttgtttttgtgggggggggcaactaaacaaacacaaagtattctgtgtcaggtattgggctggacagggcagttgtgtgttggggtggtttttttctctatttttttgtttgtttcttgttttttaataatgtttacaatctgcctcaatcactctgtcttttataaagattccacctccagtcctctctcctcccccctactcaggcccttgaggctattaggagatgcttgaagaactcaacaaaatcccaatccaagtcaaactttgcacatatttatatttatattcagaaaagaaacatttcagtaatttataataaagagcactattttttaatga

SEQ ID NO: 53801 - DNA, 2879 bp, Homo sapiens
gcagggaggtgacgaggtaggggcagagcggatggaagccggagatcccaggttcccggaatactccggctggggccttcgggcttctcctgtcccctccctacccccgtgcctcgggtttctccctccgtccacaccgcccggggctactggactgagcggcgcccaggcagtcccgggggcccttctcctgctccccacccggccacactcctggagacctaacttccgcgcgcgagtttcccacgctgcgcccttgcagtgcgcgcctgggaaggggctgcccggggccaccctgccggcaggggcgggagccgtgcgggctccgtgaggcgcctggatcggagcgcgggcccaggagagggcccccggggcagtgggtgccccagtcgctcggcgaaggcaggggagccggggcgggccgggcgcgctggagggttccgggcactcaacgcgctcgcgccttcctctccgcagccccccgggatgcggtagcggccgctgtgcggaggccgcgaagcagctgcagccgccgccgcgcagatccacgctggctccgtgcgccatggtcacccacagcaagtttcccgccgccgggatgagccgccccctggacaccagcctgcgcctcaagaccttcagctccaagagcgagtaccagctggtggtgaacgcagtgcgcaagctgcaggagagcggcttctactggagcgcagtgaccggcggcgaggcgaacctgctgctcagtgccgagcccgccggcacctttctgatccgcgacagctcggaccagcgccacttcttcacgctcagcgtcaagacccagtctgggaccaagaacctgcgcatccagtgtgaggggggcagcttctctctgcagagcgatccccggagcacgcagcccgtgccccgcttcgactgcgtgctcaagctggtgcaccactacatgccgccccctggagccccctccttcccctcgccacctactgaaccctcctccgaggtgcccgagcagccgtctgcccagccactccctgggagtccccccagaagagcctattacatctactccgggggcgagaagatccccctggtgttgagccggcccctctcctccaacgtggccactcttcagcatctctgtcggaagaccgtcaacggccacctggactcctatgagaaagtcacccagctgccggggcccattcgggagttcctggaccagtacgatgccccgctttaaggggtaaagggcgcaaagggcatgggtcgggagaggggacgcaggcccctctcctccgtggcacatggcacaagcacaagaagccaaccaggagagagtcctgtagctctggggggaaagagggcggacaggcccctccctctgccctctccctgcagaatgtggcaggcggacctggaatgtgttggagggaagggggagtaccacctgagtctccagcttctccggaggagccagctgtcctggtgggacgatagcaaccacaagtggattctccttcaattcctcagcttcccctctgcctccaaacaggggacacttcgggaatgctgaactaatgagaactgccagggaatcttcaaactttccaacggaacttgtttgctctttgatttggtttaaacctgagctggttgtggagcctgggaaaggtggaagagagagaggtcctgagggccccagggctgcgggctggcgaaggaaatggtcacaccccccgcccaccccaggcgaggatcctggtgacatgctcctctccctggctccggggagaagggcttggggtgacctgaagggaaccatcctggtgccccacatcctctcctccgggacagtcaccgaaaacacaggttccaaagtctacctggtgcctgagagcccagggcccttcctccgttttaagggggaagcaacatttggaggggacggatgggctggtcagctggtctccttttcctactcatactataccttcctgtacctgggtggatggagcgggaggatggaggagacgggacatctttcacctcaggctcctggtagagaagacaggggattctactctgtgcctcctgactatgtctggctaagagattcgccttaaatgctccctgtcccatggagagggacccagcataggaaagccacatactcagcctggatgggtggagaggctgagggactcactggagggcaccaagccagcccacagccagggaagtggggagggggggcggaaacccatgcctcccagctgagcactgggaatgtcagcccagtaagtattggccagtcaggcgcctcgtggtcagagcagagccaccaggtcccactgccccgagccctgcacagccctccctcctgcctgggtgggggaggctggaggtcattggagaggctggactgctgccaccccgggtgctcccgctctgccatagcactgatcagtgacaatttacaggaatgtagcagcgatggaattacctggaacagttttttgtttttgtttttgtttttgtttttgtgggggggggcaactaaacaaacacaaagtattctgtgtcaggtattgggctggacagggcagttgtgtgttggggtggtttttttctctatttttttgtttgtttcttgttttttaataatgtttacaatctgcctcaatcactctgtcttttataaagattccacctccagtcctctctcctcccccctactcaggcccttgaggctattaggagatgcttgaagaactcaacaaaatcccaatccaagtcaaactttgcacatatttatatttatattcagaaaagaaacatttcagtaatttataataaagagcactattttttaatga

SEQ ID NO: 53802 - DNA, 2849 bp, Homo sapiens
gcagggaggtgacgaggtaggggcagagcggatggaagccggagatcccaggttcccggaatactccggctggggccttcgggcttctcctgtcccctccctacccccgtgcctcgggtttctccctccgtccacaccgcccggggctactggactgagcggcgcccaggcagtcccgggggcccttctcctgctccccacccggccacactcctggagacctaacttccgcgcgcgagtttcccacgctgcgcccttgcagtgcgcgcctgggaaggggctgcccggggccaccctgccggcaggggcgggagccgtgcgggctccgtgaggcgcctggatcggagcgcgggcccaggagagggcccccggggcagtgggtgccccagtcgctcggcgaaggcaggggagccggggcgggccgggcgcgctggagggttccgggcactcaacgcgctcgcgccttcctctccgcagccccccgggatgcggtagcggccgctgtgcggaggccgcgaagcagctgcagccgccgccgcgcagatccacgctggctccgtgcgccatggtcacccacagcaagtttcccgccgccgggatgagccgccccctggacaccagcctgcgcctcaagaccttcagctccaagagcgagtaccagctggtggtgaacgcagtgcgcaagctgcaggagagcggcttctactggagcgcagtgaccggcggcgaggcgaacctgctgctcagtgccgagcccgccggcacctttctgatccgcgacagctcggaccagcgccacttcttcacgctcagcgtcaagacccagtctgggaccaagaacctgcgcatccagtgtgaggggggcagcttctctctgcagagcgatccccggagcacgcagcccgtgccccgcttcgactgcgtgctcaagctggtgcaccactacacgccacctactgaaccctcctccgaggtgcccgagcagccgtctgcccagccactccctgggagtccccccagaagagcctattacatctactccgggggcgagaagatccccctggtgttgagccggcccctctcctccaacgtggccactcttcagcatctctgtcggaagaccgtcaacggccacctggactcctatgagaaagtcacccagctgccggggcccattcgggagttcctggaccagtacgatgccccgctttaaggggtaaagggcgcaaagggcatgggtcgggagaggggacgcaggcccctctcctccgtggcacatggcacaagcacaagaagccaaccaggagagagtcctgtagctctggggggaaagagggcggacaggcccctccctctgccctctccctgcagaatgtggcaggcggacctggaatgtgttggagggaagggggagtaccacctgagtctccagcttctccggaggagccagctgtcctggtgggacgatagcaaccacaagtggattctccttcaattcctcagcttcccctctgcctccaaacaggggacacttcgggaatgctgaactaatgagaactgccagggaatcttcaaactttccaacggaacttgtttgctctttgatttggtttaaacctgagctggttgtggagcctgggaaaggtggaagagagagaggtcctgagggccccagggctgcgggctggcgaaggaaatggtcacaccccccgcccaccccaggcgaggatcctggtgacatgctcctctccctggctccggggagaagggcttggggtgacctgaagggaaccatcctggtgccccacatcctctcctccgggacagtcaccgaaaacacaggttccaaagtctacctggtgcctgagagcccagggcccttcctccgttttaagggggaagcaacatttggaggggacggatgggctggtcagctggtctccttttcctactcatactataccttcctgtacctgggtggatggagcgggaggatggaggagacgggacatctttcacctcaggctcctggtagagaagacaggggattctactctgtgcctcctgactatgtctggctaagagattcgccttaaatgctccctgtcccatggagagggacccagcataggaaagccacatactcagcctggatgggtggagaggctgagggactcactggagggcaccaagccagcccacagccagggaagtggggagggggggcggaaacccatgcctcccagctgagcactgggaatgtcagcccagtaagtattggccagtcaggcgcctcgtggtcagagcagagccaccaggtcccactgccccgagccctgcacagccctccctcctgcctgggtgggggaggctggaggtcattggagaggctggactgctgccaccccgggtgctcccgctctgccatagcactgatcagtgacaatttacaggaatgtagcagcgatggaattacctggaacagttttttgtttttgtttttgtttttgtttttgtgggggggggcaactaaacaaacacaaagtattctgtgtcaggtattgggctggacagggcagttgtgtgttggggtggtttttttctctatttttttgtttgtttcttgttttttaataatgtttacaatctgcctcaatcactctgtcttttataaagattccacctccagtcctctctcctcccccctactcaggcccttgaggctattaggagatgcttgaagaactcaacaaaatcccaatccaagtcaaactttgcacatatttatatttatattcagaaaagaaacatttcagtaatttataataaagagcactattttttaatga

SEQ ID NO: 53803 - DNA, 2730 bp, Homo sapiens
  misc_feature (286)..(287): n is a, c, g, or t
ggctccgacttggactccctgctccgctgctgccgcttcggccccgcacgcagccagccgccagccgcccgcccggcccagctcccgccgcggccccttgccgcggtccctctcctggtcccctcccggttggtccgggggtgcgcagggggcagggcgggcgcccaggggaagctcgagggacgcgcgcgcgaaggctcctttgtggacttcacggccgccaacatctgggcgcagcgcgggccaccgctggccgtctcgccgccgcgtcgccttggggacccgnnggggctcagccccaaggacggagacttcgattcgggaccagccccccgggatgcggtagcggccgctgtgcggaggccgcgaagcagctgcagccgccgccgcgcagatccacgctggctccgtgcgccatggtcacccacagcaagtttcccgccgccgggatgagccgccccctggacaccagcctgcgcctcaagaccttcagctccaagagcgagtaccagctggtggtgaacgcagtgcgcaagctgcaggagagcggcttctactggagcgcagtgaccggcggcgaggcgaacctgctgctcagtgccgagcccgccggcacctttctgatccgcgacagctcggaccagcgccacttcttcacgctcagcgtcaagacccagtctgggaccaagaacctgcgcatccagtgtgaggggggcagcttctctctgcagagcgatccccggagcacgcagcccgtgccccgcttcgactgcgtgctcaagctggtgcaccactacatgccgccccctggagccccctccttcccctcgccacctactgaaccctcctccgaggtgcccgagcagccgtctgcccagccactccctgggagtccccccagaagagcctattacatctactccgggggcgagaagatccccctggtgttgagccggcccctctcctccaacgtggccactcttcagcatctctgtcggaagaccgtcaacggccacctggactcctatgagaaagtcacccagctgccggggcccattcgggagttcctggaccagtacgatgccccgctttaaggggtaaagggcgcaaagggcatgggtcgggagaggggacgcaggcccctctcctccgtggcacatggcacaagcacaagaagccaaccaggagagagtcctgtagctctggggggaaagagggcggacaggcccctccctctgccctctccctgcagaatgtggcaggcggacctggaatgtgttggagggaagggggagtaccacctgagtctccagcttctccggaggagccagctgtcctggtgggacgatagcaaccacaagtggattctccttcaattcctcagcttcccctctgcctccaaacaggggacacttcgggaatgctgaactaatgagaactgccagggaatcttcaaactttccaacggaacttgtttgctctttgatttggtttaaacctgagctggttgtggagcctgggaaaggtggaagagagagaggtcctgagggccccagggctgcgggctggcgaaggaaatggtcacaccccccgcccaccccaggcgaggatcctggtgacatgctcctctccctggctccggggagaagggcttggggtgacctgaagggaaccatcctggtgccccacatcctctcctccgggacagtcaccgaaaacacaggttccaaagtctacctggtgcctgagagcccagggcccttcctccgttttaagggggaagcaacatttggaggggacggatgggctggtcagctggtctccttttcctactcatactataccttcctgtacctgggtggatggagcgggaggatggaggagacgggacatctttcacctcaggctcctggtagagaagacaggggattctactctgtgcctcctgactatgtctggctaagagattcgccttaaatgctccctgtcccatggagagggacccagcataggaaagccacatactcagcctggatgggtggagaggctgagggactcactggagggcaccaagccagcccacagccagggaagtggggagggggggcggaaacccatgcctcccagctgagcactgggaatgtcagcccagtaagtattggccagtcaggcgcctcgtggtcagagcagagccaccaggtcccactgccccgagccctgcacagccctccctcctgcctgggtgggggaggctggaggtcattggagaggctggactgctgccaccccgggtgctcccgctctgccatagcactgatcagtgacaatttacaggaatgtagcagcgatggaattacctggaacagttttttgtttttgtttttgtttttgtttttgtgggggggggcaactaaacaaacacaaagtattctgtgtcaggtattgggctggacagggcagttgtgtgttggggtggtttttttctctatttttttgtttgtttcttgttttttaataatgtttacaatctgcctcaatcactctgtcttttataaagattccacctccagtcctctctcctcccccctactcaggcccttgaggctattaggagatgcttgaagaactcaacaaaatcccaatccaagtcaaactttgcacatatttatatttatattcagaaaagaaacatttcagtaatttataataaagagcactattttttaatga

SEQ ID NO: 53804 - DNA, 2530 bp, Homo sapiens
  misc_feature (286)..(287): n is a, c, g, or t
ggctccgacttggactccctgctccgctgctgccgcttcggccccgcacgcagccagccgccagccgcccgcccggcccagctcccgccgcggccccttgccgcggtccctctcctggtcccctcccggttggtccgggggtgcgcagggggcagggcgggcgcccaggggaagctcgagggacgcgcgcgcgaaggctcctttgtggacttcacggccgccaacatctgggcgcagcgcgggccaccgctggccgtctcgccgccgcgtcgccttggggacccgnnggggctcagccccaaggacggagacttcgattcgggaccagccccccgggatgcggtagcggccgctgtgcggaggccgcgaagcagctgcagccgccgccgcgcagatccacgctggctccgtgcgccatggtcacccacagcaagtttcccgccgccgggatgagccgccccctggacaccagcctgcgcctcaagaccttcagctccaagagcgagtaccagctggtggtgaacgcagtgcgcaagctgcaggagagcggcttctactggagcgcagtgaccggcggcgaggcgaacctgctgctcagtgccgagcccgccggcacctttctgatccgcgacagctcggaccagcgccacttcttcacgctcagcgtcaagacccagtctgggaccaagaacctgcgcatccagtgtgaggggggcagcttctctctgcagagcgatccccggagcacgcagcccgtgccccgcttcgactgcgtgctcaagctggtgcaccactacatgccgccccctggagccccctccttcccctcgccacctactgaaccctcctccgaggtgcccgagcagccgtctgcccagccactccctgggagtccccccagaagagcctattacatctactccgggggcgagaagatccccctggtgttgagccggcccctctcctccaacgtggccactcttcagcatctctgtcggaagaccgtcaacggccacctggactcctatgagaaagtcacccagctgccggggcccattcgggagttcctggaccagtacgatgccccgctttaaggggtaaagggcgcaaagggcatgggtcgggagaggggacgcaggcccctctcctccgtggcacatggcacaagcacaagaagccaaccaggagagagtcctgtagctctggggggaaagagggcggacaggcccctccctctgccctctccctgcagaatgtggcaggcggacctggaatgtgttggagggaagggggagtaccacctgagtctccagcttctccggaggagccagctgtcctggtgggacgatagcaaccacaagtggattctccttcaattcctcagcttcccctctgcctccaaacaggggacacttcgggaatgctgaactaatgagaactgccagggaatcttcaaactttccaacggaacttgtttgctctttgatttggtttaaacctgagctggttgtggagcctgggaaaggtggaagagagagaggtcctgagggccccagggctgcgggctggcgaaggaaatggtcacaccccccgcccaccccaggcgaggatcctggtgacatgctcctctccctggctccggggagaagggcttggggtgacctgaagggaaccatcctggtgccccacatcctctcctccgggacagtcaccgaaaacacaggttccaaagtctacctggtgcctgagagcccagggcccttcctccgttttaagggggaagcaacatttggaggggacggatgggctggtcagctggtctccttttcctactcatactataccttcctgtacctgggtggatggagcgggaggatggaggagacgggacatctttcacctcaggctcctggtagagaagacaggggattctactctgtgcctcctgactatgtctggctaagagattcgccttaaatgctccctgtcccatggagagggacccagcataggaaagccacatactcagcctggatgggtggagaggctgagggactcactggagggcaccaagccagcccacagccagggaagtggggagggggggcggaaacccatgcctcccagctgagcactgggaatgtcagcccagtaagtattggccagtcaggcgcctcgtggtcagagcagagccaccaggtcccactgccccgagccctgcacagccctccctcctgcctgggtgggggaggctggaggtcattggagaggctggactgctgccaccccgggtgctcccgctctgccatagcactgatcagtgacaatttacaggaatgtagcagcgatggaattacctggaacacgcttttgcccttgcactcgcccccggctatgtggcccgcgccaaccttcccccactccccgtattcttgctcagcactggcctcgcccgggcttacctgctctgcgtgctcacctctctgccccttggccccctctcggtccccccccctccgctctctgccct

SEQ ID NO: 53805 - DNA, 367 bp, Homo sapiens
  misc_feature (75)..(75): n is a, c, g, or t
ttctgtaaagacagtctcatcctgttgcccaggccggtctccaattcctgggctcaagtgatccccctacctcantctcccaaagcaccgcacaaaaaaacccacaactccctagattcgggaaaaaggagtaaattaagttggaaagccagaaaaccacgccttgctaagtcggggggatatggcacaggttaacaaacgcctcctaccaaactaaggttccactaaaggtctgggaataagggcaaagagatgtatagccttatcgcgaccgcaagggtggggccttgcagtgggaaacaaaatagaaggcaagctatcccgagaggtttaagggggctgaggactcggctctcgggagatcgcc

SEQ ID NO: 53806 - DNA, 319 bp, Homo sapiens
tagttctgactgcccagaaggttgaaactttgttaaatgaaattgagaacctgctctatactacccactctgctaaggaccaggatataggaatacatcagttggccgggcgtggtggctcatgcctgtaatcccagcactttgggaggctgaggcaggcagatcacgaggtcaggagatcgagaccatcctggctaacattgtgaaacctcgtctctactaaaaatacaaaacattagccggacgtcgtggtgggcgcctgtagttccagctactcaggaggctgaggcaggagaatggtgtgaacccgggaggcgga

SEQ ID NO: 53807 - DNA, 2512 bp, Homo sapiens
  misc_feature (1475)..(1475): n is a, c, g, or t
  misc_feature (1946)..(1946): n is a, c, g, or t
  misc_feature (2451)..(2451): n is a, c, g, or t
tgagatgggggttcccactctgttgccctggctggagtgcagtggcgctgatcacggctcactgcagcctcgtctgcccaagctctagagattctcctacctcagtctcctgagtagctgggaccacaggcatgcaccaccatgtccagctaattggttaactttttctttgcagaaatggggtcttactgtgttgcctaagctgatctcaaactcctaacctcaagtgatcctcccaccttggccctgcaaaattctgggattacaaacatgagccattgtgcccagctgagggctggtttctagaaatggtggtatgccaggcttcatactggggtcatgcatgtggactgggctcattggcctgattgctctagcaatatgtggggtagggagaatcatgccccctctctcctcctcttcgaaaaatgtccacatcccaatccctggaagctgtgaatatgttcagttatatggcagttgggaattaaggttgcgagtcagctgtccttgagatggggagattatcctggactatccaggtgggacttttgtaatcgcaaaggtcctcggaagtgaagaaggaagtcaggagagtcagtgtcagagtgatgccgtgggacacagtcttcagggctgttgctgccttgaagatgcaggaaggggccgtgagccaaggaatgcaggtggcctctagaagctggaaaaggcaagaaaatggattctccttgagagcctccagcagaaatgaggccctgccaacaccttgacttgtagcccagtgagacccaaacatctaacatctaaaactataaataagaatttgtgttgttttaagtcaccacgtacatagtcatttgttacagcaagctatagcaaacaatccaaatggagacctgtctctggtttggaaatgcgagacattcttatttatttgtggaatataatataatggaaaatttatggaatataagtaactccaagaagattcttgtcaacattaattctgagatttttctaagctaatttattttactacagtaaggccaggaactttattgctttgctgttgtctcctcactgcctcgatcagtgcctaattcattcctttttgaatgaatgaatcttttctaaccaaactcatgaaaaaccctaagaaacaccccccactttttttgagacagaatctcattttgtcacccaggctggagtgcagtggatcacagctcactgcagcctcaacctcccaagttcaagtgatcctccccacttggcttcccaagtagctgggaccacaggtgcacaccaccacgtctggctaattttttaatttttttttgtagaaatcaggtcttgctatgttgcctagactggtctcaaactcctgggctcaagtgaacctcccgccttggccttccaaaatgctctcattacaggtgtgatccactgtgcttggccccaccttttcaaaaaanaatttatgctaaattgtaaatgttaaattgaggctcttgttatagacaaggcatatcatacttcgcattatcattcaaagatgagaggcttaattagagaattttctacagttgggttttaacaagagccattcttaacttccttggggtctaagaacttcttggtacctacacatggttgaaatgttaaccctgtactttgctgcttagcaagactgctgtaatgctgatatggtttggctctgtgcccccacccaaatctcatctcgaaattgtaatccccacacatcgagggagggacctgatgggagatgattggatcatggaggcggtttcccccatgctgttctcgtgatagtgagttctcgcgatagtgagttctcgcaagatctgatggtttaaaagtgtttggcagttcccccctagctctctctctctctctctctctctcccccctaatgccatgtaagncgtgccttgcttcccctttgccttccgccatgattttaagtttcctggggcctcccacactatgcagaactgtgagtcaattaaccctcttttcttataaagaactacctgagactgggtaattcataaagaaaataggcttaattggctgatggatcttcaggtcatataggaagcatggttgcagaggcctcaggaaacttacaatcatggcagaaggtgaatgggaagcagacacagcctgcatggctgaagcaggaggaagagagagaagggggaggtgctacacacttttaaacaaccagatctcatgagaactcaccatcacaagaacagcaagggggaagtttgcccccacgatccaatcacttcccaccaggcctgtcctccaacattgggggttataattcaacatgagattggggcaagaacacaaatccaaaccatatcaggctgggcacagggactcatgcctgtaatcctggcactttgggaggccaaagcngaggattgtttgagtccaggagtttgagaccagcttggtcaacatagcgagaacgactcag

SEQ ID NO: 53808 - DNA, 967 bp, Homo sapiens
  misc_feature (906)..(906): n is a, c, g, or t
ctcagcttcaaaacgtattacaaaactacagtaattaagatagtgtggtactggtattctattctattctatagaatagaattgagtctagaaataaactcatacattatttgtggtcaattaattttcagtaaatcagtggaaacaatacaaaacaatgccaaaacaattcaatggggaaaaataatctcttcaacaaattgtactggggaaactgtatatccatctgccaaagaaaagctggactcctacctcatatcataaacaaaaattaactcaaaattaataagaggcttaaaggtaagccttaaaactctcagaaaaagcatagatacaaatttaatggccttggattggatttttttaagatatgataccaaaaggacaagtgacaaaataaaaatagataaatgtatcaaaattagaaaactttgtgcagcaaaggacaatatcaagaaagtgaaaagggctatgcattagtccattctcgcattgctataaagaactacctgagactgggtaattcataaagaaaataggcttaattggctgatggatcttcaggtcatataggaagcatggttgcagaggcctcaggaaacttacaatcatggcagaaggtgaatgggaagcagacacagcctgcatggctgaagcaggaggaagagagagaagggggaggtgctacacacttttaaacaaccagatctcatgagaactcaccatcacaagaacagcaagggggaagtttgcccccacgatccaatcacttcccaccaggcctgtcctccaacattgggggttataattcaacatgagattggggcaagaacacaaatccaaaccatatcaggctgggcacagggactcatgcctgtaatcctggcactttgggaggccaaagcngaggattgtttgagtccaggagtttgagaccagcttggtcaacatagcgagaacgactcag

SEQ ID NO: 53809 - DNA, 638 bp, Homo sapiens
  misc_feature (1)..(3): n is a, c, g, or t
  misc_feature (5)..(5): n is a, c, g, or t
  misc_feature (8)..(8): n is a, c, g, or t
nnntnttnttcttactatataaacttaaattgttttttattaaatctaggtgtaaagactttatgcaaagctcttatacaaccataaatttaaatgcaaatacaactacaaaccagtaacacctcttatattaacaatgttaatttaaccaattctttttatgtgacatttttgcagactttccccaaaacagatctactgcttgacagtgaatctcagggaagtggagttttccttcctgaactggatgagcctgagtactgcaatgctcagaacactgctctgtgggaactgcatgctctgcgggtaagagtggccctggtttttttctttttggggatgtttgtgaataattgttttccagtttttcttcaaatagttgttattgccagagtacttaattatattttgttctggggctgccttttttagaattcctgtgttagtatgctacattttactttgctgttactattctttaagctgttgaggtacattttctaaggaagcagaaaacagtgtcagttctgtagggtgcagttgtggaagatttactgaaacctttccctttattgaaatctttccctaacactcttcagaggatttgttatcaggtacatttctgttgagtcttatcc

SEQ ID NO: 53810 - DNA, 522 bp, Homo sapiens
attgctgggcgtctggacatctgtagctgtcgtttggtttgatcttgttgactatgaggaagttctaggaaaactaggaatctatgatgctgatggtgatggagattttgatgtggatgatgccaaagttttattaggacttaaagagagatctacttcagagccagcagtcccgccagaagaggctgagcccctcacagaagcagaaaaatctactaagacccgaaaagaaacccagaagttaagagaatttgaagaaggcctggttagccaatacaagttttatttggaaaatctggaacaaatggttaaagattggaagcagaggaagctgaagaaaagtaatgtagtttccttaaaggcatacaaaggactggcagaagtcgctgtgaagagcttgtgtgagctgttggtggcactacctcattttaactttcacaacaacatcatcgtattgattgtccctctcatgaatgacatgtcaaaattggtgagttgctgtaaatggttattgctgtcctc

SEQ ID NO: 53811 - DNA, 3581 bp, Homo sapiens
ttttcccctgcagtgagcctgttcatgcgaagaaacggaagcatgaacgcattatagataaatatgaaaaaataccaagaactctgcaaactgcaccagagaaggaactgattcatttacttcctatcaaagataaaagtggtataatcccacagactagggagaagccagttactgatagtaacaaagatgaagaggatcaagaagaagagagggaacttgaggaagagatcattgaagatcctattcaagagctgaccatagaagaacatttgattgagagaaagaagaaattacaggagaagaagatgcatattgcagccttggcatctgccatattatcagatccagaaaataatattaaaaaattgaaagaattacgttctatgttgatggaacaagatcctgatgtggctgttactgttcgaaagctggtaattgtttctctgatggagttatttaaagatattactccttcatataaaatccggcccctcacagaagcagaaaaatctactaagacccgaaaagaaacccagaagttaagagaatttgaagaaggcctggttagccaatacaagttttatttggaaaatctggaacaaatggttaaagattggaagcagaggaagctgaagaaaagtaatgtagtttccttaaaggcatacaaaggactggcagaagtcgctgtgaagagcttgtgtgagctgttggtggcactacctcattttaactttcacaacaacatcatcgtattgattgtccctctcatgaatgacatgtcaaaattgatatctgaaatgtgttgtgaagctgtgaagaaactctttaagcaagataaattaggccaagcttctcttggtgtaattaaagtgatttctggttttgtgaagggcagaaattacgaagttaggccagagatgttaaaaacatttttatgcctaagaatcaaggaagtagaagtgaaaaaagatacagaagacattaataaaccaaaaaaatttatgactttcaaagaaaagagaaaatctctatcaagaatgcagagaaagtggaagaaagcagaagagaaactagcgcgagagcttcgagaggcagaagcttcagagagtactgagaaaaaacttaaactgcacacagagactctgaatattgtgtttgtaacctacttcagaatattgaagaaggcccagaggtcacctctcctgccagcagttctagaaggtcttgccaagtttgctcaccttataaatgtggaattttttgatgatctgttagtagttcttcatactctcattgagtctggtgacctaagctatcaagaaagtcttcactgtgtccagactgcttttcatattctttctggacaaggtgatgttctgaatattgatccattgaaattctacacacatctctacaaaacactgttcaaattacatgcaggtgctaccaatgaaggtgttgagattgtactccagtgccttgatgtcatgctaactaagcgcagaaagcaagtttctcagcagcgagctcttgccttcatcaaacgcctttgtacccttgctcttcatgttcttccaaattcaagtattggcattttagcaactaccagaatattaatgcatactttccccaaaacagatctactgcttgacagtgaatctcagggaagtggagttttccttcctgaactggatgagcctgagtactgcaatgctcagaacactgctctgtgggaactgcatgctctgcggaggcattatcatcccatagtgcagagatttgcagcccacctgatcgctggagcaccttctgaaggctctggagcactcaaaccagagttgagtcgaagatctgctactgaactttttgaggcatatagcatggcagaaatgacattcaatcctcctgttgaatcttcaaaccccaaaataaagggtaaatttttacaaggggattcatttttgaatgaagatttaaatcagctaatcaaaagatactccagtgaagttgctactgaatcgcctctggatttcacgaaatatttgaaaacatcactacactagtagaggaatgaagtcagtggactttcttgtatatttgtgtgtgcagatgtacataaagatgagttgttaacttaggatcttttctttttatacaaggaaagcttcctaagaatgtctaggaagaagaggaagaatgaccctttgcatggcacagggttctgcccctattctgaatatgtcattccatcaaggagatcaaaagcctttttttctccccagtatttggaaattactttcttgatgatgctgccttttaaaagcttcacgtacattatagttttttaaaaaaatctttggactggatcttactgaagtgcagttgctatattaaaattagggcatagagcacagaaaaatcaagaccatgagaagacattttaccatttagctactttttataactaaatactctttaaatatttttatttcaatactgtggatggaaatgagaagcattctaaatttgagttaatatatttttatgaagatatttgagaaaagaaaaaaatagcttgtattcaggttcattggcttttgctggatgatccacctaaagaagttacctaatttggccttttaaaaaaggtgttagtgtttattatagctactttcaaggaaagtttgaatatgattctagtctctaaagttcttcacgttttctgacattccctggagggtgactggggaagaattgctccagggtagaagaaccaggcccaagactttaccattctgatctagagacaaaggatactcaatgaggagcttttttcccctcttggaacaggtaaaatgctttttcttattaatataattataaaacagtattttatgtaacagctattcccatattctaggagtggcctaagaaatgcgtgtttcagtgactagattataaatattctctattgtgaatagttgaataaaacagctgtttttttctgcttcctattcttgtgatatgataattttttgaaaaaagcacagcagtccaactaaagagatctcttactgtttgaaagtcatagcagccagttattttactctggagcttagagttcttttttcacatgaagtaaacgaaagtagaaaattcctttaccattccagcagagtgagaggatatgagcttaacagtgtatgtcagtcttttagcatattatatatgatttttaaaagtggttctgaggtcacattttttaaggcttgattatttaatgagaaaggtatgattcagcatatgaatatttgcttttagtccaccttttaggtataaaacaaagtccaggaatgtgataaatatttgtgtggataacgggcgccctctggtgttaccacctcgagacttgtctcatgcctccatgcttgccgatggaggacagactgcaggaacttggcccatgtgggaacctagcctgttttggggggtaggacccacagatgtcttggacagttttggggggagggttttttaattttttaaaaattttgcctccctttgtgaaaggggatggg

SEQ ID NO: 53812 - DNA, 3011 bp, Homo sapiens
ttttcccctgcagtgagcctgttcatgcgaagaaacggaagcatgaacgcattatagataaatatgaaaaaataccaagaactctgcaaactgcaccagagaaggaactgattcatttacttcctatcaaagataaaagtggtataatcccacagactagggagaagccagttactgatagtaacaaagatgaagaggatcaagaagaagagagggaacttgaggaagagatcattgaagatcctattcaagagctgaccatagaagaacatttgattgagagaaagaagaaattacaggagaagaagatgcatattgcagccttggcatctgccatattatcagatccagaaaataatattaaaaaattgaaagaattacgttctatgttgatggaacaagatcctgatgtggctgttactgttcgaaagctggtaattgtttctctgatggagttatttaaagatattactccttcatataaaatccggcccctcacagaagcagaaaaatctactaagacccgaaaagaaacccagaagttaagagaatttgaagaaggcctggttagccaatacaagttttatttggaaaatctggaacaaatggttaaagattggaagcagaggaagctgaagaaaagtaatgtagtttccttaaaggcatacaaaggactggcagaagtcgctgtgaagagcttgtgtgagctgttggtggcactacctcattttaactttcacaacaacatcatcgtattgattgtccctctcatgaatgacatgtcaaaattgatatctgaaatgtgttgtgaagctgtgaagaaactctttaagcaagataaattaggccaagcttctcttggtgtaattaaagtgatttctggttttgtgaagggcagaaattacgaagttaggccagagatgttaaaaacatttttatgcctaagaatcaaggaagtagaagtgaaaaaagatacagaagacattaataaaccaaaaaaatttatgactttcaaagaaaagagaaaatctctatcaagaatgcagagaaagtggaagaaagcagaagagaaactagcgcgagagcttcgagaggcagaagcttcagagagtactgagaaaaaacttaaactgcacacagagactctgaatattgtgtttgtaacctacttcagaatattgaagaaggcccagaggtcacctctcctgccagcagttctagaaggtcttgccaagtttgctcaccttataaatgtggaattttttgatgatctgttagtagttcttcatactctcattgagtctggtgacctaagctatcaagaaagtcttcactgtgtccagactgcttttcatattctttctggacaaggtgatgttctgaatattgatccattgaaattctacacacatctctacaaaacactgttcaaattacatgcaggtgctaccaatgaaggtgttgagattgtactccagtgccttgatgtcatgctaactaagcgcagaaagcaagtttctcagcagcgagctcttgccttcatcaaacgcctttgtacccttgctcttcatgttcttccaaattcaagtattggcattttagcaactaccagaatattaatgcatactttccccaaaacagatctactgcttgacagtgaatctcagggaagtggagttttccttcctgaactggatgagcctgagtactgcaatgctcagaacactgctctgtgggaactgcatgctctgcggaggcattatcatcccatagtgcagagatttgcagcccacctgatcgctggagcaccttctgaaggctctggagcactcaaaccagagttgagtcgaagatctgctactgaactttttgaggcatatagcatggcagaaatgacattcaatcctcctgttgaatcttcaaaccccaaaataaagggtaaatttttacaaggggattcatttttgaatgaagatttaaatcagctaatcaaaagatactccagtgaagttgctactgaatcgcctctggatttcacgaaatatttgaaaacatcactacactagtagaggaatgaagtcagtggactttcttgtatatttgtgtgtgcagatgtacataaagatgagttgttaacttaggatcttttctttttatacaaggaaagcttcctaagaatgtctaggaagaagaggaagaatgaccctttgcatggcacagggttctgcccctattctgaatatgtcattccatcaaggagatcaaaagcctttttttctccccagtatttggaaattactttcttgatgatgctgccttttaaaagcttcacgtacattatagttttttaaaaaaatctttggactggatcttactgaagtgcagttgctatattaaaattagggcatagagcacagaaaaatcaagaccatgagaagacattttaccatttagctactttttataactaaatactctttaaatatttttatttcaatactgtggatggaaatgagaagcattctaaatttgagttaatatatttttatgaagatatttgagaaaagaaaaaaatagcttgtattcaggttcattggcttttgctggatgatccacctaaagaagttacctaatttggccttttaaaaaaggtgttagtgtttattatagctactttcaaggaaagtttgaatatgattctagtctctaaagttcttcacgttttctgacattccctggagggtgactggggaagaattgctccagggtagaagaaccaggcccaagactttaccattctgatctagagacaaaggatactcaatgaggagcttttttcccctcttggaacaggtaaaatgctttttcttattaatataattataaaacagtattttatgtaacagctattcccatattctaggagtggcctaagaaatgcgtgtttcagtgactagattataaatattctctattgtgaatagttgaataaaacagctgtttttttctgc

SEQ ID NO: 53813 - DNA, 2133 bp, Homo sapiens
  misc_feature (1)..(3): n is a, c, g, or t
  misc_feature (5)..(5): n is a, c, g, or t
  misc_feature (8)..(8): n is a, c, g, or t
nnntnttnttcttactatataaacttaaattgttttttattaaatctaggtgtaaagactttatgcaaagctcttatacaaccataaatttaaatgcaaatacaactacaaaccagtaacacctcttatattaacaatgttaatttaaccaattctttttatgtgacatttttgcagactttccccaaaacagatctactgcttgacagtgaatctcagggaagtggagttttccttcctgaactggatgagcctgagtactgcaatgctcagaacactgctctgtgggaactgcatgctctgcggaggcattatcatcccatagtgcagagatttgcagcccacctgatcgctggagcaccttctgaaggctctggagcactcaaaccagagttgagtcgaagatctgctactgaactttttgaggcatatagcatggcagaaatgacattcaatcctcctgttgaatcttcaaaccccaaaataaagggtaaatttttacaaggggattcatttttgaatgaagatttaaatcagctaatcaaaagatactccagtgaagttgctactgaatcgcctctggatttcacgaaatatttgaaaacatcactacactagtagaggaatgaagtcagtggactttcttgtatatttgtgtgtgcagatgtacataaagatgagttgttaacttaggatcttttctttttatacaaggaaagcttcctaagaatgtctaggaagaagaggaagaatgaccctttgcatggcacagggttctgcccctattctgaatatgtcattccatcaaggagatcaaaagcctttttttctccccagtatttggaaattactttcttgatgatgctgccttttaaaagcttcacgtacattatagttttttaaaaaaatctttggactggatcttactgaagtgcagttgctatattaaaattagggcatagagcacagaaaaatcaagaccatgagaagacattttaccatttagctactttttataactaaatactctttaaatatttttatttcaatactgtggatggaaatgagaagcattctaaatttgagttaatatatttttatgaagatatttgagaaaagaaaaaaatagcttgtattcaggttcattggcttttgctggatgatccacctaaagaagttacctaatttggccttttaaaaaaggtgttagtgtttattatagctactttcaaggaaagtttgaatatgattctagtctctaaagttcttcacgttttctgacattccctggagggtgactggggaagaattgctccagggtagaagaaccaggcccaagactttaccattctgatctagagacaaaggatactcaatgaggagcttttttcccctcttggaacaggtaaaatgctttttcttattaatataattataaaacagtattttatgtaacagctattcccatattctaggagtggcctaagaaatgcgtgtttcagtgactagattataaatattctctattgtgaatagttgaataaaacagctgtttttttctgcttcctattcttgtgatatgataattttttgaaaaaagcacagcagtccaactaaagagatctcttactgtttgaaagtcatagcagccagttattttactctggagcttagagttcttttttcacatgaagtaaacgaaagtagaaaattcctttaccattccagcagagtgagaggatatgagcttaacagtgtatgtcagtcttttagcatattatatatgatttttaaaagtggttctgaggtcacattttttaaggcttgattatttaatgagaaaggtatgattcagcatatgaatatttgcttttagtccaccttttaggtataaaacaaagtccaggaatgtgataaatatttgtgtggataacgggcgccctctggtgttaccacctcgagacttgtctcatgcctccatgcttgccgatggaggacagactgcaggaacttggcccatgtgggaacctagcctgttttggggggtaggacccacagatgtcttggacagttttggggggagggttttttaattttttaaaaattttgcctccctttgtgaaaggggatggg

SEQ ID NO: 53814 - DNA, 2086 bp, Homo sapiens
ttttcccctgcagtgagcctgttcatgcgaagaaacggaagcatgaacgcattatagataaatatgaaaaaataccaagaactctgcaaactgcaccagagaaggaactgattcatttacttcctatcaaagataaaagtggtataatcccacagactagggagaagccagttactgatagtaacaaagatgaagaggatcaagaagaagagagggaacttgaggaagagatcattgaagatcctattcaagagctgaccatagaagaacatttgattgagagaaagaagaaattacaggagaagaagatgcatattgcagccttggcatctgccatattatcagatccagaaaataatattaaaaaattgaaagaattacgttctatgttgatggaacaagatcctgatgtggctgttactgttcgaaagctggtaattgtttctctgatggagttatttaaagatattactccttcatataaaatccggcccctcacagaagcagaaaaatctactaagacccgaaaagaaacccagaagttaagagaatttgaagaaggcctggttagccaatacaagttttatttggaaaatctggaacaaatggttaaagattggaagcagaggaagctgaagaaaagtaatgtagtttccttaaaggcatacaaaggactggcagaagtcgctgtgaagagcttgtgtgagctgttggtggcactacctcattttaactttcacaacaacatcatcgtattgattgtccctctcatgaatgacatgtcaaaattgatatctgaaatgtgttgtgaagctgtgaagaaactctttaagcaagataaattaggccaagcttctcttggtgtaattaaagtgatttctggttttgtgaagggcagaaattacgaagttaggccagagatgttaaaaacatttttatgcctaagaatcaaggaagtagaagtgaaaaaagatacagaagacattaataaaccaaaaaaatttatgactttcaaagaaaagagaaaatctctatcaagaatgcagagaaagtggaagaaagcagaagagaaactagcgcgagagcttcgagaggcagaagcttcagagagtactgagaaaaaacttaaactgcacacagagactctgaatattgtgtttgtaacctacttcagaatattgaagaaggcccagaggtcacctctcctgccagcagttctagaaggtcttgccaagtttgctcaccttataaatgtggaattttttgatgatctgttagtagttcttcatactctcattgagtctggtgacctaagctatcaagaaagtcttcactgtgtccagactgcttttcatattctttctggacaaggtgatgttctgaatattgatccattgaaattctacacacatctctacaaaacactgttcaaattacatgcaggtgctaccaatgaaggtgttgagattgtactccagtgccttgatgtcatgctaactaagcgcagaaagcaagtttctcagcagcgagctcttgccttcatcaaacgcctttgtacccttgctcttcatgttcttccaaattcaagtattggcattttagcaactaccagaatattaatgcatactttccccaaaacagatctactgcttgacagtgaatctcagggaagtggagttttccttcctgaactggatgagcctgagtactgcaatgctcagaacactgctctgtgggaactgcatgctctgcgggtaagagtggccctggtttttttctttttggggatgtttgtgaataattgttttccagtttttcttcaaatagttgttattgccagagtacttaattatattttgttctggggctgccttttttagaattcctgtgttagtatgctacattttactttgctgttactattctttaagctgttgaggtacattttctaaggaagcagaaaacagtgtcagttctgtagggtgcagttgtggaagatttactgaaacctttccctttattgaaatctttccctaacactcttcagaggatttgttatcaggtacatttctgttgagtcttatcc

SEQ ID NO: 53815 - DNA, 430 bp, Homo sapiens
agaatgaatcattctctgagtataatctaattatttttgagttacacagatgtggtggtatctttacattttttgtgtttgtgatttagatctgctactgaactttttgaggcatatagcatggcagaaatgacattcaatcctcctgttgaatcttcaaaccccaaaataaaggtatgggatatttttcatttttttaaaggaagaaatagaaaccaatgtatctcaataactctaactccagtttgcttaattattttataggtagttttttttttaatgtttaggatttcatcataggatggatttctgaggttgaaattctatagagatgatcatgaaactgttcgttcaatataggatatgtccaagaccttaccaagcatctgtcattgtgttgcatgtgttggtgtcagctgttgccattttc

SEQ ID NO: 53816 - DNA, 145 bp, Homo sapiens
gtacaatgcttaccaggagccaagagcgaacgggtggctgcgtgcaaatgctagaggttaacccctgtccatgggcatttaccgcatgagtaaaaatttattgcagagttcaggactgtgattctgcaataaattttttgagcgt

SEQ ID NO: 53817 - DNA, 1333 bp, Homo sapiens
  misc_feature (85)..(85): n is a, c, g, or t
ctgtggtccccgctactcggggggctggggccggaggatcccttgcccccaggaggcggagggtgccggtgagcctgggttctcncaccctgcactcccggctcgtggggcccacagagcaaaactccatctcaaaaaaaaaaaaaaaaaaaatttagaatgtgttagagaaatttaacaagtagaacaggtgatttctggttgatagactctatcttgcagtatatttatttcatgtatcagaccccaaagttgttgccttgttatttttttaatttctcacatttttgaaaaatagatgctatcctctatagtaaaatattgaatcactttatagtagacaatacatatgacatttaacaaatacttggtttgaaaaagtttggctttattcaacaattttagtttgcccactgattttcaaatgtctgtgggattgcttataactaagtagaaagtgaagactgatttttacttaagaatgggatagagatgagttttatggtttttaaaagtattttcagttcattatttaaatgttgggttgttgatatggtcttgtttctgataaggaaataggagcaacttgttttaaaataactacactaaaagactttcttcatctccgtatagagaaatccagatttcaattaattcatttattgggtgctaacaaaattcagggttagagtaaatttaggtctgttggtccatgtggcctggtttcctagcacccattaaacataatgctatcttttaagcctgaacatgtgggttttttaaatcaaattggaaaaaaattagacaactgatgtcatgctgtcttggtatccatactaaaaaagtatcaggaaaatagattatttttgtgctgtgaaacactattcagtggaaagtttagtggcaacttttccatatcattcatgacttaatacctgaaatgcacttttaaatgtttgccttatatccaagtgtttacttgtatccatgacctaaccgtctattgaaaagaatgtttgcagatgcagattgcaatgttgtttgtattcataggcaaaagtcctcttctctagtataattttttaaatctgagagaattgaaggtacagaaaaaaattctggagtgcctgaaccacagtttgagagcacaaaggtcacattctttcagtaaatttgggggaaataaatttcagctacctggttagcttcagtgactacttacacacagggctttggttccattacttgtttccaccacagccacatcctaaatacttggaatatccgaaaacaacttctaaaatcactcaataaaagtattcacttctaacca

SEQ ID NO: 53818 - DNA, 728 bp, Homo sapiens
  misc_feature (85)..(85): n is a, c, g, or t
ctgtggtccccgctactcggggggctggggccggaggatcccttgcccccaggaggcggagggtgccggtgagcctgggttctcncaccctgcactcccggctcgtggggcccacagagcaaaactccatctcaaaaaaaaaaaaaaaaaaaatttagaatgtgttagagaaatttaacaagtagaacaggtgatttctggttgatagactctatcttgcagtatatttatttcatgtatcagaccccaaagttgttgccttgttatttttttaatttctcacatttttgaaaaatagatgctatcctctatagtaaaatattgaatcactttatagtagacaatacatatgacatttaacaaatacttggtttgaaaaagtttggctttattcaacaattttagtttgcccactgattttcaaatgtctgtgggattgcttataactaagtagaaagtgaagactgatttttacttaagaatgggatagagatgagttttatggtttttaaaagtattttcagttcattatttaaatgttgggttgttgatatggtcttgtttctgataaggaaataggagcaacttgttttaaaataactacactaaaagactttcttcatctctctcgcttttgatctttctatatcttcttattcctctcttcgttaccttccctcattcatttctcctctatatcttcttctattctccctttccatatctca

SEQ ID NO: 53819 - DNA, 1580 bp, Homo sapiens
  misc_feature (85)..(85): n is a, c, g, or t
ctgtggtccccgctactcggggggctggggccggaggatcccttgcccccaggaggcggagggtgccggtgagcctgggttctcncaccctgcactcccggctcgtggggcccacagagcaaaactccatctcaaaaaaaaaaaaaaaaaaaatttagaatgtgttagagaaatttaacaagtagaacaggtgatttctggttgatagactctatcttgcagtatatttatttcatgtatcagaccccaaagttgttgccttgttatttttttaatttctcacatttttgaaaaatagatgctatcctctatagtaaaatattgaatcactttatagtagacaatacatatgacatttaacaaatacttggtttgaaaaagtttggctttattcaacaattttagtttgcccactgattttcaaatgtctgtgggattgcttataactaagtagaaagtgaagactgatttttacttaagaatgggatagagatgagttttatggtttttaaaagtattttcagttcattatttaaatgttgggttgttgatatggtcttgtttctgataaggaaataggagcaacttgttttaaaataactacactaaaagactttcttcatctccgtatagagaaatccagatttcaattaattcatttattgggtgctaacaaaattcagggttagagtaaatttaggtctgttggtccatgtggcctggtttcctagcacccattaaacataatgctatcttttaagcctgaacatgtgggttttttaaatcaaattggaaaaaaattagacaactgatgtcatgctgtcttggtatccatactaaaaaagtatcaggaaaatagattatttttgtgctgtgaaacactattcagtggaaagtttagtggcaacttttccatatcattcatgacttaatacctgaaatgcacttttaaatgtttgccttatatccaagtgtttacttgtatccatgacctaaccgtctattgaaaagaatgtttgcagatgcagattgcaatgttgtttgtattcataggcaaaagtcctcttctctagtataattttttaaatctgagagaattgaaggtacagaaaaaaattctggagtgcctgaaccacagtttgagagcacaaaggtcacattctttcagtaaatttgggggaaataaatttcagctacctggttagcttcagtgactacttacacacagggctttggttccattacttgtttccaccacagccacatcctaaatacttggaatatccgaaaacaacttctaaaatcactcaataaaagtattcacttctaaccaactcctcctcctttatacctgctctgtgttagggcgtagtctgtttccacctctgtaagtcctatctaggcttcctgatctatcaattcagtatcatgattgttaacccaaacgacttcctggaaaattcccagccctagatgtatccaagccctcctaccctcaccagttatttctggagaaagatcaccaaatgtataaatccgtattagtaaaaattggttttaactgacctcagcactgccca

SEQ ID NO: 53820 - DNA, 955 bp, Homo sapiens
aaataaggacagcagcagactgctgtgaagctgatctgggactgaggaggaggtcagactagagataaagattcagacctattggcaatcccaacaagtaaaagctggcagagaggaaggaacagcagcaaatgcagcagcagtggtaaacaagctaggagggaaaaaaggagggcccaggtcacagaagcccagagagggcagaggttcaatgggagactggtcaaatgttgtggagaagttggaaacctcgggtatggaaggaggctattgcatttgacaataattccgaccttttctaaagcggttttggtacagctgccttatgagagtgggtatattgtgcagtactaattagcatctccatccttagatgtcaaataactacattggaagtaggattcagaacattaattatttattaaaagctaataaggggattcaagtctattaggtttagtcattgcaaatataaagcaatatataaaggtatgcaactaattacctctgtaatttcaaatcattaaagatgcaggattaaaaaaaaaaaaaagaaacgctgagaattaagagtcatgtagtgttggcttccaccccaatatgagcaggcacagtggttcaaagcaagcactctagaataaacacacatgggttcaagtccagctattaccttacttggtgggtattcatgggtaagttaacttttccaagtctgattgtaaataataaatacacatgaaaactctcagcatagtgcttaccacataactttctcaataaatgttgacttactgttataataaacttattagcataacaatgccttgtatccaagttaaaattatatgaacttagttacgtgtaatttcaaacattcattctttaattttttatgagctccacactctaaccaactgagctaactggccacatgattctttattcttttttaaat

SEQ ID NO: 53821 - DNA, 426 bp, Homo sapiens
cgaaacattcagaatgttgacaaaatatctgggtatcatggaacagccaagctgacacataaaactaataatcacgagcaggtattgttatccttatttataaagatgtggaaaccgtgaatcttcaaggtcaagatgactcttccaaggttacacagttattaagagctgctttcagtgtactttctgccacatacagctgtctcgtaaaatctatgatttctagtattacaatgtttaatttttttaaattgatctatactagagaaacttctccatgggataaccaagacatgttgggaattcctcatgattttctttttgtcttctggacacttattctctgagtgtcgtacaattcaattcaattctgacactacccagaattagtgaagacccacaaatgaaggacttagtcccataaga

SEQ ID NO: 53822 - DNA, 334 bp, Homo sapiens
ccagccacacacaattgtaggcaaatttattgagaacttcaccatgaatacacaagctcacacacacacacacacacacaggtttgttccagtcacacacacatttcacctcagttctatgaacctaaatttccagttttctgcgcctaccccaatatctacttttactctattaagttttgtcaacacttacaagactctcctggttttcttagaactcagatatcctaatattagattttcaaaataaaacaaaattcaccaagattgtgactaagtagtagttatccacattcagaggatgaactggtccacaaatatctaactcatcccc

SEQ ID NO: 53823 - DNA, 363 bp, Homo sapiens
ttcagtcttcatcacccctctagcatgcatacctctcactcaacccaggtatctagagacacatgcttctaagctgactcaggaggcagacttgcttgactcctggggcacttttgagagggggcgttctcttcctttccatgtgccctgaggactggcaggggacagctataaattcaaattgtggttccagtgcttattagctgtgtggccttgagcaagtacagcatcactttcatcatctgtagtgttgaggtggttttgactaccctatagcattgttatggtgaataaatgcaataatacaggtaaggtactgagcagtaccatgcacagagtagctcttccatcagtgatcagtcc

SEQ ID NO: 53824 - DNA, 330 bp, Homo sapiens
ctggatgtgacatgtcccaagcttacagctggacacttgacctccttactttgatggcctcctgtgtcctgggggcagtgactgcatattttttatgaggggctgtggctgtgccctaagatgtaggacactcagcaggacagcagagacaggaaaacaaactaggtgatgaaggtcaacatgccacatcatccggcctctagggctttggaagagtcggggagagactggagggaggacccaagagggctcggggctaatacagcagaaacctcaagtgcctctgcaacagcctgggaagaagcagcctgatccaactccctgtagtcc

SEQ ID NO: 53825 - DNA, 612 bp, Homo sapiens
gagaggttaggggaaagagggatgaaagaagaaagttcttcatcaagaattgactgcagtattgcctgctgatgcatgtcggatcacccgcacagagagatcacatggcttctccaaaagtcaaacgatcaattcgcctcgttttggctctgtacttaatgcacaaacagtgcgatctgcggggctgtaattgcattgttagggccaaggaacaaggctgtgccttttcagcagacagctggcagggagagaggcatgttgttaggaaagagagaggcaaggcaaataaaattactgctaacgctcagagatcggcaggagtcctacttgcctaatcttaccggtgggagcaagcggctgttgtaatccaattatagcagcataagcaatttgttagacactccgcataatgtaacaatttcccaataaactctgacttgtaataacgtcggcaagagtccgcataaatctgcccgaatggtgggggctggagcattcggctgggggcttgtaattggcgccatcagcacgttttgcggagtgcagtatggtgcagtcttttagtgcaggaattttaaggagaaaagcgtggcacatttctcagggaaaaaa

SEQ ID NO: 53826 - DNA, 533 bp, Homo sapiens
actctgttgcagacactggtaactaatagtctacataaaaggaatggagaagaaaggacaaatggaagactcattgtggatgtcaattacacaaggtaaggtggcaaggtagaagtcaagaagtagttgaagatgctgagctgcaaggtcttacgcctggcttactagaacaacagtgccagtaatagaaaatgcgtaccaacatttgttgactgcttactcgatgccaggaacagtcagtccattaaattcgaaacacacacatcaggaagaaatagatgcagtgtaatgaaatctagacatgttgagcttaagatttaatgagatgtgtaaatgaagatagctggaaaccaagatttggaggttgggagaaaggttaaaactatatctagatttgggagtaatttctacagaaataagttgacaatatcttaagttcctgaaatctctcatattcttccaatatccaattatgtcaaaagaaatgttaacaaacacaactggttatctgctcccttgtgtttagtggtgag

SEQ ID NO: 53827 - DNA, 199 bp, Homo sapiens
ccacaactagcttacagcagagacaaatgaaacaaacaggaaaaaagatagaaaaaatacaacaaaaccaacagttggtattctgagaagatgaacaaaattagcaaatctttagctgcaataactaaaatggagagaagactgaaatagctaaaattagaaataaaagagaagacattcaactgatgtcatagaaata

SEQ ID NO: 53828 - DNA, 567 bp, Homo sapiens
ctcatagaataagtctaattcctcttttggctacagctattttttttaatgctgtgcacattttatagtcctttactgttcagacttggaaagctaggatgaaataaatatttactaaacacccctccccctgcaaaaaagaaaaagtaataatattcttaaataaggaaggggcataggctgagagctggggcatggctgtgagcacatccagtacacatattttggttaaagtacaaggacatagaatgtactacatgcctgtgagcatgtctagcacaagtattttggttaaagtgtaaggacatcgatgtacttactcctttatatctaacagctacataggatagggcttaacaaagagttattagcacaaagcaaggaggcttgaaggaagttagtctttaaaagaaattattatttctaacacttatggtttattctttaataagaagggaaatttgaagaggaactttttactttctacattcccctttaattcatggcacagttgggactacttattttcatatgaggacattcaataaacagactttactaatgaat

SEQ ID NO: 53829 - DNA, 579 bp, Homo sapiens
ggctgctcttcctcctccctgctgttcctcacccacccggcctcagccactccattcctggatgcccatgtcccagtggcggctggctggtcatccagaggcgaatgcggaacatggtgtctgagctactaacctcccaccttgggtatgcccttgaacttttctgtaagccaggctttccaacccccaacagcactcaggtcacattcccagagagcctgcacaagagggctgagtctgtttatttttcaagatttcaaaaaacatgccttttccccctctgaccttaagcaaaacttttttttccctccaacacttgtatttttaacttcatgagaaaatatggtaaaagggagcagattttattttcagaaactgtgatttttcaagatttttttttatttaaaaaagaaaggctttgggggatggggagaataaagatttttgttttgttttgttttgggtgctaagggggcccagagccacttctctgtggcccctgctcaaactcctccagagattctggcatgttgaggctgcagctcttttggttattgtgatcaaggatttctgggcacc

SEQ ID NO: 53830 - DNA, 2168 bp, Homo sapiens
caatgaatggggagtaaatacacagataatccaaaattgatgtaagcattggaaggggaaagagggaacgcttctttccctctgggcttggtcatttcctcccaagcaaaccccgcgacgttcagccgtcttcctcctatgccacgtgctctcaccagaactgcagcaaaactgcattttatgtcctgtgtctaaagctaaacacatgttcctgtctacttttgctttgttcctgtttcccttctgtgaggaccttcccctcctcagatgtggggagttgccgcctccacttgcattacatgtatttcagagtaggtcctaggctccccttacacctctggtcacgttgccattattcctatggtagataaaggggatgagaaagaacagagctccaggcctttttcaaacaaactggttttctcagtatagccctatgctcaaaaggagtgaggacaggtatgtgactgccataaggagctgtttgctttgcacagagaaatctaatctttctcctgctgggcagctcagtacagatgtcccctcactgctggaagaaacacctgcccttgcttgttctcctgatggcccctcacagtcaggtgtgggatggcacatttctaggtgctcctcgccgagctgtcatgggcttcagtcttgggcctctgcagctggctgtgaccaggtggaaactgtagccttggctgacccagagaaggaaaggaggcagtctgccgcttggctgatttaggagttgtgctgaattcctgcccatctgttctcccagctgagccaaggccaaagctgtctaccttttgccaacctaaggaatgacacagagcatggagcaccatcactgaaacatctgccccagtgccctgccaccttcgtcctcactgacctctgcagcctctctcatctgccaattttgattccgcaaggagaggtggccctgggctcacagctggtgtttgtccacagatgttcatgggtttctttgtgttctctcattttttcaaagctgggtgttgggaccaacatcaccactgacattctgtggctctaaacaagtcctcacgaccacttctcagttttctcatctttatgaagtatggagtaatccccactagccttatagagggactgtgtgagaagggaagagactgctattgtttgccctatatccacctacttccctagttccagaacgctggactttaatgagataacaaagtacctagtaaaaacactgcatcattttccatcccccaccccttgcagtaaaatgtggcccatgagacagaagcactaactactgagcaggacttctaggggagttctttaaaactcagaggagcaccacttttaccttctgctcttccctttttcctgcctggaacgcagaagtgatggctgaagctcctgaggctataagctctgtacgtaggagagtggtgaagaaaggagcttggttctgcaaggatgttgtagagctgccataccagtcctgcatggtattcctgtgcactactgttacgtgaacacacaaacacctaatttgtttaagccattaggccaggcctctattagccattcctgactgatacagaagacaaaaatggcatcacagactcctgaactccaaagacactgcctattctttcgtctgttcttggcaagcaccaacattgagactgtacttcagggttgatgctggccatttggtggcgtgaggagtgggcactcacatgtctctgctagcagttctgacgtgtccattccacactggatccatagaacgagggaacacaagtgtcttctcataagatttatagaaacagtgatcgttgcagaaaaataattagcaagagaacagacttcagctctctgaaggctgatgaccacctgtttctcatctcttctagtgtatgtcaaagctaaattaggtcaaataggaaataagtcagaatccccaattcgatagaaacttacaggtcttgtgatctaatctgccacttgatccgtgaattacctataggtcatccctaagaggtggcctccagcttctgcttgaattccttcaaggatggggtgctcattgctgagaatgcagtcatcacccaaagaaggggttattgtgatatttacaattgctgcctgaccctgta

SEQ ID NO: 53831 - DNA, 2511 bp, Homo sapiens
caatgaatggggagtaaatacacagataatccaaaattgatgtaagcattggaaggggaaagagggaacgcttctttccctctgggcttggtcatttcctcccaagcaaaccccgcgacgttcagccgtcttcctcctatgccacgtgctctcaccagaactgcagcaaaactgcattttatgtcctgtgtctaaagctaaacacatgttcctgtctacttttgctttgttcctgtttcccttctgtgaggaccttcccctcctcagatgtggggagttgccgcctccacttgcattacatgtatttcagagtaggtcctaggctccccttacacctctggtcacgttgccattattcctatggtagataaaggggatgagaaagaacagagctccaggcctttttcaaacaaactggttttctcagtatagccctatgctcaaaaggagtgaggacaggtatgtgactgccataaggagctgtttgctttgcacagagaaatctaatctttctcctgctgggcagctcagtacagatgtcccctcactgctggaagaaacacctgcccttgcttgttctcctgatggcccctcacagtcaggtgtgggatggcacatttctaggtgctcctcgccgagctgtcatgggcttcagtcttgggcctctgcagctggctgtgaccaggtggaaactgtagccttggctgacccagagaaggaaaggaggcagtctgccgcttggctgatttaggagttgtgctgaattcctgcccatctgttctcccagctgagccaaggccaaagctgtctaccttttgccaacctaaggaatgacacagagcatggagcaccatcactgaaacatctgccccagtgccctgccaccttcgtcctcactgacctctgcagcctctctcatctgccaattttgattccgcaaggagaggtggccctgggctcacagctggtgtttgtccacagatgttcatgggtttctttgtgttctctcattttttcaaagctgggtgttgggaccaacatcaccactgacattctgtggctctaaacaagtcctcacgaccacttctcagttttctcatctttatgaagtatggagtaatccccactagccttatagagggactgtgtgagaagggaagagactgctattgtttgccctatatccacctacttccctagttccagaacgctggactttaatgagataacaaagtacctagtaaaaacactgcatcattttccatcccccaccccttgcagtaaaatgtggcccatgagacagaagcactaactactgagcaggacttctaggggagttctttaaaactcagaggagcaccacttttaccttctgctcttccctttttcctgcctggaacgcagaagtgatggctgaagctcctgaggctataagctctgtacgtaggagagtggtgaagaaaggagcttggttctgcaaggatgttgtagagctgccataccagtcctgcatggtattcctgtgcactactgttacgtgaacacacaaacacctaatttgtttaagccattaggccaggcctctattagccattcctgactgatacagaagacaaaaatggcatcacagactcctgaactccaaagacactgcctattctttcgtctgttcttggcaagcaccaacattgagactgtacttcagggttgatgctggccatttggtggcgtgaggagtgggcactcacatgtctctgctagcagttctgacgtgtccattccacactggatccatagaacgagggaacacaagtgtcttctcataagatttatagaaacagtgatcgttgcagaaaaataattagcaagagaacagacttcagctctctgaaggctgatgaccacctgtttctcatctcttctagtgtatgtcaaagctaaattaggtcaaataggaaataagtcagaatccccaattcgatagaaacttacaggtcttgtgatctaatctgccacttgatccgtgaattacctataggtcatccctaagaggtggcctccagcttctgcttgaattccttcaaggatggggtgctcattgtggcttttctaatcatctctgattgttagaaacactgtgaaacttttatccatcagtcctgtttctgaagctgtacggtacaaattttttttttccccacttaaggctcaactattggaatacatctaccatgtctcctatgaaacttgcttctccaggccaatcatccttacttccttaaacttttttttttcctgaaaagttattcttttaatcttattaaaaaagcaacccatgcccattccacaaatacaagtgaaatagtgaaaaacaaaaatcaaactacatctatttggtgatcattattaatgtcttatgtttcctcccagattgttttctgcatgaataataaccaacaatgtgtgtgtatgtatatatatgcttttgcattaaaaggtggttttgaaggt

SEQ ID NO: 53832 - DNA, 636 bp, Homo sapiens
tttgataaatgccttgggacctggagtgctgggcttgtgcacaggaagagcaccagccgctgagtcaggatcctgtcagttccatgagctattcctctttggtttggctttttgatatgattaaaattattttttattcctttttctactgtgtcttaaacaccaattcctgatagtccaaggaaccacctttctcccttgatatatttaactccgtctttggcctgacaacagtcttctgcccatgtctgggaacacacgccaggaggaatgtctgataccctctgcatcaagcgtaagaaggtcccaaatcataaccattttaagaacagatgactcagaaacctccagaggaatctgtttgcttcctgattagatccagtcaatgttttaaaggtattgtcagagaaaaacagagggtctgtactagccatgcaaggagtcgctctagctggtacccgtaaaagttgtgggaattgtgacccccatcccaaggggatgccaaaatttctctcattcttttggtataaacttaacattagccagggaggttctggctaacgttaaatgctgctatacaactgctttgcaacagttgctggtatatttaaatcattaaatttcagcatttactaa

SEQ ID NO: 53833 - DNA, 795 bp, Homo sapiens
tttgataaatgccttgggacctggagtgctgggcttgtgcacaggaagagcaccagccgctgagtcaggatcctgtcagttccatgagctattcctctttggtttggctttttgatatgattaaaattattttttattcctttttctactgtgtcttaaacaccaattcctgatagtccaaggaaccacctttctcccttgatatatttaactccgtctttggcctgacaacagtcttctgcccatgtctgggaacacacgccaggaggaatgtctgataccctctgcatcaagcgtaagaaggtcccaaatcataaccattttaagaacagatgactcagaaacctccagaggaatctgtttgcttcctgattagatccagtcaatgttttaaaggtattgtcagagaaaaacagagggtctgtactagccatgcaaggagtcgctctagctggtacccgtaaaagttgtgggaattgtgacccccatcccaaggggatgccaaaatttctctcattcttttggtataaacttaacattagccagggaggttctggctaacgttaaatgctgctatacaactgctttgcaacagttgctggtatatttaaatcattaaatttcagcatttactaaaaaaaaaaaaaaaaaagtttggttagttactgtgaaatgaactgtttggctttaattttaccaggtattttttaactttctttaataaaaacactttgaaggctttggttcaaaaaacacacacacaacaagcacgcagtataatacaacacacagagg

SEQ ID NO: 53834 - DNA, 405 bp, Homo sapiens
taatcaccaattttaagggcttatttagaactgagtgacttgggagttgaagtagacatcaacctaaacaggaagagaaaacaaaagaagaaagagatttcacacccaatgaccatgcaggaacagacatgaaaaagaactaataagaagtctcagaaatggaaaatactgtctttgagaaaaaagttcagtagatgagataaaccataaacaagacacatagagaaatagtgaattgaaggcagtgctgagaaattctccctgactacagctcaaagaaattaagagaaaatatgaaagcgctatactgtagattcggtattctaaccagtctttcccctgaaagaaactaaacatactaaataaaatatttgaattgtctttttaaaagcaaggctaagctag

SEQ ID NO: 53835 - DNA, 366 bp, Homo sapiens
aatccctgataatgacaagcagactttacccagcttatttttttactgtttggctctgactcaagctaaaaagttgctattcagcagagcttgagttatttttattgttatagccgggcttggtctaggatgtatttggctaaagttgatcttgaccttggatttccagctggctcaggctggaggaaggggaaaaggccctgggaggatgagtggcagatggtgggcatgcctcgcaggctgagccgctggcccttcttccctgacagatacaatctgtggggagagaagaccagagtaattgagaagaatgtcaattttttttttttttgagacagagtctcactgtgtctcccaggctgcagt

SEQ ID NO: 53836 - DNA, 406 bp, Homo sapiens
tatctattgagtgccacaggtatgcccgtgtattgaaaatgtcagagataagagatgagcagacaccctacactgcagcgctgcccaacagagttaacctgtaaagaagcagggcggccagcactcccagcctctctgtcagacaggactgtcagggtttgatctagaagcaaagcccctctgttttctgcctaatccctgaaagagtcatgcccttggggagttcatggtccagtggggagcaaggccttgagaacacaacaagcacatctccaggcagggagtgaacagcgtgcagggcccagcacacggtggccagtgctgagagtgagggacaggatggggccggagtcatcccactgagacacactatcattgctgtgttttagaatcaaacaatccagaa

SEQ ID NO: 53837 - DNA, 214 bp, Homo sapiens
cgaacgcaagttttatgcagtccattagagtgcatgttaagcctactgtgctttgccacaatgattttttacaatcaagtaaaataacttggcctttacaggcctttaaatgcacaaattatgccctgttgtgattttcatctgatcaactcaaccggatagcatgagaagattttataaatatacacaaataaatatgcacttatttcataac

SEQ ID NO: 53838 - DNA, 363 bp, Homo sapiens
gcactgttgtaggtaattcagaacttaacaaagacatttcctggttattttcaactgtgttttttttaggattataccttatccctttatttcctctaagaaatagttttagataagaaaaattactaaactgttatttgtagtgacccactatgagtttaattctttgctaggtgctatggaggtttaggaaaaatgacaactttgctcccagactgaagtacagtggcgcaatctcagcttactgcaagctctgcctcccaggttcatgccattgtcctgcctcagcctcccgagtagctgggactacaggcgcccaccaccacgcccggttaattttttgtatttttagtagagacgggg

SEQ ID NO: 53839 - DNA, 556 bp, Homo sapiens
cagtcaaaccaacaaccacagtataagcatgagaaaaacatcagacaaatcttaactagagacattctataaaaatacctgactagtactcctcaaaactgtcaaggtcattaaagcaaggaaagtcttagaaactctcacagtcaagaggaggctaaagagacatgattgctaaatataatgtggtatcctggattggatcctagaatagaaaaagacacaaggttaaaaataagtaaatctgaataaattgcgaatttcagttaataataacgtatcagtagtggttcaatagttgtgacaaatacaccatactaatgttaatagaaaaaatgatgtgtggggtgtatgaaaacttcctgtactatgtttgcaatctttctataaatctaaaattgttctaaaaataaaacgtttataaaatgcagggaaaaccagagtttacttattttatcttcatttattccatttccactgttcatttctttgtgtagactcgagtttttgctgggatcacagtcctgctgaagggcttcctttaacatttcttgtagag

SEQ ID NO: 53840 - DNA, 753 bp, Homo sapiens
ccctgagcgcgcgaggcccgcggtccctttaagacgcccggggcccgcctggctctcgccgccgccgggccatggccgcgcagctgctggaggagaagctgacctgcgccatctgcctggggctctaccaggacccagtgacgctgccctgcggccacaacttctgcggggcctgcatccgggactggtgggaccgctgcggaaaggcgtgccccgagtgccgggagccctttcccgacggcgccgagctgcgccgcaacgtggccctcagcggcgtgctggaggtggtgcgcgccgggcccgcccgggatcccggccccgatcccggccccggccccgaccctgccgcgcgctgcccccgccacgggcggccgctggagctcttctgccggaccgagggccgctgtgtgtgcagcgtgtgcaccgtgcgcgagtgtcgcctccacgagcgggcgctgctggatgccgagcgcctcaagcgcgaggcccagctgagagccagcctggaggttacccagcagcaggccacccaggccgaaggccagctactagagctgcgcaagcaaagcagccagatccaggtacgaggcctgtgcctgcccgcccaccatggcctcacactgcatcctggggcggccaccagctggtccctggaacaccaggcagcagggagcggggctgagcagggagctgggcacaggggtcctggggaggttcccgggaccctgcctccccacatccctgaccctcagc

SEQ ID NO: 53841 - DNA, 812 bp, Homo sapiens
cgcagtgaatccgtgatcttggtgcatctctttatcagtgtactacgaaggtcgaggtataatacgtgtatgccaccacgcctggcttatgatgaatatttctgagtgggatgtttggccacatttatggtcatgtatgtaggctgttacctcaagtgagtcactcagggaacaatgagcacttgaagatttttttatacaaaaggccacagtgaggccaccttgagtcaagccgactaaggcccctcaaccctgtcactaagcagcacgtgacactggcaggaccttcatctccagcatcccacccctgggtgtgggactttggggcagccgtgtgtgcaggtgtcggcacaggctagctcctcctggtttggtgtggtgtttgccattgcagagcaagctgccacgaagacccctgggcatgattttgcttgtatttccggaagtggggttgctgggtcatagggcaggtgtaattttttttacttgaaatgttccacttcttgttctgggaggtggttccaagggtgtctgcttttggccaggcgcagtggctcacgcttgtaatcccagcactttgggaggggaggctgaggcagaagaatcgcttgaacccaggaggtgaggttgcagtgagctgagattgcaccactggactacagcctgggtgacagagcgagactctgtctcaaaaaaaaaaaaaaaaaagggagggctgtctgctttttgtaacttgaaaaactggacatctatgttatatgtactcatggataaatatttcacaataaaactttttaaaaggaaaaaaagtg

SEQ ID NO: 53842 - DNA, 3355 bp, Homo sapiens
ccctgagcgcgcgaggcccgcggtccctttaagacgcccggggcccgcctggctctcgccgccgccgggccatggccgcgcagctgctggaggagaagctgacctgcgccatctgcctggggctctaccaggacccagtgacgctgccctgcggccacaacttctgcggggcctgcatccgggactggtgggaccgctgcggaaaggcgtgccccgagtgccgggagccctttcccgacggcgccgagctgcgccgcaacgtggccctcagcggcgtgctggaggtggtgcgcgccgggcccgcccgggatcccggccccgatcccggccccggccccgaccctgccgcgcgctgcccccgccacgggcggccgctggagctcttctgccggaccgagggccgctgtgtgtgcagcgtgtgcaccgtgcgcgagtgtcgcctccacgagcgggcgctgctggatgccgagcgcctcaagcgcgagaactcggcctgcatcttggcctcctgggtctccggcaagttcagcagcctgctacaggccctggaaatacagcacacgacagcactgaggagcatcgaggtggccaagacgcaggcgctggcacaggctcgagacgaggagcagcggctgcgggtccatttggaggctgtggctcgccatggctgcaggatccgggagctcctggagcaggtggatgagcagaccttcctgcaggaatcgcagctcctccagcccccagggcctcttgggccactgacccctctgcagtgggatgaagaccaacagctgggtgacctgaagcagttgctaagccggctgtgtggcctcctcttggaagaggggagccaccctggggcaccagccaagcctgtggacttagcccccgtggaggccccaggtcccctggcaccggtcccaagcacagtttgtccactgaggaggaaactctggcagaattatcgcaatctgacctttgatccagtcagcgccaaccgtcacttctatctgtcgcgccaggaccagcaggtgaagcactgtcgtcagtcccggggcccaggcgggcccggcagctttgagctctggcaggtgcaatgtgcccagagcttccaggccgggcaccactactgggaggtgcgcgcgtcagaccactcggtgacactgggcgtctcctacccgcaactgccacggtgcaggctggggccccacacagacaacattggccggggaccctgctcctgggggctctgcgtccaggaggacagcctccaggcctggcacaacggggaagcccagcgcctcccaggggtgtcagggcggctcctgggcatggatttggacctggcctcaggctgcctcaccttctacagcctggagccccagacccagcccctgtacaccttccatgccctcttcaaccagcccctcacccccgtcttctggctcctcgagggtaggaccctgaccctgtgccatcagccaggggctgtgttccctctggggccccaggaagaggtgctcagctgaagaaggcatgggatggagccctggcatagctgccaccatgcctatgtgcccaagagctgcccagcttcagcttggggactggaggaccagctgttggcctctctgttaactcagaaagagatgggaggttgggggaggtgagcataaacgcagagttcactgttgcagcctttttgaaggggacacagtctaggagggggataaatgggatgcccttgccccagagagaacccagttctaggtactgtctgggcctgggaggcgagagcagtgcccaggggacttctgggcttacaggacagcgtgtgtgacaaaattcagatctacctgaacttgcctctggagatgataagggccaaaggagcagtcagggaggggcggtgagccagagtagtcccagggggagacagattcctccctcctccccgcctgcagctctctttaattttttgtaacatttggagagacgtccgtcctgtcttgtagtctttttattttgtgcatccttataattgtattctacaaacaattttgttttctgcatttaaacatttttgtgtttttaggagatggtcttgctctgtcactcaggctggagtacagtggcacaatcatggctcactgcagcctcgagctcctgagctcaaaggatcctcccacctcagcctccagagtagctcagattacagtgttttctgaagtttcctgacttaacataagcatttttcacatgattgaaaattttcactgattgctgtagtcattctaatgactatcaagtttatttatccattattggacatttaaatttctttctttttagctatacaaacattgatgtgttttttttgagacaggatctccatctgtcacccaggctggtgtgcaggggtgcggtcatgggctcatgggattctcctacctcagcctcctgagtagctgggattacaggtgtatgccaccacgcctggcttatgatgaatatttctgagtgggatgtttggccacatttatggtcatgtatgtaggctgttacctcaagtgagtcactcagggaacaatgagcacttgaagatttttttatacaaaaggccacagtgaggccaccttgagtcaagccgactaaggcccctcaaccctgtcactaagcagcacgtgacactggcaggaccttcatctccagcatcccacccctgggtgtgggactttggggcagccgtgtgtgcaggtgtcggcacaggctagctcctcctggtttggtgtggtgtttgccattgcagagcaagctgccacgaagacccctgggcatgattttgcttgtatttccggaagtggggttgctgggtcatagggcaggtgtaattttttttacttgaaatgttccacttcttgttctgggaggtggttccaagggtgtctgcttttggccaggcgcagtggctcacgcttgtaatcccagcactttgggaggccgaggcaggcggatcacaaggtcaggagttcgagaccagcctggccaacaaggcaaaaccccgtctctactaaaaatacaaaaattagccgggcatggtggtgtgcgcctgtaatcccagctactggggaggctgaggcagaagaatcgcttgaacccaggaggtgaggttgcagtgagctgagattgcaccactggactacagcctgggtgacagagcgagactctgtctcaaaaaaaaaaaaaaaaaagggagggctgtctgctttttgtaacttgaaaaactggacatctatgttatatgtactcatggataaatatttcacaataaaactttttaaaaggaaaaaaagtg

SEQ ID NO: 53843 - DNA, 3385 bp, Homo sapiens
ccctgagcgcgcgaggcccgcggtccctttaagacgcccggggcccgcctggctctcgccgccgccgggccatggccgcgcagctgctggaggagaagctgacctgcgccatctgcctggggctctaccaggacccagtgacgctgccctgcggccacaacttctgcggggcctgcatccgggactggtgggaccgctgcggaaaggcgtgccccgagtgccgggagccctttcccgacggcgccgagctgcgccgcaacgtggccctcagcggcgtgctggaggtggtgcgcgccgggcccgcccgggatcccggccccgatcccggccccggccccgaccctgccgcgcgctgcccccgccacgggcggccgctggagctcttctgccggaccgagggccgctgtgtgtgcagcgtgtgcaccgtgcgcgagtgtcgcctccacgagcgggcgctgctggatgccgagcgcctcaagcgcgaggcccagctgagagccagcctggaggttacccagcagcaggccacccaggccgaaggccagctactagagctgcgcaagcaaagcagccagatccagaactcggcctgcatcttggcctcctgggtctccggcaagttcagcagcctgctacaggccctggaaatacagcacacgacagcactgaggagcatcgaggtggccaagacgcaggcgctggcacaggctcgagacgaggagcagcggctgcgggtccatttggaggctgtggctcgccatggctgcaggatccgggagctcctggagcaggtggatgagcagaccttcctgcaggaatcgcagctcctccagcccccagggcctcttgggccactgacccctctgcagtgggatgaagaccaacagctgggtgacctgaagcagttgctaagccggctgtgtggcctcctcttggaagaggggagccaccctggggcaccagccaagcctgtggacttagcccccgtggattatcgcaatctgacctttgatccagtcagcgccaaccgtcacttctatctgtcgcgccaggaccagcaggtgaagcactgtcgtcagtcccggggcccaggcgggcccggcagctttgagctctggcaggtgcaatgtgcccagagcttccaggccgggcaccactactgggaggtgcgcgcgtcagaccactcggtgacactgggcgtctcctacccgcaactgccacggtgcaggctggggccccacacagacaacattggccggggaccctgctcctgggggctctgcgtccaggaggacagcctccaggcctggcacaacggggaagcccagcgcctcccaggggtgtcagggcggctcctgggcatggatttggacctggcctcaggctgcctcaccttctacagcctggagccccagacccagcccctgtacaccttccatgccctcttcaaccagcccctcacccccgtcttctggctcctcgagggtaggaccctgaccctgtgccatcagccaggggctgtgttccctctggggccccaggaagaggtgctcagctgaagaaggcatgggatggagccctggcatagctgccaccatgcctatgtgcccaagagctgcccagcttcagcttggggactggaggaccagctgttggcctctctgttaactcagaaagagatgggaggttgggggaggtgagcataaacgcagagttcactgttgcagcctttttgaaggggacacagtctaggagggggataaatgggatgcccttgccccagagagaacccagttctaggtactgtctgggcctgggaggcgagagcagtgcccaggggacttctgggcttacaggacagcgtgtgtgacaaaattcagatctacctgaacttgcctctggagatgataagggccaaaggagcagtcagggaggggcggtgagccagagtagtcccagggggagacagattcctccctcctccccgcctgcagctctctttaattttttgtaacatttggagagacgtccgtcctgtcttgtagtctttttattttgtgcatccttataattgtattctacaaacaattttgttttctgcatttaaacatttttgtgtttttaggagatggtcttgctctgtcactcaggctggagtacagtggcacaatcatggctcactgcagcctcgagctcctgagctcaaaggatcctcccacctcagcctccagagtagctcagattacagtgttttctgaagtttcctgacttaacataagcatttttcacatgattgaaaattttcactgattgctgtagtcattctaatgactatcaagtttatttatccattattggacatttaaatttctttctttttagctatacaaacattgatgtgttttttttgagacaggatctccatctgtcacccaggctggtgtgcaggggtgcggtcatgggctcatgggattctcctacctcagcctcctgagtagctgggattacaggtgtatgccaccacgcctggcttatgatgaatatttctgagtgggatgtttggccacatttatggtcatgtatgtaggctgttacctcaagtgagtcactcagggaacaatgagcacttgaagatttttttatacaaaaggccacagtgaggccaccttgagtcaagccgactaaggcccctcaaccctgtcactaagcagcacgtgacactggcaggaccttcatctccagcatcccacccctgggtgtgggactttggggcagccgtgtgtgcaggtgtcggcacaggctagctcctcctggtttggtgtggtgtttgccattgcagagcaagctgccacgaagacccctgggcatgattttgcttgtatttccggaagtggggttgctgggtcatagggcaggtgtaattttttttacttgaaatgttccacttcttgttctgggaggtggttccaagggtgtctgcttttggccaggcgcagtggctcacgcttgtaatcccagcactttgggaggccgaggcaggcggatcacaaggtcaggagttcgagaccagcctggccaacaaggcaaaaccccgtctctactaaaaatacaaaaattagccgggcatggtggtgtgcgcctgtaatcccagctactggggaggctgaggcagaagaatcgcttgaacccaggaggtgaggttgcagtgagctgagattgcaccactggactacagcctgggtgacagagcgagactctgtctcaaaaaaaaaaaaaaaaaagggagggctgtctgctttttgtaacttgaaaaactggacatctatgttatatgtactcatggataaatatttcacaataaaactttttaaaaggaaaaaaagtg

SEQ ID NO: 53844 - DNA, 3323 bp, Homo sapiens
ccctgagcgcgcgaggcccgcggtccctttaagacgcccggggcccgcctggctctcgccgccgccgggccatggccgcgcagctgctggaggagaagctgacctgcgccatctgcctggggctctaccaggacccagtgacgctgccctgcggccacaacttctgcggggcctgcatccgggactggtgggaccgctgcggaaaggcgtgccccgagtgccgggagccctttcccgacggcgccgagctgcgccgcaacgtggccctcagcggcgtgctggaggtggtgcgcgccgggcccgcccgggatcccggccccgatcccggccccggccccgaccctgccgcgcgctgcccccgccacgggcggccgctggagctcttctgccggaccgagggccgctgtgtgtgcagcgtgtgcaccgtgcgcgagtgtcgcctccacgagcgggcgctgctggatgccgagcgcctcaagcgcgaggcccagctgagagccagcctggaggttacccagcagcaggccacccaggccgaaggccagctactagagctgcgcaagcaaagcagccagatccagaactcggcctgcatcttggcctcctgggtctccggcaagttcagcagcctgctacaggccctggaaatacagcacacgacagcactgaggagcatcgaggtggccaagacgcaggcgctggcacaggctcgagacgaggagcagcggctgcgggtccatttggaggctgtggctcgccatggctgcaggatccgggagctcctggagcaggtggatgagcagaccttcctgcaggaatcgcagctcctccagcccccagggcctcttgggccactgacccctctgcagtgggatgaagaccaacagctgggtgacctgaagcagttgctaagccggctgtgtggcctcctcttggaagaggggagccaccctggggcaccagccaagcctgtggacttagcccccgtggaggccccaggtcccctggcaccggtcccaagcacagtttgtccactgaggaggaaactctggcagaattatcgcaatctgacctttgatccagtcagcgccaaccgtcacttctatctgtcgcgccaggaccagcaggtgaagcactgtcgtcagtcccggggcccaggcgggcccggcagctttgagctctggcaggtgcaatgtgcccagagcttccaggccgggcaccactactgggaggtgcgcgcgtcagaccactcggtgacactgggcgtctcctacccgcaactgccacggtgcaggctggggccccacacagacaacattggccggggaccctgctcctgggggctctgcgtccaggaggacagcctccaggcctggcacaacggggaagcccagcgcctcccaggggtgtcagggcggctcctgggcatggatttggacctggcctcaggctgcctcaccttctacagcctggagccccagacccagcccctgtacaccttccatgccctcttcaaccagcccctcacccccgtcttctggctcctcgagggtaggaccctgaccctgtgccatcagccaggggctgtgttccctctggggccccaggaagaggtgctcagctgaagaaggcatgggatggagccctggcatagctgccaccatgcctatgtgcccaagagctgcccagcttcagcttggggactggaggaccagctgttggcctctctgttaactcagaaagagatgggaggttgggggaggtgagcataaacgcagagttcactgttgcagcctttttgaaggggacacagtctaggagggggataaatgggatgcccttgccccagagagaacccagttctaggtactgtctgggcctgggaggcgagagcagtgcccaggggacttctgggcttacaggacagcgtgtgtgacaaaattcagatctacctgaacttgcctctggagatgataagggccaaaggagcagtcagggaggggcggtgagccagagtagtcccagggggagacagattcctccctcctccccgcctgcagctctctttaattttttgtaacatttggagagacgtccgtcctgtcttgtagtctttttattttgtgcatccttataattgtattctacaaacaattttgttttctgcatttaaacatttttgtgtttttaggagatggtcttgctctgtcactcaggctggagtacagtggcacaatcatggctcactgcagcctcgagctcctgagctcaaaggatcctcccacctcagcctccagagtagctcagattacagtgttttctgaagtttcctgacttaacataagcatttttcacatgattgaaaattttcactgattgctgtagtcattctaatgactatcaagtttatttatccattattggacatttaaatttctttctttttagctatacaaacattgatgtgttttttttgagacaggatctccatctgtcacccaggctggtgtgcaggggtgcggtcatgggctcatgggattctcctacctcagcctcctgagtagctgggattacaggtgtatgccaccacgcctggcttatgatgaatatttctgagtgggatgtttggccacatttatggtcatgtatgtaggctgttacctcaagtgagtcactcagggaacaatgagcacttgaagatttttttatacaaaaggccacagtgaggccaccttgagtcaagccgactaaggcccctcaaccctgtcactaagcagcacgtgacactggcaggaccttcatctccagcatcccacccctgggtgtgggactttggggcagccgtgtgtgcaggtgtcggcacaggctagctcctcctggtttggtgtggtgtttgccattgcagagcaagctgccacgaagacccctgggcatgattttgcttgtatttccggaagtggggttgctgggtcatagggcaggtgtaattttttttacttgaaatgttccacttcttgttctgggaggtggttccaagggtgtctgcttttggccaggcgcagtggctcacgcttgtaatcccagcactttgggaggggaggctgaggcagaagaatcgcttgaacccaggaggtgaggttgcagtgagctgagattgcaccactggactacagcctgggtgacagagcgagactctgtctcaaaaaaaaaaaaaaaaaagggagggctgtctgctttttgtaacttgaaaaactggacatctatgttatatgtactcatggataaatatttcacaataaaactttttaaaaggaaaaaaagtg

SEQ ID NO: 53845 - DNA, 2460 bp, Homo sapiens
ctgtgagcacgtgtgtgtgtgcatgttcgtatgcacgtgtgagtgaggggggcacttgttttgactgtcctgccgggacatctgagcctggtcccacccgctgcacacctcgtgcacatccaccctgaagcagacgcagccagtgtgcgttgaaggacagagtctggggcacagacccgtaattcttccacttaacactgagttaatggctctcagagccccagttttctcagctgtgaacggggctgatagaggattccgcctgcgaggtcgtggcgaggattaagtgctatggtgacggccggtgctcagcgtgcctggcggaggtttagcagcggataaatggagatctggttgtgctgtcttcccccacctccaggcctggcacaacggggaagcccagcgcctcccaggggtgtcagggcggctcctgggcatggatttggacctggcctcaggctgcctcaccttctacagcctggagccccagacccagcccctgtacaccttccatgccctcttcaaccagcccctcacccccgtcttctggctcctcgagggtaggaccctgaccctgtgccatcagccaggggctgtgttccctctggggccccaggaagaggtgctcagctgaagaaggcatgggatggagccctggcatagctgccaccatgcctatgtgcccaagagctgcccagcttcagcttggggactggaggaccagctgttggcctctctgttaactcagaaagagatgggaggttgggggaggtgagcataaacgcagagttcactgttgcagcctttttgaaggggacacagtctaggagggggataaatgggatgcccttgccccagagagaacccagttctaggtactgtctgggcctgggaggcgagagcagtgcccaggggacttctgggcttacaggacagcgtgtgtgacaaaattcagatctacctgaacttgcctctggagatgataagggccaaaggagcagtcagggaggggcggtgagccagagtagtcccagggggagacagattcctccctcctccccgcctgcagctctctttaattttttgtaacatttggagagacgtccgtcctgtcttgtagtctttttattttgtgcatccttataattgtattctacaaacaattttgttttctgcatttaaacatttttgtgtttttaggagatggtcttgctctgtcactcaggctggagtacagtggcacaatcatggctcactgcagcctcgagctcctgagctcaaaggatcctcccacctcagcctccagagtagctcagattacagtgttttctgaagtttcctgacttaacataagcatttttcacatgattgaaaattttcactgattgctgtagtcattctaatgactatcaagtttatttatccattattggacatttaaatttctttctttttagctatacaaacattgatgtgttttttttgagacaggatctccatctgtcacccaggctggtgtgcaggggtgcggtcatgggctcatgggattctcctacctcagcctcctgagtagctgggattacaggtgtatgccaccacgcctggcttatgatgaatatttctgagtgggatgtttggccacatttatggtcatgtatgtaggctgttacctcaagtgagtcactcagggaacaatgagcacttgaagatttttttatacaaaaggccacagtgaggccaccttgagtcaagccgactaaggcccctcaaccctgtcactaagcagcacgtgacactggcaggaccttcatctccagcatcccacccctgggtgtgggactttggggcagccgtgtgtgcaggtgtcggcacaggctagctcctcctggtttggtgtggtgtttgccattgcagagcaagctgccacgaagacccctgggcatgattttgcttgtatttccggaagtggggttgctgggtcatagggcaggtgtaattttttttacttgaaatgttccacttcttgttctgggaggtggttccaagggtgtctgcttttggccaggcgcagtggctcacgcttgtaatcccagcactttgggaggccgaggcaggcggatcacaaggtcaggagttcgagaccagcctggccaacaaggcaaaaccccgtctctactaaaaatacaaaaattagccgggcatggtggtgtgcgcctgtaatcccagctactggggaggctgaggcagaagaatcgcttgaacccaggaggtgaggttgcagtgagctgagattgcaccactggactacagcctgggtgacagagcgagactctgtctcaaaaaaaaaaaaaaaaaagggagggctgtctgctttttgtaacttgaaaaactggacatctatgttatatgtactcatggataaatatttcacaataaaactttttaaaaggaaaaaaagtg

SEQ ID NO: 53846 - DNA, 1794 bp, Homo sapiens
taggctaggtacgaggctgggtggctgcccagcttcagcttggggactggaggaccagctgttggcctctctgttaactcagaaagagatgggaggttgggggaggtgagcataaacgcagagttcactgttgcagcctttttgaaggggacacagtctaggagggggataaatgggatgcccttgccccagagagaacccagttctaggtactgtctgggcctgggaggcgagagcagtgcccaggggacttctgggcttacaggacagcgtgtgtgacaaaattcagatctacctgaacttgcctctggagatgataagggccaaaggagcagtcagggaggggcggtgagccagagtagtcccagggggagacagattcctccctcctccccgcctgcagctctctttaattttttgtaacatttggagagacgtccgtcctgtcttgtagtctttttattttgtgcatccttataattgtattctacaaacaattttgttttctgcatttaaacatttttgtgtttttaggagatggtcttgctctgtcactcaggctggagtacagtggcacaatcatggctcactgcagcctcgagctcctgagctcaaaggatcctcccacctcagcctccagagtagctcagattacagtgttttctgaagtttcctgacttaacataagcatttttcacatgattgaaaattttcactgattgctgtagtcattctaatgactatcaagtttatttatccattattggacatttaaatttctttctttttagctatacaaacattgatgtgttttttttgagacaggatctccatctgtcacccaggctggtgtgcaggggtgcggtcatgggctcatgggattctcctacctcagcctcctgagtagctgggattacaggtgtatgccaccacgcctggcttatgatgaatatttctgagtgggatgtttggccacatttatggtcatgtatgtaggctgttacctcaagtgagtcactcagggaacaatgagcacttgaagatttttttatacaaaaggccacagtgaggccaccttgagtcaagccgactaaggcccctcaaccctgtcactaagcagcacgtgacactggcaggaccttcatctccagcatcccacccctgggtgtgggactttggggcagccgtgtgtgcaggtgtcggcacaggctagctcctcctggtttggtgtggtgtttgccattgcagagcaagctgccacgaagacccctgggcatgattttgcttgtatttccggaagtggggttgctgggtcatagggcaggtgtaattttttttacttgaaatgttccacttcttgttctgggaggtggttccaagggtgtctgcttttggccaggcgcagtggctcacgcttgtaatcccagcactttgggaggccgaggcaggcggatcacaaggtcaggagttcgagaccagcctggccaacaaggcaaaaccccgtctctactaaaaatacaaaaattagccgggcatggtggtgtgcgcctgtaatcccagctactggggaggctgaggcagaagaatcgcttgaacccaggaggtgaggttgcagtgagctgagattgcaccactggactacagcctgggtgacagagcgagactctgtctcaaaaaaaaaaaaaaaaaagggagggctgtctgctttttgtaacttgaaaaactggacatctatgttatatgtactcatggataaatatttcacaataaaactttttaaaaggaaaaaaagtg

SEQ ID NO: 53847 - DNA, 1356 bp, Homo sapiens
ccctgagcgcgcgaggcccgcggtccctttaagacgcccggggcccgcctggctctcgccgccgccgggccatggccgcgcagctgctggaggagaagctgacctgcgccatctgcctggggctctaccaggacccagtgacgctgccctgcggccacaacttctgcggggcctgcatccgggactggtgggaccgctgcggaaaggcgtgccccgagtgccgggagccctttcccgacggcgccgagctgcgccgcaacgtggccctcagcggcgtgctggaggtggtgcgcgccgggcccgcccgggatcccggccccgatcccggccccggccccgaccctgccgcgcgctgcccccgccacgggcggccgctggagctcttctgccggaccgagggccgctgtgtgtgcagcgtgtgcaccgtgcgcgagtgtcgcctccacgagcgggcgctgctggatgccgagcgcctcaagcgcgaggcccagctgagagccagcctggaggttacccagcagcaggccacccaggccgaaggccagctactagagctgcgcaagcaaagcagccagatccagaactcggcctgcatcttggcctcctgggtctccggcaagttcagcagcctgctacaggccctggaaatacagcacacgacagcactgaggagcatcgaggtggccaagacgcaggcgctggcacaggctcgagacgaggagcagcggctgcgggtccatttggaggctgtggctcgccatggctgcaggatccgggagctcctggagcaggtggatgagcagaccttcctgcaggaatcgcagctcctccagcccccagggcctcttgggccactgacccctctgcagtgggatgaagaccaacagctgggtgacctgaagcagttgctaagccggctgtgtggcctcctcttggaagaggggagccaccctggggcaccagccaagcctgtggacttagcccccgtggattatcgcaatctgacctttgatccagtcagcgccaaccgtcacttctatctgtcgcgccaggaccagcaggttgaatcctgttccctgaaaaagacgtattcggatcctaacccccaggacctgtggctgtgaccttatttggaaatagagtattttcagatgtgactgagttaagatgagggcatactggagtagagcgtgccctaatccaacaactggtgtcctgataagaggaaatgggcaccgggcacagtgtcacgcctgtaatcctagcactttgggaggctgaggcaggcagattactcgagcccagcagtttgagtgggcaacagagcaagactccctaaaaaaaaaaaaaaaaagg

SEQ ID NO: 53848 - DNA, 329 bp, Homo sapiens
cggccgctggagctcttctgccggaccgagggccgctgtgtgtgcagcgtgtgcaccgtgcgcgagtgtcgcctccacgagcgggcgctgctggatgccgagcgcctcaagcgcgaggtgacgcatccgccgggagcgggaggggtccggacccgccgcagcctggccaccgccgggtgactcctgcgggccgcgccctgctctctcgggcacccggcgggggcggggagcctcatctgtaaggggcttctcccaacctgggagctgattataaaagtcgtgggtctgccaggcgcagtggctcacgactgtaatcccagcactttggg

SEQ ID NO: 53849 - DNA, 1461 bp, Homo sapiens
ccctgagcgcgcgaggcccgcggtccctttaagacgcccggggcccgcctggctctcgccgccgccgggccatggccgcgcagctgctggaggagaagctgacctgcgccatctgcctggggctctaccaggacccagtgacgctgccctgcggccacaacttctgcggggcctgcatccgggactggtgggaccgctgcggaaaggcgtgccccgagtgccgggagccctttcccgacggcgccgagctgcgccgcaacgtggccctcagcggcgtgctggaggtggtgcgcgccgggcccgcccgggatcccggccccgatcccggccccggccccgaccctgccgcgcgctgcccccgccacgggcggccgctggagctcttctgccggaccgagggccgctgtgtgtgcagcgtgtgcaccgtgcgcgagtgtcgcctccacgagcgggcgctgctggatgccgagcgcctcaagcgcgaggcccagctgagagccagcctggaggttacccagcagcaggccacccaggccgaaggccagctactagagctgcgcaagcaaagcagccagatccagaactcggcctgcatcttggcctcctgggtctccggcaagttcagcagcctgctacaggccctggaaatacagcacacgacagcactgaggagcatcgaggtggccaagacgcaggcgctggcacaggctcgagacgaggagcagcggctgcgggtccatttggaggctgtggctcgccatggctgcaggatccgggagctcctggagcaggtggatgagcagaccttcctgcaggaatcgcagctcctccagcccccagggcctcttgggccactgacccctctgcagtgggatgaagaccaacagctgggtgacctgaagcagttgctaagccggctgtgtggcctcctcttggaagaggggagccaccctggggcaccagccaagcctgtggacttagcccccgtggattatcgcaatctgacctttgatccagtcagcgccaaccgtcacttctatctgtcgcgccaggaccagcaggtgaagcactgtcgtcagtcccggggcccaggcgggcccggcagctttgagctctggcaggtgcaatgtgcccagagcttccaggccgggcaccactactgggaggttgaatcctgttccctgaaaaagacgtattcggatcctaacccccaggacctgtggctgtgaccttatttggaaatagagtattttcagatgtgactgagttaagatgagggcatactggagtagagcgtgccctaatccaacaactggtgtcctgataagaggaaatgggcaccgggcacagtgtcacgcctgtaatcctagcactttgggaggctgaggcaggcagattactcgagcccagcagtttgagtgggcaacagagcaagactccctaaaaaaaaaaaaaaaaagg

SEQ ID NO: 53850 - DNA, 3451 bp, Homo sapiens
ccctgagcgcgcgaggcccgcggtccctttaagacgcccggggcccgcctggctctcgccgccgccgggccatggccgcgcagctgctggaggagaagctgacctgcgccatctgcctggggctctaccaggacccagtgacgctgccctgcggccacaacttctgcggggcctgcatccgggactggtgggaccgctgcggaaaggcgtgccccgagtgccgggagccctttcccgacggcgccgagctgcgccgcaacgtggccctcagcggcgtgctggaggtggtgcgcgccgggcccgcccgggatcccggccccgatcccggccccggccccgaccctgccgcgcgctgcccccgccacgggcggccgctggagctcttctgccggaccgagggccgctgtgtgtgcagcgtgtgcaccgtgcgcgagtgtcgcctccacgagcgggcgctgctggatgccgagcgcctcaagcgcgaggcccagctgagagccagcctggaggttacccagcagcaggccacccaggccgaaggccagctactagagctgcgcaagcaaagcagccagatccagaactcggcctgcatcttggcctcctgggtctccggcaagttcagcagcctgctacaggccctggaaatacagcacacgacagcactgaggagcatcgaggtggccaagacgcaggcgctggcacaggctcgagacgaggagcagcggctgcgggtccatttggaggctgtggctcgccatggctgcaggatccgggagctcctggagcaggtggatgagcagaccttcctgcaggaatcgcagctcctccagcccccagggcctcttgggccactgacccctctgcagtgggatgaagaccaacagctgggtgacctgaagcagttgctaagccggctgtgtggcctcctcttggaagaggggagccaccctggggcaccagccaagcctgtggacttagcccccgtggaggccccaggtcccctggcaccggtcccaagcacagtttgtccactgaggaggaaactctggcagaattatcgcaatctgacctttgatccagtcagcgccaaccgtcacttctatctgtcgcgccaggaccagcaggtgaagcactgtcgtcagtcccggggcccaggcgggcccggcagctttgagctctggcaggtgcaatgtgcccagagcttccaggccgggcaccactactgggaggtgcgcgcgtcagaccactcggtgacactgggcgtctcctacccgcaactgccacggtgcaggctggggccccacacagacaacattggccggggaccctgctcctgggggctctgcgtccaggaggacagcctccaggcctggcacaacggggaagcccagcgcctcccaggggtgtcagggcggctcctgggcatggatttggacctggcctcaggctgcctcaccttctacagcctggagccccagacccagcccctgtacaccttccatgccctcttcaaccagcccctcacccccgtcttctggctcctcgagggtaggaccctgaccctgtgccatcagccaggggctgtgttccctctggggccccaggaagaggtgctcagctgaagaaggcatgggatggagccctggcatagctgccaccatgcctatgtgcccaagagctgcccagcttcagcttggggactggaggaccagctgttggcctctctgttaactcagaaagagatgggaggttgggggaggtgagcataaacgcagagttcactgttgcagcctttttgaaggggacacagtctaggagggggataaatgggatgcccttgccccagagagaacccagttctaggtactgtctgggcctgggaggcgagagcagtgcccaggggacttctgggcttacaggacagcgtgtgtgacaaaattcagatctacctgaacttgcctctggagatgataagggccaaaggagcagtcagggaggggcggtgagccagagtagtcccagggggagacagattcctccctcctccccgcctgcagctctctttaattttttgtaacatttggagagacgtccgtcctgtcttgtagtctttttattttgtgcatccttataattgtattctacaaacaattttgttttctgcatttaaacatttttgtgtttttaggagatggtcttgctctgtcactcaggctggagtacagtggcacaatcatggctcactgcagcctcgagctcctgagctcaaaggatcctcccacctcagcctccagagtagctcagattacagtgttttctgaagtttcctgacttaacataagcatttttcacatgattgaaaattttcactgattgctgtagtcattctaatgactatcaagtttatttatccattattggacatttaaatttctttctttttagctatacaaacattgatgtgttttttttgagacaggatctccatctgtcacccaggctggtgtgcaggggtgcggtcatgggctcatgggattctcctacctcagcctcctgagtagctgggattacaggtgtatgccaccacgcctggcttatgatgaatatttctgagtgggatgtttggccacatttatggtcatgtatgtaggctgttacctcaagtgagtcactcagggaacaatgagcacttgaagatttttttatacaaaaggccacagtgaggccaccttgagtcaagccgactaaggcccctcaaccctgtcactaagcagcacgtgacactggcaggaccttcatctccagcatcccacccctgggtgtgggactttggggcagccgtgtgtgcaggtgtcggcacaggctagctcctcctggtttggtgtggtgtttgccattgcagagcaagctgccacgaagacccctgggcatgattttgcttgtatttccggaagtggggttgctgggtcatagggcaggtgtaattttttttacttgaaatgttccacttcttgttctgggaggtggttccaagggtgtctgcttttggccaggcgcagtggctcacgcttgtaatcccagcactttgggaggccgaggcaggcggatcacaaggtcaggagttcgagaccagcctggccaacaaggcaaaaccccgtctctactaaaaatacaaaaattagccgggcatggtggtgtgcgcctgtaatcccagctactggggaggctgaggcagaagaatcgcttgaacccaggaggtgaggttgcagtgagctgagattgcaccactggactacagcctgggtgacagagcgagactctgtctcaaaaaaaaaaaaaaaaaagggagggctgtctgctttttgtaacttgaaaaactggacatctatgttatatgtactcatggataaatatttcacaataaaactttttaaaaggaaaaaaagtg

SEQ ID NO: 53851 - DNA, 2778 bp, Homo sapiens
ccctgagcgcgcgaggcccgcggtccctttaagacgcccggggcccgcctggctctcgccgccgccgggccatggccgcgcagctgctggaggagaagctgacctgcgccatctgcctggggctctaccaggacccagtgacgctgccctgcggccacaacttctgcggggcctgcatccgggactggtgggaccgctgcggaaaggcgtgccccgagtgccgggagccctttcccgacggcgccgagctgcgccgcaacgtggccctcagcggcgtgctggaggtggtgcgcgccgggcccgcccgggatcccggccccgatcccggccccggccccgaccctgccgcgcgctgcccccgccacgggcggccgctggagctcttctgccggaccgagggccgctgtgtgtgcagcgtgtgcaccgtgcgcgagtgtcgcctccacgagcgggcgctgctggatgccgagcgcctcaagcgcgaggcccagctgagagccagcctggaggttacccagcagcaggccacccaggccgaaggccagctactagagctgcgcaagcaaagcagccagatccagaactcggcctgcatcttggcctcctgggtctccggcaagttcagcagcctgctacaggccctggaaatacagcacacgacagcactgaggagcatcgaggtggccaagacgcaggcgctggcacaggctcgagacgaggagcagcggctgcgggtccatttggaggctgtggctcgccatggctgcaggatccgggagctcctggagcaggtggatgagcagaccttcctgcaggaatcgcagctcctccagcccccagggcctcttgggccactgacccctctgcagtgggatgaagaccaacagctgggtgacctgaagcagttgctaagccggctgtgtggcctcctcttggaagaggggagccaccctggggcaccagccaagcctgtggacttagcccccgtggaggccccaggtcccctggcaccggtcccaagcacagtttgtccactgaggaggaaactctggcagaattatcgcaatctgacctttgatccagtcagcgccaaccgtcacttctatctgtcgcgccaggaccagcaggtgaagcactgtcgtcagtcccggggcccaggcgggcccggcagctttgagctctggcaggtgcaatgtgcccagagcttccaggccgggcaccactactgggaggtgcgcgcgtcagaccactcggtgacactgggcgtctcctacccgcaactgccacggtgcaggctggggccccacacagacaacattggccggggaccctgctcctgggggctctgcgtccaggaggacagcctccaggcctggcacaacggggaagcccagcgcctcccaggggtgtcagggcggctcctgggcatggatttggacctggcctcaggctgcctcaccttctacagcctggagccccagacccagcccctgtacaccttccatgccctcttcaaccagcccctcacccccgtcttctggctcctcgagggtaggaccctgaccctgtgccatcagccaggggctgtgttccctctggggccccaggaagaggtgctcagctgaagaaggcatgggatggagccctggcatagctgccaccatgcctatgtgcccaagagctgcccagcttcagcttggggactggaggaccagctgttggcctctctgttaactcagaaagagatgggaggttgggggaggtgagcataaacgcagagttcactgttgcagcctttttgaaggggacacagtctaggagggggataaatgggatgcccttgccccagagagaacccagttctaggtactgtctgggcctgggaggcgagagcagtgcccaggggacttctgggcttacaggacagcgtgtgtgacaaaattcagatctacctgaacttgcctctggagatgataagggccaaaggagcagtcagggaggggcggtgagccagagtagtcccagggggagacagattcctccctcctccccgcctgcagctctctttaattttttgtaacatttggagagacgtccgtcctgtcttgtagtctttttattttgtgcatccttataattgtattctacaaacaattttgttttctgcatttaaacatttttgtgtttttaggagatggtcttgctctgtcactcaggctggagtacagtggcacaatcatggctcactgcagcctcgagctcctgagctcaaaggatcctcccacctcagcctccagagtagctcagattacagtgttttctgaagtttcctgacttaacataagcatttttcacatgattgaaaattttcactgattgctgtagtcattctaatgactatcaagtttatttatccattattggacatttaaatttctttctttttagctatacaaacattgatgtgttttttttgagacaggatctccatctgtcacccaggctggtgtgcaggggtgcggtcatgggctcatgggattctcctacctcgggaggctgaggcagaagaatcgcttgaacccaggaggtgaggttgcagtgagctgagattgcaccactggactacagcctgggtgacagagcgagactctgtctcaaaaaaaaaaaaaaaaaagggagggctgtctgctttttgtaacttgaaaaactggacatctatgttatatgtactcatggataaatatttcacaataaaactttttaaaaggaaaaaaagtg

SEQ ID NO: 53852 - DNA, 2730 bp, Homo sapiens
ccctgagcgcgcgaggcccgcggtccctttaagacgcccggggcccgcctggctctcgccgccgccgggccatggccgcgcagctgctggaggagaagctgacctgcgccatctgcctggggctctaccaggacccagtgacgctgccctgcggccacaacttctgcggggcctgcatccgggactggtgggaccgctgcggaaaggcgtgccccgagtgccgggagccctttcccgacggcgccgagctgcgccgcaacgtggccctcagcggcgtgctggaggtggtgcgcgccgggcccgcccgggatcccggccccgatcccggccccggccccgaccctgccgcgcgctgcccccgccacgggcggccgctggagctcttctgccggaccgagggccgctgtgtgtgcagcgtgtgcaccgtgcgcgagtgtcgcctccacgagcgggcgctgctggatgccgagcgcctcaagcgcgaggcccagctgagagccagcctggaggttacccagcagcaggccacccaggccgaaggccagctactagagctgcgcaagcaaagcagccagatccagaactcggcctgcatcttggcctcctgggtctccggcaagttcagcagcctgctacaggccctggaaatacagcacacgacagcactgaggagcatcgaggtggccaagacgcaggcgctggcacaggctcgagacgaggagcagcggctgcgggtccatttggaggctgtggctcgccatggctgcaggatccgggagctcctggagcaggtggatgagcagaccttcctgcaggaatcgcagctcctccagcccccagggcctcttgggccactgacccctctgcagtgggatgaagaccaacagctgggtgacctgaagcagttgctaagccggctgtgtggcctcctcttggaagaggggagccaccctggggcaccagccaagcctgtggacttagcccccgtggaggccccaggtcccctggcaccggtcccaagcacagtttgtccactgaggaggaaactctggcagaattatcgcaatctgacctttgatccagtcagcgccaaccgtcacttctatctgtcgcgccaggaccagcaggtgaagcactgtcgtcagtcccggggcccaggcgggcccggcagctttgagctctggcaggtgcaatgtgcccagagcttccaggccgggcaccactactgggaggtgcgcgcgtcagaccactcggtgacactgggcgtctcctacccgcaactgccacggtgcaggctggggccccacacagacaacattggccggggaccctgctcctgggggctctgcgtccaggaggacagcctccaggcctggcacaacggggaagcccagcgcctcccaggggtgtcagggcggctcctgggcatggatttggacctggcctcaggctgcctcaccttctacagcctggagccccagacccagcccctgtacaccttccatgccctcttcaaccagcccctcacccccgtcttctggctcctcgagggtaggaccctgaccctgtgccatcagccaggggctgtgttccctctggggccccaggaagaggtgctcagctgaagaaggcatgggatggagccctggcatagctgccaccatgcctatgtgcccaagagctgcccagcttcagcttggggactggaggaccagctgttggcctctctgttaactcagaaagagatgggaggttgggggaggtgagcataaacgcagagttcactgttgcagcctttttgaaggggacacagtctaggagggggataaatgggatgcccttgccccagagagaacccagttctaggtactgtctgggcctgggaggcgagagcagtgcccaggggacttctgggcttacaggacagcgtgtgtgacaaaattcagatctacctgaacttgcctctggagatgataagggccaaaggagcagtcagggaggggcggtgagccagagtagtcccagggggagacagattcctccctcctccccgcctgcagctctctttaattttttgtaacatttggagagacgtccgtcctgtcttgtagtctttttattttgtgcatccttataattgtattctacaaacaattttgttttctgcatttaaacatttttgtgtttttaggagatggtcttgctctgtcactcaggctggagtacagtggcacaatcatggctcactgcagcctcgagctcctgagctcaaaggatcctcccacctcagcctccagagtagctcagattacagtgttttctgaagtttcctgacttaacataagcatttttcacatgattgaaaattttcactgattgctgtagtcattctaatgactatcaagtttatttatccattattggacatttaaatttctttctttttagctatacaaacattgatccgggcatggtggtgtgcgcctgtaatcccagctactggggaggctgaggcagaagaatcgcttgaacccaggaggtgaggttgcagtgagctgagattgcaccactggactacagcctgggtgacagagcgagactctgtctcaaaaaaaaaaaaaaaaaagggagggctgtctgctttttgtaacttgaaaaactggacatctatgttatatgtactcatggataaatatttcacaataaaactttttaaaaggaaaaaaagtg

SEQ ID NO: 53853 - DNA, 273 bp, Homo sapiens
ctcctgcctcaggctcccaagtagctgagattacaggcacccaccaccacacccagctaatttttgcatttttagtagagacggggcttccccaggctggtctgttggccaggctggtctcaggctcctgacaatttcttatgattggaaaaagcagacatagacgacgtatttactgcaagagacaacagggatgtagattctttatttcaccagttgagacagaaagagagagcatctcaactgggaaggcaaattctgagacaaagaagt

SEQ ID NO: 53854 - DNA, 374 bp, Homo sapiens
ctacagcctgggcaacagagcaagactccatctcaaaaacaaaaacaaaaacaaaatacaatcaaataaattaattaaaatagtgctgctattttttcaagaggctaaggtcctgactgggcatcgtggctcatgcctgtaatcccagcaccttgggaggctgaggcaggtgaatcacctgaggtcaggagttcgagaccagcctgaccaacatagtgaaaccccgtctctagtaaatagaaaataaagtagctgggtgtggtggcgcgagcctgtaatcctagttacttgggaggctgaggcaggagaatcacttgaacctgggaggtggaggttgcagtgagccaagattacaccactgtagtccagtccag

SEQ ID NO: 53855 - DNA, 482 bp, Homo sapiens
ttgggagacagggtctcactctgtcacccaagctggagtgcagggacctaatcacagctcactgtagccttgacctccctgggctcagcctgggcgacagaatgagacttcctctccaaaaacaaacaaacaaacaaacaaacaaacaaacaaaagccctcaccaagaaaatgaacccaataatgatgagccagaccttaaacagacacctcacatctggcagtttcttacaaaactaaacatattcttttcataagatccagcaactgtacttcttagaatttactcaaatgagttgaaacatatgtccacacacgtttatagcaactttacacacaactgactgacaaaacttggaagcaaccaagacgtccttcggtaggtgaatagacagataaactgtgctaaaagaaatgagctctaagtcttgaaaagacatggaagaactttaaatgcatattattaagtgaaagaagccaatt

SEQ ID NO: 53856 - DNA, 399 bp, Homo sapiens
tatttccaccttgttggtcccccacttcctctccaaaaacaaacaaacaaacaaacaaacaaacaaacaaaagccctcaccaagaaaatgaacccaataatgatgagccagaccttaaacagacacctcacatctggcagtttcttacaaaactaaacatattcttttcataagatccagcaactgtacttcttagaatttactcaaatgagttgaaacatatgtccacacacgtttatagcaactttacacacaactgactgacaaaacttggaagcaaccaagacgtccttcggtaggtgaatagacagataaactgtgctaaaagaaatgagctctaagtcttgaaaagacatggaagaactttaaatgcatattattaagtgaaagaagccaatt

SEQ ID NO: 53857 - DNA, 326 bp, Homo sapiens
cggaccaattcctacccaagtggcctccagctgtccgttagctccgcgtctcctgttccccatctgcaagacagggatagcaatagtgcttgtctcctagagtcgttgggaggtttaactgagctaacatttgcaaagggcctggggcagagcctggcacatggcaagtgccacatgagcgtctgtgttataaaagctcgcccagggctgggtgcagtggctcacgcctgtaatcccagcaatttgggaggtcaagtcgggtggatcacctgaggtcaagagttcgagaccagccaggccaacatggtgaaaactcctctctacta

SEQ ID NO: 53858 - DNA, 2540 bp, Homo sapiens
  misc_feature (45)..(45): n is a, c, g, or t
caatttttaagaaatgatcatctagggaaaatgttttaaaatctnttaaaatatctttttgttatactttaaaactgccttcagctgcctattggtaaataaggtctggatatcagtacatgacaacatatactaatgaattgaactgtgaattaggaatgaaaattgcctagaaatttttttatgagttattaggattaaagtaagaatttcctttgctgggctgtgtaggcactaagattccgtggttgttggaggggttaaatttggatctactagtgcatatattttaccgaggattcataaaaacacgacagggagcctgggtcaatccattaccatgtacaagcagtgaccaatagaaaaggaagaagaagatccaagaaggctgaggtaagcagtcttctgaagccctgtcaaagtggaaacaatagatcaaaggtgttcatggtgactgggacgagtaggtttcactgtttcttataggagacttgacagcttaaagtaaaaacaaattattttcgtcaaagtttttttttttctcttaactgatttttagcaaacctcagactgagacacaggactcaacggtgtattcctggaaggcaaggtgctataatggcaggcacaatctgtttcatcatgtgggtgttattcataacagacactgtgtggtctagaagtgtaaggcaggtctatgaagtacatgattcagatgattggactattcatgacttcgagtgtcccatggaatgtttctgcccacccagttttcctactgctttatattgtgaaaatagaggtctcaaagaaattcctgctattccttcaagaatttggtatctttatcttcaaaacaacctgatagaaaccattcctgagaagccattcgagaatgccacccagctaagatggataaatctaaataagaacaaaataaccaactacggaattgaaaaaggagccctaagccagctgaagaagttgctcttcttatttctggaagataatgagctagaggaggtaccttctccattgccaagaagtttagaacaattacaattagctagaaataaggtgtccagaattcctcaagggacctttagcaatctggagaacctgacccttcttgacctacagaacaacaaattagtggacaatgcctttcaaagagacacttttaaaggactcaagaatctcatgcagctaaacatggccaagaatgccctgaggaatatgcctccaagattaccagccaatacaatgcagttgtttttagacaacaattccattgaaggaataccagaaaattattttaatgtgattcctaaagtggcctttttgagactaaatcacaacaaactgtcagatgagggtctcccatcaagaggatttgatgtatcatcaattctagatcttcaactgtcgcacaatcaactcacaaaggttccccgaatcagtgctcatctgcagcaccttcaccttgatcataacaaaattaaaagtgtgaatgtctctgtaatatgtcccagcccatccatgctgcctgcagaacgagattccttcagttatggacctcatcttcgctacctccgtctggatggaaatgaaatcaaaccaccaattccaatggctttaatgacctgcttcagacttctgcaggctgtcattatttaaacacattctcaccaaatctaaaattagtttaatgagctgtttctgacatgaatgtggttaccattaataggtttaggacacaagtcatattcccattgctctcggccaccattttcatttgtgcagtgtatttttctattcaaagatgcttttgccagtcacatgcatcacagcctgcattaatttgcttctctcttaattaataacacagacacagagttaagatagtttatcaactcaaagatagttttattttggtctcttccatagcttattaacactaaagaaaacaattacatccttatacaataaaagggacacatttgtgtatgtttaaaattacttatgcagataccgtaatttacagtataaatgtaataatcaaacaggaggataacgacctgaagaaaatgagaaaataaaatatttcttaattgtaatcataataaaacaattgcagattgctaagtagctgttggtggtacaagtttgatatttagcttgagaatgggtatggaatgaatcaaatacttcatcactaaagaattcttgttatttaatatcaaataatgaaacagcagtcacttctagttcattaccatttcttgtagctgttgtttttagatatagtccactgcattcttataagttctaaattttatgtttattataatgcatttcttgtggaatcttagtgttttaacatttgaaatccacttaaactgcaaattgttctttatatttgattgtgttttttggattttctaaataaaaatattgaatgctttctaacaaaacagaatatttcaaagaaattagcaagcttcattaaagaacatgttttaataaaaatgtgttatagt

SEQ ID NO: 53859 - DNA, 1752 bp, Homo sapiens
aataaaataaaaatcaacacataagcaagttgccaatttatattatgagctaacatctagtcagaaaaatattctccatttactacttatttgtgtaattgaaatatgtagaataaaaatgagcattgtttttgagaagatatttagaagccattttcttacaaagcaattaaactaaaaactgtgaaaaaccagggcaatgttcctcaaaatttgcagttgatgtgtttgaaatctgaaatttcacaatttttatttttcaaggctatactatttaaattattgatggcaaaacagaatcaattttaagcaaatatagtaatttagaaagtaaattgaaaaaaagaaggtgaaagttattttctcaatcatgcaactgagagacacgcaatattggcagaatctgacctgttacacagaatgaaataatatcttgctgacataatcacaagggcttattgttttcgcataactatgtttacaataatgttgatgccaaactatgctgtttaaaaaacaacaacaaaaaaaaaacaacaaaaggattttgaactgctgtaaagcgagtatacagcagatggcggtgttacttctcttacagttctgctttgatatttactctgtaccattcttcctcctagtggaagatttagaaagaaatgatggttctactgcaagaccttattatgtgagtcaacctttgctgaagattttccaggaggaaaatccacaaactaggaagcagtagaagagcaaactggtcgtcctacagctgtgtgttaccttttctccatctgctgtgtctgtgcaacatttgtttcataagtgctttgtgtttagcaacactgtattcacgaccttgttggcttgcatttgcatgttttataccaaagcttatactgtactatgtgaagccatcagaagtcgcaagggaattgttaataacataaaacatttttatactaagatcatttgttttgtaattcgtttttaaagagtggcttggatgttttgaaaatactactgaatatgttaatattcttttaaatcttagattgaaaaatgatacattacttaaattgatagctcctaatatatttttaaaattacaactaaaagaagacttcttctgcagggaaaattggtcagcaaagtgaaattaaaaattttaaagtttttcccactctcgttggacagtaaatcagtgaaaggactgccccagttgagagtttgctctctttaagtatagaatgtttcctcttaaacaaattgccaatcatccagcctttactacttagccctctgacaaagtgccttactggctatttaatattacccagcttttatgggcaagtttacaaacattgttttttaaaaaattaaaacctgcaatgtttcgtgattaaaacaagtcttattgcatttgtttcactcttagctcactgattggaaaacatttgtcattttgctctgtttgatatcctcactattatggaatacattgtgcagctaaacaatttcccttgcgcctagtggacattcatgaatgtgtactacacgcaagaagaaacaaaccccgaaagaacacttgttggatttctttgtttttttttttactaaaagagaagttttaaaatgaaatgttttctatagtagatctttgaaaatacaataggtataatactgcatttctcagtgttttacaaagatcagaaagagaaacttctaggaattgcaaagggaaactttact

SEQ ID NO: 53860 - DNA, 477 bp, Homo sapiens
gatactcagagttgcagttacagatgaagttacatactttgtattattcctggggaaacttctagttgctggaagtataggtgttctggccttcctattcttcacacaaagactgccagtgattgcacaaggaccagcatctttaaattactactgggtacctttgctgacagtcatttttgggtcttacctgattgcacatgggttcttcagcgtctatgcaatgtgtgttgaaacaattttcatctgcttctgtgaagatctggaaagaaatgatggatctacagaaaaaccctacttcgtaacccctaacctgcatggaattctgatcaagaagcaactagttccccagaagcagaaagagtagaaaagctccaaacagtgtcactcatttttaagtagaagttgtgtaaattaggttgattgtaatttggaaatgttgcttttgagtaatgtgaaatttctgtgcttaattct

SEQ ID NO: 53861 - DNA, 883 bp, Homo sapiens
gatactcagagttgcagttacagatgaagttacatactttgtattattcctggggaaacttctagttgctggaagtataggtgttctggccttcctattcttcacacaaagactgccagtgattgcacaaggaccagcatctttaaattactactgggtacctttgctgacagtcatttttgggtcttacctgattgcacatgggttcttcagcgtctatgcaatgtgtgttgaaacaattttcatctgcttctgtgagtattcagtatgtgtgttttcccccttcggtggataactgaaaggtgagatggtgaaggcccatgtccttagctggcttggggatctgctgttacctggctgcaaccacaaaacgtgtttatctggaaagagatattgcttagtagatgttatttaaaccataatacctgagaaataagtcagatgcagaaagacaaatacttcatgatctcacttacatgtggaatctaaaaatgtcaaactcatagaaacagagtagaggggtgatgaccagagattgaggggtcagtaaaatagagagatgttggtcaaagggtacaaactttcagttatgcaggatgaataaattatggcactcacatgtacagcatggtgactatagttaataatactgtattgttaacttgaaatttgctaagctcgttagtattctcaccacacacacacaaagataactatgggaggttatggacatgttcattagcttgactgtggcaatcattttactatatatgcatatatcaaaacattacacaccttaaatatttacagttgttatttattaattatatctcaataaagttggataaaaaaattatacctcaacaaggcttagagaaaaata

SEQ ID NO: 53862 - DNA, 608 bp, Homo sapiens
gatactcagagttgcagttacagatgaagttacatactttgtattattcctggggaaacttctagttgctggaagtataggtgttctggccttcctattcttcacacaaagactgccagtgattgcacaaggaccagcatctttaaattactactgggtacctttgctgacagtcatttttgggtcttacctgattgcacatgggttcttcagcgtctatgcaatgtgtgttgaaacaattttcatctgcttctgtgagtattcagtatgtgtgttttcccccttcggtggataactgaaaggtgagatggtgaaggcccatgtccttagctggcttggggatctgctgttacctggctgcaaccacaaaacgtgtttatctggaaagagatattgcttagtagatgttatttaaaccataatacctgagaaataagtcagatgcagaaagacaaatacttcatgatctcacttacatgtggaatctaaaaatgtcaaactcatagttatctttgtgtgtgtgtggtgagaatactaacgagcttagcaaatttcaagttaacaatacagtattattaactatggtcaccatgctgtacatgtgagtc

SEQ ID NO: 53863 - DNA, 1365 bp, Homo sapiens
gatactcagagttgcagttacagatgaagttacatactttgtattattcctggggaaacttctagttgctggaagtataggtgttctggccttcctattcttcacacaaagactgccagtgattgcacaaggaccagcatctttaaattactactgggtacctttgctgacagtcatttttgggtcttacctgattgcacatgggttcttcagcgtctatgcaatgtgtgttgaaacaattttcatctgcttcttggaagatttagaaagaaatgatggttctactgcaagaccttattatgtgagtcaacctttgctgaagattttccaggaggaaaatccacaaactaggaagcagtagaagagcaaactggtcgtcctacagctgtgtgttaccttttctccatctgctgtgtctgtgcaacatttgtttcataagtgctttgtgtttagcaacactgtattcacgaccttgttggcttgcatttgcatgttttataccaaagcttatactgtactatgtgaagccatcagaagtcgcaagggaattgttaataacataaaacatttttatactaagatcatttgttttgtaattcgtttttaaagagtggcttggatgttttgaaaatactactgaatatgttaatattcttttaaatcttagattgaaaaatgatacattacttaaattgatagctcctaatatatttttaaaattacaactaaaagaagacttcttctgcagggaaaattggtcagcaaagtgaaattaaaaattttaaagtttttcccactctcgttggacagtaaatcagtgaaaggactgccccagttgagagtttgctctctttaagtatagaatgtttcctcttaaacaaattgccaatcatccagcctttactacttagccctctgacaaagtgccttactggctatttaatattacccagcttttatgggcaagtttacaaacattgttttttaaaaaattaaaacctgcaatgtttcgtgattaaaacaagtcttattgcatttgtttcactcttagctcactgattggaaaacatttgtcattttgctctgtttgatatcctcactattatggaatacattgtgcagctaaacaatttcccttgcgcctagtggacattcatgaatgtgtactacacgcaagaagaaacaaaccccgaaagaacacttgttggatttctttgtttttttttttactaaaagagaagttttaaaatgaaatgttttctatagtagatctttgaaaatacaataggtataatactgcatttctcagtgttttacaaagatcagaaagagaaacttctaggaattgcaaagggaaactttact

SEQ ID NO: 53864 - DNA, 1046 bp, Homo sapiens
aaagaggttggtcaagatgactttgattataactaccaaattaaccaacatccgagtacttactaagaactaggcacgtaatagatagctaagtgctttatatacagtgtctcatttatttcctacatcatcttttttaatctttagaataagcctggcagctaagaactctggttctccccattttacagatgaagaaactgaggtttattggtaggaagcctcagtttctctaaggtcacacagctggtaagtgatagagccacattcagatcctggactctgattatggacccgctccctctacactctgcaatgctgcctgtagtattcccgcctgctttgacatcctaaatgtggggaaatgtgtttgtgtcatgttttcttagcagataagcaatcaaggaaggatgaaattcaaaaggacaaggtctggatctttttctgtacttagcactgtgcttggcatttgggatcagcagtgcaaacaggtagtagccaaaggaggatgaaacactgggttagaaagaaaaagtcctgctagaacattaaaaaaaaaaaatgatttcacggagaaccctcaacgctttatacttcctttttttttaaaaaaggaagtaataatatgtagtgagtatactttactggcagtcaactatatatattcaaagagcataaaatatgaagccagtgagtgagtgatccttttattaattaaaaaagaagttgagtggggcgcgggggctcatgcctgtaatcccagcacttggggaggccgagtggggcagatcacaaggtcaggagttcaagatcagccgggccaacatagtgaaaccctatctctactaaaaatagaaaaattagccaggcgtgggggcacatgcctgtaatcatagttactcaggaggctgaggcaggagaatggcttgaacgcaggaggcggaggttgcagtgagctgagatcgcaccactgcactccagcctgggggacagagcaagactctgtctcaaaaaaaaaaaaggaagatgaattagtagagcatgaa

SEQ ID NO: 53865 - DNA, 824 bp, Homo sapiens
aaagaggttggtcaagatgactttgattataactaccaaattaaccaacatccgagtacttactaagaactaggcacgtaatagatagctaagtgctttatatacagtgtctcatttatttcctacatcatcttttttaatctttagaataagcctggcagctaagaactctggttctccccattttacagatgaagaaactgaggtttattggtaggaagcctcagtttctctaaggtcacacagctggtaagtgatagagccacattcagatcctggactctgattatggacccgctccctctacactctgcaatgctgcctgtagtattcccgcctgctttgacatcctaaatgtggggaaatgtgtttgtgtcatgttttcttagcagataagcaatcaaggaaggatgaaattcaaaaggacaaggtctggatctttttctgtacttagcactgtgcttggcatttgggatcagcagtgcaaacaggtagtagccaaaggaggatgaaacactgggttagaaagaaaaagtcctgctagaacattaaaaaaaaaaaatgatttcacggagaaccctcaacgctttatacttcctttttttttaaaaaaggaagtaataatatgtagtgagtatactttactggcagtcaactatatatattcaaagagcataaaatatgaagccagtgagtgagtgatccttttattaattatgccctggtttacacgtcgtgatgggaaaacctggcgtaccaactaaatgcttgcagaaatccccttcgcagttgcgtaataccgcccgccatggccttccgtgcgc

SEQ ID NO: 53866 - DNA, 310 bp, Homo sapiens
ttgaagaaaggacagtctctttgacaaatggtgccaggaaaactcgatatccacattcagaagattgaaagtagacccctgtctctcatcatatacaaaaataaactctaagttcattaaagacttaaatgtaagaccccaaactatgaaagcatatttggcaacacagaaagaaaaactctcaaagaaagctatcagaaaatgtaaaacaattaaaaaatacaaatttgacctgatttttaaaaaatgaaaatatttcatcatattgtactgttaagaatcttacacaatcttttccagataatggaag

SEQ ID NO: 53867 - DNA, 277 bp, Homo sapiens
attttgcactgtgtggcctgcctcttgcattcaacacactgttacacaagcactcccaaagggtgagtttctgggtcactcatgacaatctagttagtgccaccatgtgtggccatttttgtgtaactgtagatatttttgttccctaaattgataatagaaatagtaacgtactgcttatttatattgtattgtaaactacaatcaactgaaagctccttttttattttctcttattaagtcagcaatcattttctgaggacctattatgtcatgg

SEQ ID NO: 53868 - DNA, 434 bp, Homo sapiens
  misc_feature (19)..(19): n is a, c, g, or t
aggacacttcagtgtatgntcatggtttatttgtttgtttgtttgttattgagatagagccttgctctgtctcccaagctggagtgagacttcatctcaaaaaataaataaaaaataataataataaaataaactttttgactctctgttgttctgtctacagtttttctgggttggctcaccagccacactttattggttcccatattgtcttctttcttttgttgcttttccttttgctggagaaactcctcaggtgaattttttatataggtctcacggatagtcaaatttctgagttcttgcctgctttgaaatttcttcattttgcccttgtacttgacttgttaataaaaaaataaataaaaacctgccaaaaagaagagatttaaaaccatttcacatggtgaaacctcgtctctactaaaaataca

SEQ ID NO: 53869 - DNA, 259 bp, Homo sapiens
cggcagtttcccccatgctgttcttgtgatggtgagtgagttctcgtgagagctgatggtttaaaagtggttggcagttcccccctcactctcatctcccgccaccatgtaagacgcacctcacttccccttcgccttccgccacgattgtaagttccccagacatgaggaacggtgagtcagtgaaagctctttcctttataagttacccagtctcaggtagttctttataccccacagtcataaagtagtgccatca

SEQ ID NO: 53870 - DNA, 638 bp, Homo sapiens
ttcttggtcagaatgcacggtctggaatcaagcagaggtagatggagtggtcccactcatgggtgatttgtttcctgcttctcttgagttcccaagggaggagtgctcccgctaggggacacaacaatggctccattgagacaggaattgagactatccagtcatttcagcactgaaccaacgggctggaggttactgttttggctggtgcaagtgatcctggcaacaagggggcatttatgtcgttcctacacagtggatggtgagaaaggcatctggaacccaaggattctctagggcatttttagcacttcccatgtatgccactaacttctaagggacagctataacagtctcaaagaggggaatgattgaggtcctttagggaatgatgttttggtacaccccaccccgtataaatcctgagaagctgagctactggctgagggaagaggaaccatgggatgtgtaaggaaagaaggaaatttattatttcagccttatgactagccagttacagaaacaagttactgcaactgttacatggagggttggcactccatatcagtgagttccagatatcgacttgactaaccacagaaagtactcaaaaaataaaaatacaataaaaaataata

SEQ ID NO: 53871 - DNA, 211 bp, Homo sapiens
agaaatagggctgtttgtgtggccctgtcttggttaattctgtgcgtataggcctaaagtaatttatcagcaaggacttttccagatgcatgtaagtaacaaaaaatccaactcaagatggcttaagcagaaaagggcaggagtcctggatccaggtgctgttttgctgcattgctctctggctctccttctcttggctctgctgtcctct

SEQ ID NO: 53872 - DNA, 747 bp, Homo sapiens
cagtccgttgctgaaaatgattataagccctgcataatgttaagctttattgtgattacgtgtatgtttcttctttcttttaagcagacccatacctttccagggtcaaagtacagaatagaatacattgatacaaagtacagaaaaatactttgatttttatccatttcttttactctgtgtaaagactttagaagtctaattcacaggcaaaccaatacagaattgactgcagttgaacagactagaagtatttgtgggaggagtgacatgaagcatgagttatctgatttttttgtagctgctatatattttaagccttcatttgcaattcatgtaacagttgtgtcataaattacacaataaagcagtcctgttcaaatttttttttaacgtggcttgtagaatttttaaaaaatgaatggatgaaattgtttcctattggattctgtaaatttatgcgttacactgattgtccaacgtggatacacccgggaggtcactctccccgggctctgtccaagtggcgtaggggagcatagggctctgccccatgatgtacaagtccctttccacaacgttggaaataaagctgggcctcgtgtctgcgcctgcatattcctacagcttcccagagtcctgtcgacaattactggggagacaaaccatgcaggaaacagccttctagagcactgaatctggattgaagtcttttttttttttttttggagatggagtcgctctgtt

SEQ ID NO: 53873 - DNA, 507 bp, Homo sapiens
ttccgctttgggggccttggctaaccatggcatctgaccaaaccataaccgcctattgtaaagtaattagaatagctgaatatgcatgttaccagtctagaaaccgatttttttttaacaccccactgtggacagggtggaaactcgtttgctttcttgtttaagatctgtagtaacatgaatggatgaaattgtttcctattggattctgtaaatttatgcgttacactgattgtccaacgtggatacacccgggaggtcactctccccgggctctgtccaagtggcgtaggggagcatagggctctgccccatgatgtacaagtccctttccacaacgttggaaataaagctgggcctcgtgtctgcgcctgcatattcctacagcttcccagagtcctgtcgacaattactggggagacaaaccatgcaggaaacagccttctagagcactgaatctggattgaagtcttttttttttttttttggagatggagtcgctctgtt

SEQ ID NO: 53874 - DNA, 412 bp, Homo sapiens
cagcggcacgatctcggctcactacaacctccaactcccgggttcaagcaattctcatgcctcagcctccggagtagctgggactacaggcacgtgccaccatgcccggctaatttttgtatttttagtggagatggggtttcgcgatctcagctcactgcaacctccacctcctaggttcaaacaattctcctgcctcagcctcccaagtagcccaccaccatgcccagctaatttttatattatcagtagagatggggttttgccatgttggccaggctggtatcgaactcctgacctcaggtgatctgcccacctcagcctcccaaagtgctgggattacaggcgtgagccgccctgcacggccctctttcagttagatttaatcttgtcctcacattcccaagacact

SEQ ID NO: 53875 - DNA, 443 bp, Homo sapiens
agcatttaggctatttcaggaatctaaataacatctcagtcaaactaacattccgagagagaaatgttttaatatatcttttcccagagtagcctttaggtctcggagtgggtgcaaacaggctgggtgatggtcgatatatttgaagattcatgggaatccagaagttttggcagaggtacatatgaatctcaaggaaaaattaaatataatttgatataatgcaaactgcacagtagaatttgaatgcaggacaaatcacaacagctgtttgtcatctcactgaaacagcagtaacaggattgcttaaacaaattccgttcctttctagaatgttcagagtatttaatatttgcataatgattaatctcctgctccagaggaaattcccaaaggaagagacaactcagaagcactttaaattgcaacaccacggcaccacg

SEQ ID NO: 53876 - DNA, 5884 bp, Homo sapiens
gggagatgaggtgggaggattgcttgagcccaggagttcaagaccagcccggggcaacatagtgaaaccctgtctgtacaaaaataaatctcgggagcgtggttgagcggctggcgcggttgtcctggagcaggggcgcaggaattctgatgtgaaactaacagtctgtgagccctggaacctccactcagagaagatgaaggatatcgacataggaaaagagtatatcatccccagtcctgggtatagaagtgtgagggagagaaccagcacttctgggacgcacagagaccgtgaagattccaagttcaggagaactcgaccgttggaatgccaagatgccttggaaacagcagcccgagccgagggcctctctcttgatgcctccatgcattctcagctcagaatcctggatgaggagcatcccaagggaaagtaccatcatggcttgagtgctctgaagcccatccggactacttccaaacaccagcacccagtggacaatgctgggcttttttcctgtatgactttttcgtggctttcttctctggcccgtgtggcccacaagaagggggagctctcaatggaagacgtgtggtctctgtccaagcacgagtcttctgacgtgaactgcagaagactagagagactgtggcaagaagagctgaatgaagttgggccagacgctgcttccctgcgaagggttgtgtggatcttctgccgcaccaggctcatcctgtccatcgtgtgcctgatgatcacgcagctggctggcttcagtggaccagccttcatggtgaaacacctcttggagtatacccaggcaacagagtctaacctgcagtacagcttgttgttagtgctgggcctcctcctgacggaaatcgtgcggtcttggtcgcttgcactgacttgggcattgaattaccgaaccggtgtccgcttgcggggggccatcctaaccatggcatttaagaagatccttaagttaaagaacattaaagagaaatccctgggtgagctcatcaacatttgctccaacgatgggcagagaatgtttgaggcagcagccgttggcagcctgctggctggaggacccgttgttgccatcttaggcatgatttataatgtaattattctgggaccaacaggcttcctgggatcagctgtttttatcctcttttacccagcaatgatgtttgcatcacggctcacagcatatttcaggagaaaatgcgtggccgccacggatgaacgtgtccagaagatgaatgaagttcttacttacattaaatttatcaaaatgtatgcctgggtcaaagcattttctcagagtgttcaaaaaatccgcgaggaggagcgtcggatattggaaaaagctgggtacttccagagcatcactgtgggtgtggctcccattgtggtggtgattgccagcgtggtgaccttctctgttcatatgaccctgggcttcgatctgacagcagcacaggctttcacagtggtgacagtcttcaattccatgacttttgctttgaaagtaacaccgttttcagtaaagtccctctcagaagcctcagtggctgttgacagatttaagagtttgtttctaatggaagaggttcacatgataaagaacaaaccagccagtcctcacatcaagatagagatgaaaaatgccaccttggcatgggactcctcccactccagtatccagaactcgcccaagctgacccccaaaatgaaaaaagacaagagggcttccaggggcaagaaagagaaggtgaggcagctgcagcgcactgagcatcaggcggtgctggcagagcagaaaggccacctcctcctggacagtgacgagcggcccagtcccgaagaggaagaaggcaagcacatccacctgggccacctgcgcttacagaggacactgcacagcatcgatctggagatccaagagggtaaactggttggaatctgcggcagtgtgggaagtggaaaaacctctctcatttcagccattttaggccagatgacgcttctagagggcagcattgcaatcagtggaaccttcgcttatgtggcccagcaggcctggatcctcaatgctactctgagagacaacatcctgtttgggaaggaatatgatgaagaaagatacaactctgtgctgaacagctgctgcctgaggcctgacctggccattcttcccagcagcgacctgacggagattggagagcgaggagccaacctgagcggtgggcagcgccagaggatcagccttgcccgggccttgtatagtgacaggagcatctacatcctggacgaccccctcagtgccttagatgcccatgtgggcaaccacatcttcaatagtgctatccggaaacatctcaagtccaagacagttctgtttgttacccaccagttacagtacctggttgactgtgatgaagtgatcttcatgaaagagggctgtattacggaaagaggcacccatgaggaactgatgaatttaaatggtgactatgctaccatttttaataacctgttgctgggagagacaccgccagttgagatcaattcaaaaaaggaaaccagtggttcacagaagaagtcacaagacaagggtcctaaaacaggatcagtaaagaaggaaaaagcagtaaagccagaggaagggcagcttgtgcagctggaagagaaagggcagggttcagtgccctggtcagtatatggtgtctacatccaggctgctgggggccccttggcattcctggttattatggcccttttcatgctgaatgtaggcagcaccgccttcagcacctggtggttgagttactggatcaagcaaggaagcgggaacaccactgtgactcgagggaacgagacctcggtgagtgacagcatgaaggacaatcctcatatgcagtactatgccagcatctacgccctctccatggcagtcatgctgatcctgaaagccattcgaggagttgtctttgtcaagggcacgctgcgagcttcctcccggctgcatgacgagcttttccgaaggatccttcgaagccctatgaagttttttgacacgacccccacagggaggattctcaacaggttttccaaagacatggatgaagttgacgtgcggctgccgttccaggccgagatgttcatccagaacgttatcctggtgttcttctgtgtgggaatgatcgcaggagtcttcccgtggttccttgtggcagtggggccccttgtcatcctcttttcagtcctgcacattgtctccagggtcctgattcgggagctgaagcgtctggacaatatcacgcagtcacctttcctctcccacatcacgtccagcatacagggccttgccaccatccacgcctacaataaagggcaggagtttctgcacagataccaggagctgctggatgacaaccaagctcctttttttttgtttacgtgtgcgatgcggtggctggctgtgcggctggacctcatcagcatcgccctcatcaccaccacggggctgatgatcgttcttatgcacgggcagattcccccagcctatgcgggtctcgccatctcttatgctgtccagttaacggggctgttccagtttacggtcagactggcatctgagacagaagctcgattcacctcggtggagaggatcaatcactacattaagactctgtccttggaagcacctgccagaattaagaacaaggctccctcccctgactggccccaggagggagaggtgacctttgagaacgcagagatgaggtaccgagaaaacctccctctcgtcctaaagaaagtatccttcacgatcaaacctaaagagaagattggcattgtggggcggacaggatcagggaagtcctcgctggggatggccctcttccgtctggtggagttatctggaggctgcatcaagattgatggagtgagaatcagtgatattggccttgccgacctccgaagcaaactctctatcattcctcaagagccggtgctgttcagtggcactgtcagatcaaatttggaccccttcaaccagtacactgaagaccagatttgggatgccctggagaggacacacatgaaagaatgtattgctcagctacctctgaaacttgaatctgaagtgatggagaatggggataacttctcagtgggggaacggcagctcttgtgcatagctagagccctgctccgccactgtaagattctgattttagatgaagccacagctgccatggacacagagacagacttattgattcaagagaccatccgagaagcatttgcagactgtaccatgctgaccattgcccatcgcctgcacacggttctaggctccgataggattatggtgctggcccagggacaggtggtggagtttgacaccccatcggtccttctgtccaacgacagttcccgattctatgccatgtttgctgctgcagagaacaaggtcgctgtcaagggctgactcctccctgttgacgaagtctcttttctttagagcattgccattccctgcctggggcgggcccctcatcgcgtcctcctaccgaaaccttgcctttctcgattttatctttcgcacagcagttccggattggcttgtgtgtttcacttttagggagagtcatattttgattattgtatttattccatattcatgtaaacaaaatttagtttttgttcttaattgcactctaaaaggttcagggaaccgttattataattgtatcagaggcctataatgaagctttatacgtgtagctatatctatatataattctgtacatagcctatatttacagtgaaaatgtaagctgtttattttatattaaaataagcactgtgctaataacagtgcatattcctttctatcatttttgtacagtttgctgtactagagatctggttttgctattagactgtaggaagagtagcatttcattcttctctagctggtggtttcacggtgccaggttttctgggtgtccaaaggaagacgtgtggcaatagtgggccctccgacagccccctctgccgcctccccacagccgctccaggggtggctggagacgggtgggcggctggagaccatgcagagcgccgtgagttctcagggctcctgccttctgtcctggtgtcacttactgtttctgtcaggagagcagcggggcgaagcccaggccccttttcactccctccatcaagaatggggatcacagagacattcctccgagccggggagtttctttcctgccttcttctttttgctgttgtttctaaacaagaatcagtctatccacagagagtcccactgcctcaggttcctatggctggccactgcacagagctctccagctccaagacctgttggttccaagccctggagccaactgctgctttttgaggtggcactttttcatttgcctattcccacacctccacagttcagtggcagggctcaggatttcgtgggtctgttttcctttctcaccgcagtcgtcgcacagtctctctctctctctcccctcaaagtctgcaactttaagcagctcttgctaatcagtgtctcacactggcgtagaagtttttgtactgtaaagagacctacctcaggttgctggttgctgtgtggtttggtgtgttcccgcaaaccccctttgtgctgtggggctggtagctcaggtgggcgtggtcactgctgtcatcagttgaatggtcagcgttgcatgtcgtgaccaactagacattctgtcgccttagcatgtttgctgaacaccttgtggaagcaaaaatctgaaaatgtgaataaaattattttggattttgtaaaaaaaaaaaa

SEQ ID NO: 53877 - DNA, 1732 bp, Homo sapiens
ccacccttccaacctctctccacctgcagcttgcttggtgctgtcaggatctggatttggggggagtctctctgtagtggaaccagtgacagaagctgttctttagaattttcaggatggctgtattctgcggtcagaatgagagagtcaagctgggcagaatctctcgccaagagttcaggtaaggtaatgtttattcactgggaatgctttccacagccagacagctatgctaacagtctcaagttttcttccagtttgtttagatttaaatgatacatttgtaactttttaaaaactaaattttggttggatttttcatgaaaacctcttttttctttatcccctaaaaaatggtttgaaatgtcattgttatttaaaaacccgatgtgttggaacttctttaatctgctgtttcctctttttccccccctttgaaagtttcgcatagtgtaaacattcactatgtcttttaccttccctgctcctcccatctgggaggcgctgatgctattacccagtgctgaaaaatggcactctaaaggtatgggaaggaaggagcccaaggcaaccacctgctgtcctttcagccttcctttggagactgctccatcagtgccgaggtgtgtgggaacaggcttcactgcaccgccatcttactgagttgcttcacgtgaggaaaagggggctttggccctgtgactcagttccacattttggattgcatactggaaaagaagccaatcttcttgctagtaaaccagcaacccggctgtatacagtggtgacccaagcaatggatataaacctaaaaatctgagggaggggagaggtggaatacagtagttcttggaatctgaagtctcctatttgatcaggttatttcctgggacttggcaaaaatctgattggtggggatctcctaggacctagtggacatctggtattaatttaatctcaggaaaaacaagaaattaacccagagagagtctgggttctggaattcagcgtagctacctccagaccgtggtgtctggcctccatttttgtctgtcattcagctctgacttacagctgcagtcacctttgctataaggcacctgggtagaagggtggatgggcttcacatcaatttttttcttcctttagggtgggggattggtttggctttcttttgttgtggctttttgttttatttttgtcaagattgatttttagatgcaaggacttgaaaagacccagaaggatgccaccagtttttccttgaggcctaggattttttattctgtcccgagcagaggtaattcctcacaacttagtgcaccagtagcaccagccattttgagcagagtacctctttggggagcttttcgttttgttttgtttttaattctctttccttagcagcaaggtcttttttcctagagaatctactccgttgcagaatcattgcaacctcaggagccctcactgattgagtgctgtcagcctgatatactactttggactctggaaacagatatgggttctattctctatttctactgtgtgtcgttaaacaaccgtcggagaccagatgacctgttagatggctagtcctgtataactcgactctgtatgtttcaatgtatgttactgcaatgcttcacctgctgtacagtgtttgtgagatgctctttgaagatggtacttttatattttttcattttcaataaaagtacattccttccca

SEQ ID NO: 53878 - DNA, 580 bp, Homo sapiens
aagacagtacgattacataacatttggcccatcctagcaagcaggattatatgctcattttattgagaatgaccttaagcagattaggtagttctcaagtttgaatgatctttatttggcgtggcatcgcttttcctttcagatgtttgcatcacggctcacagcatatttcaggagaaaatgcgtggccgccacggatgaacgtgtccagaagatgaatgaagttcttacttacattaaatttatcaaaatgtatgcctgggtcaaagcattttctcagagtgttcaaagtggagttaacgaatttttttgtgcctggggttgaaaggcccttggattttttgggtcttataattcacacactttgctttctgagcacattacgtactaggactagtgtctagtatcgtaggacataatatcatagaatcttgtgttcaaacagggatcttagaggtttgaacccataactcatctcactgatgaggaaattgagagctggaaatgttgatttttcccagttaaaacacagctagttaggaataatccagtttcgaagccccctgtgtatattctcatc

SEQ ID NO: 53879 - DNA, 5265 bp, Homo sapiens
gatacaggcgttgtcagtgaggcgttgttaatggtgtgtgtctctccctgtaggccttcatggtgaaacacctcttggagtatacccaggcaacagagtctaacctgcagtacagcttgttgttagtgctgggcctcctcctgacggaaatcgtgcggtcttggtcgcttgcactgacttgggcattgaattaccgaaccggtgtccgcttgcggggggccatcctaaccatggcatttaagaagatccttaagttaaagaacattaaagagaaatccctgggtgagctcatcaacatttgctccaacgatgggcagagaatgtttgaggcagcagccgttggcagcctgctggctggaggacccgttgttgccatcttaggcatgatttataatgtaattattctgggaccaacaggcttcctgggatcagctgtttttatcctcttttacccagcaatgatgtttgcatcacggctcacagcatatttcaggagaaaatgcgtggccgccacggatgaacgtgtccagaagatgaatgaagttcttacttacattaaatttatcaaaatgtatgcctgggtcaaagcattttctcagagtgttcaaaaaatccgcgaggaggagcgtcggatattggaaaaagctgggtacttccagagcatcactgtgggtgtggctcccattgtggtggtgattgccagcgtggtgaccttctctgttcatatgaccctgggcttcgatctgacagcagcacaggctttcacagtggtgacagtcttcaattccatgacttttgctttgaaagtaacaccgttttcagtaaagtccctctcagaagcctcagtggctgttgacagatttaagcttccttccactgtatagcctgatgtgttttgctacgtgagtgtacgccctaggcttgtctccctggtcttgatccagtgtctcatctttgcacctctctcacaactcctatcagagtttgtttctaatggaagaggttcacatgataaagaacaaaccagccagtcctcacatcaagatagagatgaaaaatgccaccttggcatgggactcctcccactccagtatccagaactcgcccaagctgacccccaaaatgaaaaaagacaagagggcttccaggggcaagaaagagaaggtgaggcagctgcagcgcactgagcatcaggcggtgctggcagagcagaaaggccacctcctcctggacagtgacgagcggcccagtcccgaagaggaagaaggcaagcacatccacctgggccacctgcgcttacagaggacactgcacagcatcgatctggagatccaagagggtaaactggttggaatctgcggcagtgtgggaagtggaaaaacctctctcatttcagccattttaggccagatgacgcttctagagggcagcattgcaatcagtggaaccttcgcttatgtggcccagcaggcctggatcctcaatgctactctgagagacaacatcctgtttgggaaggaatatgatgaagaaagatacaactctgtgctgaacagctgctgcctgaggcctgacctggccattcttcccagcagcgacctgacggagattggagagcgaggagccaacctgagcggtgggcagcgccagaggatcagccttgcccgggccttgtatagtgacaggagcatctacatcctggacgaccccctcagtgccttagatgcccatgtgggcaaccacatcttcaatagtgctatccggaaacatctcaagtccaagacagttctgtttgttacccaccagttacagtacctggttgactgtgatgaagtgatcttcatgaaagagggctgtattacggaaagaggcacccatgaggaactgatgaatttaaatggtgactatgctaccatttttaataacctgttgctgggagagacaccgccagttgagatcaattcaaaaaaggaaaccagtggttcacagaagaagtcacaagacaagggtcctaaaacaggatcagtaaagaaggaaaaagcagtaaagccagaggaagggcagcttgtgcagctggaagagaaagggcagggttcagtgccctggtcagtatatggtgtctacatccaggctgctgggggccccttggcattcctggttattatggcccttttcatgctgaatgtaggcagcaccgccttcagcacctggtggttgagttactggatcaagcaaggaagcgggaacaccactgtgactcgagggaacgagacctcggtgagtgacagcatgaaggacaatcctcatatgcagtactatgccagcatctacgccctctccatggcagtcatgctgatcctgaaagccattcgaggagttgtctttgtcaagggcacgctgcgagcttcctcccggctgcatgacgagcttttccgaaggatccttcgaagccctatgaagttttttgacacgacccccacagggaggattctcaacaggttttccaaagacatggatgaagttgacgtgcggctgccgttccaggccgagatgttcatccagaacgttatcctggtgttcttctgtgtgggaatgatcgcaggagtcttcccgtggttccttgtggcagtggggccccttgtcatcctcttttcagtcctgcacattgtctccagggtcctgattcgggagctgaagcgtctggacaatatcacgcagtcacctttcctctcccacatcacgtccagcatacagggccttgccaccatccacgcctacaataaagggcaggagtttctgcacagataccaggagctgctggatgacaaccaagctcctttttttttgtttacgtgtgcgatgcggtggctggctgtgcggctggacctcatcagcatcgccctcatcaccaccacggggctgatgatcgttcttatgcacgggcagattcccccagcctatgcgggtctcgccatctcttatgctgtccagttaacggggctgttccagtttacggtcagactggcatctgagacagaagctcgattcacctcggtggagaggatcaatcactacattaagactctgtccttggaagcacctgccagaattaagaacaaggctccctcccctgactggccccaggagggagaggtgacctttgagaacgcagagatgaggtaccgagaaaacctccctctcgtcctaaagaaagtatccttcacgatcaaacctaaagagaagattggcattgtggggcggacaggatcagggaagtcctcgctggggatggccctcttccgtctggtggagttatctggaggctgcatcaagattgatggagtgagaatcagtgatattggccttgccgacctccgaagcaaactctctatcattcctcaagagccggtgctgttcagtggcactgtcagatcaaatttggaccccttcaaccagtacactgaagaccagatttgggatgccctggagaggacacacatgaaagaatgtattgctcagctacctctgaaacttgaatctgaagtgatggagaatggggataacttctcagtgggggaacggcagctcttgtgcatagctagagccctgctccgccactgtaagattctgattttagatgaagccacagctgccatggacacagagacagacttattgattcaagagaccatccgagaagcatttgcagactgtaccatgctgaccattgcccatcgcctgcacacggttctaggctccgataggattatggtgctggcccagggacaggtggtggagtttgacaccccatcggtccttctgtccaacgacagttcccgattctatgccatgtttgctgctgcagagaacaaggtcgctgtcaagggctgactcctccctgttgacgaagtctcttttctttagagcattgccattccctgcctggggcgggcccctcatcgcgtcctcctaccgaaaccttgcctttctcgattttatctttcgcacagcagttccggattggcttgtgtgtttcacttttagggagagtcatattttgattattgtatttattccatattcatgtaaacaaaatttagtttttgttcttaattgcactctaaaaggttcagggaaccgttattataattgtatcagaggcctataatgaagctttatacgtgtagctatatctatatataattctgtacatagcctatatttacagtgaaaatgtaagctgtttattttatattaaaataagcactgtgctaataacagtgcatattcctttctatcatttttgtacagtttgctgtactagagatctggttttgctattagactgtaggaagagtagcatttcattcttctctagctggtggtttcacggtgccaggttttctgggtgtccaaaggaagacgtgtggcaatagtgggccctccgacagccccctctgccgcctccccacagccgctccaggggtggctggagacgggtgggcggctggagaccatgcagagcgccgtgagttctcagggctcctgccttctgtcctggtgtcacttactgtttctgtcaggagagcagcggggcgaagcccaggccccttttcactccctccatcaagaatggggatcacagagacattcctccgagccggggagtttctttcctgccttcttctttttgctgttgtttctaaacaagaatcagtctatccacagagagtcccactgcctcaggttcctatggctggccactgcacagagctctccagctccaagacctgttggttccaagccctggagccaactgctgctttttgaggtggcactttttcatttgcctattcccacacctccacagttcagtggcagggctcaggatttcgtgggtctgttttcctttctcaccgcagtcgtcgcacagtctctctctctctctcccctcaaagtctgcaactttaagcagctcttgctaatcagtgtctcacactggcgtagaagtttttgtactgtaaagagacctacctcaggttgctggttgctgtgtggtttggtgtgttcccgcaaaccccctttgtgctgtggggctggtagctcaggtgggcgtggtcactgctgtcatcagttgaatggtcagcgttgcatgtcgtgaccaactagacattctgtcgccttagcatgtttgctgaacaccttgtggaagcaaaaatctgaaaatgtgaataaaattattttggattttgtaaaaaaaaaaaa

SEQ ID NO: 53880 - DNA, 5830 bp, Homo sapiens
gggagatgaggtgggaggattgcttgagcccaggagttcaagaccagcccggggcaacatagtgaaaccctgtctgtacaaaaataaatctcgggagcgtggttgagcggctggcgcggttgtcctggagcaggggcgcaggaattctgatgtgaaactaacagtctgtgagccctggaacctccactcagagaagatgaaggatatcgacataggaaaagagtatatcatccccagtcctgggtatagaagtgtgagggagagaaccagcacttctgggacgcacagagaccgtgaagattccaagttcaggagaactcgaccgttggaatgccaagatgccttggaaacagcagcccgagccgagggcctctctcttgatgcctccatgcattctcagctcagaatcctggatgaggagcatcccaagggaaagtaccatcatggcttgagtgctctgaagcccatccggactacttccaaacaccagcacccagtggacaatgctgggcttttttcctgtatgactttttcgtggctttcttctctggcccgtgtggcccacaagaagggggagctctcaatggaagacgtgtggtctctgtccaagcacgagtcttctgacgtgaactgcagaagactagagagactgtggcaagaagagctgaatgaagttgggccagacgctgcttccctgcgaagggttgtgtggatcttctgccgcaccaggctcatcctgtccatcgtgtgcctgatgatcacgcagctggctggcttcagtggaccagccttcatggtgaaacacctcttggagtatacccaggcaacagagtctaacctgcagtacagcttgttgttagtgctgggcctcctcctgacggaaatcgtgcggtcttggtcgcttgcactgacttgggcattgaattaccgaaccggtgtccgcttgcggggggccatcctaaccatggcatttaagaagatccttaagttaaagaacattaaagagaaatccctgggtgagctcatcaacatttgctccaacgatgggcagagaatgtttgaggcagcagccgttggcagcctgctggctggaggacccgttgttgccatcttaggcatgatttataatgtaattattctgggaccaacaggcttcctgggatcagctgtttttatcctcttttacccagcaatgatgtttgcatcacggctcacagcatatttcaggagaaaatgcgtggccgccacggatgaacgtgtccagaagatgaatgaagttcttacttacattaaatttatcaaaatgtatgcctgggtcaaagcattttctcagagtgttcaaaaaatccgcgaggaggagcgtcggatattggaaaaagctgggtacttccagagcatcactgtgggtgtggctcccattgtggtggtgattgccagcgtggtgaccttctctgttcatatgaccctgggcttcgatctgacagcagcacaggctttcacagtggtgacagtcttcaattccatgacttttgctttgaaagtaacaccgttttcagtaaagtccctctcagaagcctcagtggctgttgacagatttaagagtttgtttctaatggaagaggttcacatgataaagaacaaaccagccagtcctcacatcaagatagagatgaaaaatgccaccttggcatgggactcctcccactccagtatccagaactcgcccaagctgacccccaaaatgaaaaaagacaagagggcttccaggggcaagaaagagaaggtgaggcagctgcagcgcactgagcatcaggcggtgctggcagagcagaaaggccacctcctcctggacagtgacgagcggcccagtcccgaagaggaagaaggcaagcacatccacctgggccacctgcgcttacagaggacactgcacagcatcgatctggagatccaagagggtaaactggttggaatctgcggcagtgtgggaagtggaaaaacctctctcatttcagccattttaggccagatgacgcttctagagggcagcattgcaatcagtggaaccttcgcttatgtggcccagcaggcctggatcctcaatgctactctgagagacaacatcctgtttgggaaggaatatgatgaagaaagatacaactctgtgctgaacagctgctgcctgaggcctgacctggccattcttcccagcagcgacctgacggagattggagagcgaggagccaacctgagcggtgggcagcgccagaggatcagccttgcccgggccttgtatagtgacaggagcatctacatcctggacgaccccctcagtgccttagatgcccatgtgggcaaccacatcttcaatagtgctatccggaaacatctcaagtccaagacagttctgtttgttacccaccagttacagtacctggttgactgtgatgaagtgatcttcatgaaagagggctgtattacggaaagaggcacccatgaggaactgatgaatttaaatggtgactatgctaccatttttaataacctgttgctgggagagacaccgccagttgagatcaattcaaaaaaggaaaccagtggttcacagaagaagtcacaagacaagggtcctaaaacaggatcagtaaagaaggaaaaagcagtaaagccagaggaagggcagcttgtgcagctggaagagaaagggcagggttcagtgccctggtcagtatatggtgtctacatccaggctgctgggggccccttggcattcctggttattatggcccttttcatgctgaatgtaggcagcaccgccttcagcacctggtggttgagttactggatcaagcaaggaagcgggaacaccactgtgactcgagggaacgagacctcggtgagtgacagcatgaaggacaatcctcatatgcagtactatgccagcatctacgccctctccatggcagtcatgctgatcctgaaagccattcgaggagttgtctttgtcaagggcacgctgcgagcttcctcccggctgcatgacgagcttttccgaaggatccttcgaagccctatgaagttttttgacacgacccccacagggaggattctcaacaggttttccaaagacatggatgaagttgacgtgcggctgccgttccaggccgagatgttcatccagaacgttatcctggtgttcttctgtgtgggaatgatcgcaggagtcttcccgtggttccttgtggcagtggggccccttgtcatcctcttttcagtcctgcacattgtctccagggtcctgattcgggagctgaagcgtctggacaatatcacgcagtcacctttcctctcccacatcacgtccagcatacagggccttgccaccatccacgcctacaataaagggcaggagtttctgcacagataccaggagctgctggatgacaaccaagctcctttttttttgtttacgtgtgcgatgcggtggctggctgtgcggctggacctcatcagcatcgccctcatcaccaccacggggctgatgatcgttcttatgcacgggcagattcccccagcctatgcgggtctcgccatctcttatgctgtccagttaacggggctgttccagtttacggtcagactggcatctgagacagaagctcgattcacctcggtggagaggatcaatcactacattaagactctgtccttggaagcacctgccagaattaagaacaaggctccctcccctgactggccccaggagggagaggtgacctttgagaacgcagagatgaggtaccgagaaaacctccctctcgtcctaaagaaagtatccttcacgatcaaacctaaagagaagattggcattgtggggcggacaggatcagggaagtcctcgctggggatggccctcttccgtctggtggagttatctggaggctgcatcaagattgatggagtgagaatcagtgatattggccttgccgacctccgaagcaaactctctatcattcctcaagagccggtgctgttcagtggcactgtcagatcaaatttggaccccttcaaccagtacactgaagaccagatttgggatgccctggagaggacacacatgaaagaatgtattgctcagctacctctgaaacttgaatctgaagtgatggagaatggggataacttctcagtgggggaacggcagctcttgtgcatagctagagccctgctccgccactgtaagattctgattttagatgaagccacagctgccatggacacagagacagacttattgattcaagagaccatccgagaagcatttgcagactgtaccatgctgaccattgcccatcgcctgcacacggttctaggctccgataggattatggtgctggcccagggacaggtggtggagtttgacaccccatcggtccttctgtccaacgacagttcccgattctatgccatgtttgctgctgcagagaacaaggtcgctgtcaagggctgactcctccctgttgacgaagtctcttttctttagagcattgccattccctgcctggggcgggcccctcatcgcgtcctcctaccgaaaccttgcctttctcgattttatctttcgcacagcagttccggattggcttgtgtgtttcacttttagggagagtcatattttgattattgtatttattccatattcatgtaaacaaaatttagtttttgttcttaattgcactctaaaaggttcagggaaccgttattataattgtatcagaggcctataatgaagctttatacgtgtagctatatctatatataattctgtacatagcctatatttacagtgaaaatgtaagctgtttattttatattatttgctgtactagagatctggttttgctattagactgtaggaagagtagcatttcattcttctctagctggtggtttcacggtgccaggttttctgggtgtccaaaggaagacgtgtggcaatagtgggccctccgacagccccctctgccgcctccccacagccgctccaggggtggctggagacgggtgggcggctggagaccatgcagagcgccgtgagttctcagggctcctgccttctgtcctggtgtcacttactgtttctgtcaggagagcagcggggcgaagcccaggccccttttcactccctccatcaagaatggggatcacagagacattcctccgagccggggagtttctttcctgccttcttctttttgctgttgtttctaaacaagaatcagtctatccacagagagtcccactgcctcaggttcctatggctggccactgcacagagctctccagctccaagacctgttggttccaagccctggagccaactgctgctttttgaggtggcactttttcatttgcctattcccacacctccacagttcagtggcagggctcaggatttcgtgggtctgttttcctttctcaccgcagtcgtcgcacagtctctctctctctctcccctcaaagtctgcaactttaagcagctcttgctaatcagtgtctcacactggcgtagaagtttttgtactgtaaagagacctacctcaggttgctggttgctgtgtggtttggtgtgttcccgcaaaccccctttgtgctgtggggctggtagctcaggtgggcgtggtcactgctgtcatcagttgaatggtcagcgttgcatgtcgtgaccaactagacattctgtcgccttagcatgtttgctgaacaccttgtggaagcaaaaatctgaaaatgtgaataaaattattttggattttgtaaaaaaaaaaaa

SEQ ID NO: 53881 - DNA, 2009 bp, Homo sapiens
gggagatgaggtgggaggattgcttgagcccaggagttcaagaccagcccggggcaacatagtgaaaccctgtctgtacaaaaataaatctcgggagcgtggttgagcggctggcgcggttgtcctggagcaggggcgcaggaattctgatgtgaaactaacagtctgtgagccctggaacctccactcagagaagatgaaggatatcgacataggaaaagagtatatcatccccagtcctgggtatagaagtgtgagggagagaaccagcacttctgggacgcacagagaccgtgaagattccaagttcaggagaactcgaccgttggaatgccaagatgccttggaaacagcagcccgagccgagggcctctctcttgatgcctccatgcattctcagctcagaatcctggatgaggagcatcccaagggaaagtaccatcatggcttgagtgctctgaagcccatccggactacttccaaacaccagcacccagtggacaatgctgggcttttttcctgtatgactttttcgtggctttcttctctggcccgtgtggcccacaagaagggggagctctcaatggaagacgtgtggtctctgtccaagcacgagtcttctgacgtgaactgcagaagactagagagactgtggcaagaagagctgaatgaagttgggccagacgctgcttccctgcgaagggttgtgtggatcttctgccgcaccaggctcatcctgtccatcgtgtgcctgatgatcacgcagctggctggcttcagtggaccaaattttcaggatggctgtattctgcggtcagaatgagagagtcaagctgggcagaatctctcgccaagagttcagttcagccttcctttggagactgctccatcagtgccgaggtgtgtgggaacaggcttcactgcaccgccatcttactgagttgcttcacgtgaggaaaagggggctttggccctgtgactcagttccacattttggattgcatactggaaaagaagccaatcttcttgctagtaaaccagcaacccggctgtatacagtggtgacccaagcaatggatataaacctaaaaatctgagggaggggagaggtggaatacagtagttcttggaatctgaagtctcctatttgatcaggttatttcctgggacttggcaaaaatctgattggtggggatctcctaggacctagtggacatctggtattaatttaatctcaggaaaaacaagaaattaacccagagagagtctgggttctggaattcagcgtagctacctccagaccgtggtgtctggcctccatttttgtctgtcattcagctctgacttacagctgcagtcacctttgctataaggcacctgggtagaagggtggatgggcttcacatcaatttttttcttcctttagggtgggggattggtttggctttcttttgttgtggctttttgttttatttttgtcaagattgatttttagatgcaaggacttgaaaagacccagaaggatgccaccagtttttccttgaggcctaggattttttattctgtcccgagcagaggtaattcctcacaacttagtgcaccagtagcaccagccattttgagcagagtacctctttggggagcttttcgttttgttttgtttttaattctctttccttagcagcaaggtcttttttcctagagaatctactccgttgcagaatcattgcaacctcaggagccctcactgattgagtgctgtcagcctgatatactactttggactctggaaacagatatgggttctattctctatttctactgtgtgtcgttaaacaaccgtcggagaccagatgacctgttagatggctagtcctgtataactcgactctgtatgtttcaatgtatgttactgcaatgcttcacctgctgtacagtgtttgtgagatgctctttgaagatggtacttttatattttttcattttcaataaaagtacattccttccca

SEQ ID NO: 53882 - DNA, 4683 bp, Homo sapiens
gggagatgaggtgggaggattgcttgagcccaggagttcaagaccagcccggggcaacatagtgaaaccctgtctgtacaaaaataaatctcgggagcgtggttgagcggctggcgcggttgtcctggagcaggggcgcaggaattctgatgtgaaactaacagtctgtgagccctggaacctccactcagagaagatgaaggatatcgacataggaaaagagtatatcatccccagtcctgggtatagaagtgtgagggagagaaccagcacttctgggacgcacagagaccgtgaagattccaagttcaggagaactcgaccgttggaatgccaagatgccttggaaacagcagcccgagccgagggcctctctcttgatgcctccatgcattctcagctcagaatcctggatgaggagcatcccaagggaaagtaccatcatggcttgagtgctctgaagcccatccggactacttccaaacaccagcacccagtggacaatgctgggcttttttcctgtatgactttttcgtggctttcttctctggcccgtgtggcccacaagaagggggagctctcaatggaagacgtgtggtctctgtccaagcacgagtcttctgacgtgaactgcagaagactagagagactgtggcaagaagagctgaatgaagttgggccagacgctgcttccctgcgaagggttgtgtggatcttctgccgcaccaggctcatcctgtccatcgtgtgcctgatgatcacgcagctggctggcttcagtggaccagccttcatggtgaaacacctcttggagtatacccaggcaacagagtctaacctgcagtacagcttgttgttagtgctgggcctcctcctgacggaaatcgtgcggtcttggtcgcttgcactgacttgggcattgaattaccgaaccggtgtccgcttgcggggggccatcctaaccatggcatttaagaagatccttaagttaaagaacattaaagagaaatccctgggtgagctcatcaacatttgctccaacgatgggcagagaatgtttgaggcagcagccgttggcagcctgctggctggaggacccgttgttgccatcttaggcatgatttataatgtaattattctgggaccaacaggcttcctgggatcagctgtttttatcctcttttacccagcaatgatgtttgcatcacggctcacagcatatttcaggagaaaatgcgtggccgccacggatgaacgtgtccagaagatgaatgaagttcttacttacattaaatttatcaaaatgtatgcctgggtcaaagcattttctcagagtgttcaaaaaatccgcgaggaggagcgtcggatattggaaaaagctgggtacttccagagcatcactgtgggtgtggctcccattgtggtggtgattgccagcgtggtgaccttctctgttcatatgaccctgggcttcgatctgacagcagcacaggctttcacagtggtgacagtcttcaattccatgacttttgctttgaaagtaacaccgttttcagtaaagtccctctcagaagcctcagtggctgttgacagatttaagagtttgtttctaatggaagaggttcacatgataaagaacaaaccagccagtcctcacatcaagatagagatgaaaaatgccaccttggcatgggactcctcccactccagtatccagaactcgcccaagctgacccccaaaatgaaaaaagacaagagggcttccaggggcaagaaagagaaggtgaggcagctgcagcgcactgagcatcaggcggtgctggcagagcagaaaggccacctcctcctggacagtgacgagcggcccagtcccgaagaggaagaaggcaagcacatccacctgggccacctgcgcttacagaggacactgcacagcatcgatctggagatccaagagggtaaactggttggaatctgcggcagtgtgggaagtggaaaaacctctctcatttcagccattttaggccagatgacgcttctagagggcagcattgcaatcagtggaaccttcgcttatgtggcccagcaggcctggatcctcaatgctactctgagagacaacatcctgtttgggaaggaatatgatgaagaaagatacaactctgtgctgaacagctgctgcctgaggcctgacctggccattcttcccagcagcgacctgacggagattggagagcgaggagccaacctgagcggtgggcagcgccagaggatcagccttgcccgggccttgtatagtgacaggagcatctacatcctggacgaccccctcagtgccttagatgcccatgtgggcaaccacatcttcaatagtgctatccggaaacatctcaagtccaagacagttctgtttgttacccaccagttacagtacctggttgactgtgatgaagtgatcttcatgaaagagggctgtattacggaaagaggcacccatgaggaactgatgaatttaaatggtgactatgctaccatttttaataacctgttgctgggagagacaccgccagttgagatcaattcaaaaaaggaaaccagtggttcacagaagaagtcacaagacaagggtcctaaaacaggatcagtaaagaaggaaaaagcagtaaagccagaggaagggcagcttgtgcagctggaagagaaagggcagggttcagtgccctggtcagtatatggtgtctacatccaggctgctgggggccccttggcattcctggttattatggcccttttcatgctgaatgtaggcagcaccgccttcagcacctggtggttgagttactggatcaagcaaggaagcgggaacaccactgtgactcgagggaacgagacctcggtgagtgacagcatgaaggacaatcctcatatgcagtactatgccagcatctacgccctctccatggcagtcatgctgatcctgaaagccattcgaggagttgtctttgtcaagggcacgctgcgagcttcctcccggctgcatgacgagcttttccgaaggatccttcgaagccctatgaagttttttgacacgacccccacagggaggattctcaacaggttttccaaagacatggatgaagttgacgtgcggctgccgttccaggccgagatgttcatccagaacgttatcctggtgttcttctgtgtgggaatgatcgcaggagtcttcccgtggttccttgtggcagtggggccccttgtcatcctcttttcagtcctgcacattgtctccagggtcctgattcgggagctgaagcgtctggacaatatcacgcagtcacctttcctctcccacatcacgtccagcatacagggccttgccaccatccacgcctacaataaagggcaggagtttctgcacagataccaggagctgctggatgacaaccaagctcctttttttttgtttacgtgtgcgatgcggtggctggctgtgcggctggacctcatcagcatcgccctcatcaccaccacggggctgatgatcgttcttatgcacgggcagattcccccagcctatgcgggtctcgccatctcttatgctgtccagttaacggggctgttccagtttacggtcagactggcatctgagacagaagctcgattcacctcggtggagaggatcaatcactacattaagactctgtccttggaagcacctgccagaattaagaacaaggctccctcccctgactggccccaggagggagaggtgacctttgagaacgcagagatgaggtaccgagaaaacctccctctcgtcctaaagaaagtatccttcacgatcaaacctaaagagaagattggcattgtggggcggacaggatcagggaagtcctcgctggggatggccctcttccgtctggtggagttatctggaggctgcatcaagattgatggagtgagaatcagtgatattggccttgccgacctccgaagcaaactctctatcattcctcaagagccggtgctgttcagtggcactgtcagatcaaatttggaccccttcaaccagtacactgaagaccagatttgggatgccctggagaggacacacatgaaagaatgtattgctcagctacctctgaaacttgaatctgaagtgatggagaatggggataacttctcagtgggggaacggcagctcttgtgcatagctagagccctgctccgccactgtaagattctgattttagatgaagccacagctgccatggacacagagacagacttattgattcaagagaccatccgagaagcatttgcagactgtaccatgctgaccattgcccatcgcctgcacacggttctaggctccgataggattatggtgctggcccagggacaggtggtggagtttgacaccccatcggtccttctgtccaacgacagttcccgattctatgccatgtttgctgctgcagagaacaaggtcgctgtcaagggctgactcctccctgttgacgaagtctcttttctttagagcattgccattccctgcctggggcgggcccctcatcgcgtcctcctaccgaaaccttgcctttctcgattttatctttcgcacagcagttccggattggcctttctatttacttccgttgcttctaatcgggatactca

SEQ ID NO: 53883 - DNA, 1934 bp, Homo sapiens
gggagatgaggtgggaggattgcttgagcccaggagttcaagaccagcccggggcaacatagtgaaaccctgtctgtacaaaaataaatctcgggagcgtggttgagcggctggcgcggttgtcctggagcaggggcgcaggaattctgatgtgaaactaacagtctgtgagccctggaacctccactcagagaagatgaaggatatcgacataggaaaagagtatatcatccccagtcctgggtatagaagtgtgagggagagaaccagcacttctgggacgcacagagaccgtgaagattccaagttcaggagaactcgaccgttggaatgccaagatgccttggaaacagcagcccgagccgagggcctctctcttgatgcctccatgcattctcagctcagaatcctggatgaggagcatcccaagggaaagtaccatcatggcttgagtgctctgaagcccatccggactacttccaaacaccagcacccagtggacaatgctgggcttttttcctgtatgactttttcgtggctttcttctctggcccgtgtggcccacaagaagggggagctctcaatggaagacgtgtggtctctgtccaagcacgagtcttctgacgtgaactgcagaagactagagagactgtggcaagaagagctgaatgaagttgggccagacgctgcttccctgcgaagggttgtgtggatcttctgccgcaccaggctcatcctgtccatcgtgtgcctgatgatcacgcagctggctggcttcagtggaccattcagccttcctttggagactgctccatcagtgccgaggtgtgtgggaacaggcttcactgcaccgccatcttactgagttgcttcacgtgaggaaaagggggctttggccctgtgactcagttccacattttggattgcatactggaaaagaagccaatcttcttgctagtaaaccagcaacccggctgtatacagtggtgacccaagcaatggatataaacctaaaaatctgagggaggggagaggtggaatacagtagttcttggaatctgaagtctcctatttgatcaggttatttcctgggacttggcaaaaatctgattggtggggatctcctaggacctagtggacatctggtattaatttaatctcaggaaaaacaagaaattaacccagagagagtctgggttctggaattcagcgtagctacctccagaccgtggtgtctggcctccatttttgtctgtcattcagctctgacttacagctgcagtcacctttgctataaggcacctgggtagaagggtggatgggcttcacatcaatttttttcttcctttagggtgggggattggtttggctttcttttgttgtggctttttgttttatttttgtcaagattgatttttagatgcaaggacttgaaaagacccagaaggatgccaccagtttttccttgaggcctaggattttttattctgtcccgagcagaggtaattcctcacaacttagtgcaccagtagcaccagccattttgagcagagtacctctttggggagcttttcgttttgttttgtttttaattctctttccttagcagcaaggtcttttttcctagagaatctactccgttgcagaatcattgcaacctcaggagccctcactgattgagtgctgtcagcctgatatactactttggactctggaaacagatatgggttctattctctatttctactgtgtgtcgttaaacaaccgtcggagaccagatgacctgttagatggctagtcctgtataactcgactctgtatgtttcaatgtatgttactgcaatgcttcacctgctgtacagtgtttgtgagatgctctttgaagatggtacttttatattttttcattttcaataaaagtacattccttccca

SEQ ID NO: 53884 - DNA, 1182 bp, Homo sapiens
attctagaggatccctctccctactgatatcctacttcagccttcctttggagactgctccatcagtgccgaggtgtgtgggaacaggcttcactgcaccgccatcttactgagttgcttcacgtgaggaaaagggggctttggccctgtgactcagttccacattttggattgcatactggaaaagaagccaatcttcttgctagtaaaccagcaacccggctgtatacagtggtgacccaagcaatggatataaacctaaaaatctgagggaggggagaggtggaatacagtagttcttggaatctgaagtctcctatttgatcaggttatttcctgggacttggcaaaaatctgattggtggggatctcctaggacctagtggacatctggtattaatttaatctcaggaaaaacaagaaattaacccagagagagtctgggttctggaattcagcgtagctacctccagaccgtggtgtctggcctccatttttgtctgtcattcagctctgacttacagctgcagtcacctttgctataaggcacctgggtagaagggtggatgggcttcacatcaatttttttcttcctttagggtgggggattggtttggctttcttttgttgtggctttttgttttatttttgtcaagattgatttttagatgcaaggacttgaaaagacccagaaggatgccaccagtttttccttgaggcctaggattttttattctgtcccgagcagaggtaattcctcacaacttagtgcaccagtagcaccagccattttgagcagagtacctctttggggagcttttcgttttgttttgtttttaattctctttccttagcagcaaggtcttttttcctagagaatctactccgttgcagaatcattgcaacctcaggagccctcactgattgagtgctgtcagcctgatatactactttggactctggaaacagatatgggttctattctctatttctactgtgtgtcgttaaacaaccgtcggagaccagatgacctgttagatggctagtcctgtataactcgactctgtatgtttcaatgtatgttactgcaatgcttcacctgctgtacagtgtttgtgagatgctctttgaagatggtacttttatattttttcattttcaataaaagtacattccttccca

SEQ ID NO: 53885 - DNA, 1510 bp, Homo sapiens
gggagatgaggtgggaggattgcttgagcccaggagttcaagaccagcccggggcaacatagtgaaaccctgtctgtacaaaaataaatctcgggagcgtggttgagcggctggcgcggttgtcctggagcaggggcgcaggaattctgatgtgaaactaacagtctgtgagccctggaacctccactcagagaagatgaaggatatcgacataggaaaagagtatatcatccccagtcctgggtatagaagtgtgagggagagaaccagcacttctgggacgcacagagaccgtgaagattccaagttcaggagaactcgaccgttggaatgccaagatgccttggaaacagcagcccgagccgagggcctctctcttgatgcctccatgcattctcagctcagaatcctggatgaggagcatcccaagggaaagtaccatcatggcttgagtgctctgaagcccatccggactacttccaaacaccagcacccagtggacaatgctgggcttttttcctgtatgactttttcgtggctttcttctctggcccgtgtggcccacaagaagggggagctctcaatggaagacgtgtggtctctgtccaagcacgagtcttctgacgtgaactgcagaagactagagagactgtggcaagaagagctgaatgaagttgggccagacgctgcttccctgcgaagggttgtgtggatcttctgccgcaccaggctcatcctgtccatcgtgtgcctgatgatcacgcagctggctggcttcagtggaccaccaacagacctcaggaaagaggggatgaacttgcagactctgcgcttgagatcttcaaacaagcatcagcgttttccagggcttcccagagcccctgtctatcaaaagttattagagaggatgaagcattagcttgaagcactacaggaggaatgcaccacggcagctctccgccaatttctctcagatttccacagagactgtttgaatgttttcaaaaccaagtatcacactttaatgtacatgggccgcaccataatgagatgtgagccttgtgcatgtgggggaggagggagagagatgtactttttaaatcatgttccccctaaacatggctgttaacccactgcatgcagaaacttggatgtcactgcctgacattcacttccagagaggacctatcccaaatgtggaattgactgcctatgccaagtccctggaaaaggagcttcagtattgtggggctcataaaacatgaatcaagcaatccagcctcatgggaagtcctggcacagtttttgtaaagcccttgcacagctggagaaatggcatcattataagctatgagttgaaatgttctgtcaaatgtgtctcacatctacacgtggcttggaggcttttatggggccctgtccaggtagaaaagaaatggtatgtagagcttagatgtccctattgtgacagagccatggtgtgtttgtaataataaaaccaaagaaacat

SEQ ID NO: 53886 - DNA, 923 bp, Homo sapiens
gggagatgaggtgggaggattgcttgagcccaggagttcaagaccagcccggggcaacatagtgaaaccctgtctgtacaaaaataaatctcgggagcgtggttgagcggctggcgcggttgtcctggagcaggggcgcaggaattctgatgtgaaactaacagtctgtgagccctggaacctccactcagagaagatgaaggatatcgacataggaaaagagtatatcatccccagtcctgggtatagaagtgtgagggagagaaccagcacttctgggacgcacagagaccgtgaagattccaagttcaggagaactcgaccgagtcagagtctcactctgtcacccagactgtagtgcggtggcatgaccatggctcactgcagcgtcaaacacctgggctcctgtgatcctcctgcctcagcctcctgagtagctaggactacaatctcgtgccaccatgcctggctaacttttaaattttttatagtgatggggttttggagggttacacagactagtctcaaactcctggcctgaggccatcctcccacctcagcctcccaaagtgttgtgatgacaggcataagccactgtacactgcctactttttactttttaaatgtggctactagaaaaatttaaattacattatgtggcttacatttgcagcttgcattatatttctattggacagtgctgaactagagtgttgatctactgtaggttagccattgattttgtattaggcatttagatccctgtaagctgttgggtttaatgattttttcctttggaagattttcctttatgcagtaaaattatggagacacagagtatgtagtattacatattaccagtttgctctcctgaatccctgctggtagcatattaaaaatcagtttaatgttcaaaacaaaaa

SEQ ID NO: 53887 - DNA, 472 bp, Homo sapiens
caaggtcttttttcctagagaatctactccgttgcagaatcattgcaagctcaggagccctcactgattgagtgctgtcagcttgatatactactctggaaaggagcttttcgttttgttttgtttttaattctctttccttagcagcaaggtcttttttcctagagaatctactccgttgcagaatcattgcaacctcaggagccctcactgattgagtgctgtcagcctgatatactactttggactctggaaacagatatgggttctattctctatttctactgtgtgtcgttaaacaaccgtcggagaccagatgacctgttagatggctagtcctgtataactcgactctgtatgtttcaatgtatgttactgcaatgcttcacctgctgtacagtgtttgtgagatgctctttgaagatggtacttttatattttttcattttcaataaaagtacattccttccca

SEQ ID NO: 53888 - DNA, 847 bp, Homo sapiens
gggagatgaggtgggaggattgcttgagcccaggagttcaagaccagcccggggcaacatagtgaaaccctgtctgtacaaaaataaatctcgggagcgtggttgagcggctggcgcggttgtcctggagcaggggcgcaggaattctgatgtgaaactaacagtctgtgagccctggaacctccactcagagaagatgaaggatatcgacataggaaaagagtatatcatccccagtcctgggtatagaagtgtgagggagagaaccagcacttctgggacgcacagagaccgtgaagattccaagttcaggagaactcgaccgttggaatgccaagatgccttggaaacagcagcccgagccgagggcctctctcttgatgcctccatgcattctcagctcagaatcctggatgaggagcatcccaagggaaagtaccatcatggcttgagtgctctgaagcccatccggactacttccaaacaccagcacccagtggacaatgctgggcttttttcctgtatgactttttcgtggctttcttctctggcccgtgtggcccacaagaagggggagctctcaatggaagacgtgtggtctctgtccaagcacgagtcttctgacgtgaactgcagaagactagagagactgtggcaagaagagctgaatgaagttgggccagacgctgcttccctgcgaagggttgtgtggatcttctgccgcaccaggctcatcctgtccatcgtgtgcctgatgatcacgcagctggctggcttcagtggaccaccttcatggtgaaacacctcttggagtatacccagacccggtaaagggatggtctagagt

SEQ ID NO: 53889 - DNA, 305 bp, Homo sapiens
gtgtcaggttacttcagttgcatagcatcattaggcacagtttcttctcttctcctattttcaggctttcacagtggtgacagtcttcaattccatgacttttgctttgaaagtaacaccgttttcagtaaagtccctctcagaagcctcagtggctgttgacagatttaaggtaagtggctccttcccctgcccccgtgtcaggagccctccccacacaactaactgctggctctgttcaaggggccacccaggctggcctcactgggcttaagcttggctttggccttttggcaagttggtaa

SEQ ID NO: 53890 - DNA, 5999 bp, Homo sapiens
gggagatgaggtgggaggattgcttgagcccaggagttcaagaccagcccggggcaacatagtgaaaccctgtctgtacaaaaataaatctcgggagcgtggttgagcggctggcgcggttgtcctggagcaggggcgcaggaattctgatgtgaaactaacagtctgtgagccctggaacctccactcagagaagatgaaggatatcgacataggaaaagagtatatcatccccagtcctgggtatagaagtgtgagggagagaaccagcacttctgggacgcacagagaccgtgaagattccaagttcaggagaactcgaccgttggaatgccaagatgccttggaaacagcagcccgagccgagggcctctctcttgatgcctccatgcattctcagctcagaatcctggatgaggagcatcccaagggaaagtaccatcatggcttgagtgctctgaagcccatccggactacttccaaacaccagcacccagtggacaatgctgggcttttttcctgtatgactttttcgtggctttcttctctggcccgtgtggcccacaagaagggggagctctcaatggaagacgtgtggtctctgtccaagcacgagtcttctgacgtgaactgcagaagactagagagactgtggcaagaagagctgaatgaagttgggccagacgctgcttccctgcgaagggttgtgtggatcttctgccgcaccaggctcatcctgtccatcgtgtgcctgatgatcacgcagctggctggcttcagtggaccagccttcatggtgaaacacctcttggagtatacccaggcaacagagtctaacctgcagtacagcttgttgttagtgctgggcctcctcctgacggaaatcgtgcggtcttggtcgcttgcactgacttgggcattgaattaccgaaccggtgtccgcttgcggggggccatcctaaccatggcatttaagaagatccttaagttaaagaacattaaagagaaatccctgggtgagctcatcaacatttgctccaacgatgggcagagaatgtttgaggcagcagccgttggcagcctgctggctggaggacccgttgttgccatcttaggcatgatttataatgtaattattctgggaccaacaggcttcctgggatcagctgtttttatcctcttttacccagcaatgatgtttgcatcacggctcacagcatatttcaggagaaaatgcgtggccgccacggatgaacgtgtccagaagatgaatgaagttcttacttacattaaatttatcaaaatgtatgcctgggtcaaagcattttctcagagtgttcaaaaaatccgcgaggaggagcgtcggatattggaaaaagctgggtacttccagagcatcactgtgggtgtggctcccattgtggtggtgattgccagcgtggtgaccttctctgttcatatgaccctgggcttcgatctgacagcagcacaggctttcacagtggtgacagtcttcaattccatgacttttgctttgaaagtaacaccgttttcagtaaagtccctctcagaagcctcagtggctgttgacagatttaagcttccttccactgtatagcctgatgtgttttgctacgtgagtgtacgccctaggcttgtctccctggtcttgatccagtgtctcatctttgcacctctctcacaactcctatcagagtttgtttctaatggaagaggttcacatgataaagaacaaaccagccagtcctcacatcaagatagagatgaaaaatgccaccttggcatgggactcctcccactccagtatccagaactcgcccaagctgacccccaaaatgaaaaaagacaagagggcttccaggggcaagaaagagaaggtgaggcagctgcagcgcactgagcatcaggcggtgctggcagagcagaaaggccacctcctcctggacagtgacgagcggcccagtcccgaagaggaagaaggcaagcacatccacctgggccacctgcgcttacagaggacactgcacagcatcgatctggagatccaagagggtaaactggttggaatctgcggcagtgtgggaagtggaaaaacctctctcatttcagccattttaggccagatgacgcttctagagggcagcattgcaatcagtggaaccttcgcttatgtggcccagcaggcctggatcctcaatgctactctgagagacaacatcctgtttgggaaggaatatgatgaagaaagatacaactctgtgctgaacagctgctgcctgaggcctgacctggccattcttcccagcagcgacctgacggagattggagagcgaggagccaacctgagcggtgggcagcgccagaggatcagccttgcccgggccttgtatagtgacaggagcatctacatcctggacgaccccctcagtgccttagatgcccatgtgggcaaccacatcttcaatagtgctatccggaaacatctcaagtccaagacagttctgtttgttacccaccagttacagtacctggttgactgtgatgaagtgatcttcatgaaagagggctgtattacggaaagaggcacccatgaggaactgatgaatttaaatggtgactatgctaccatttttaataacctgttgctgggagagacaccgccagttgagatcaattcaaaaaaggaaaccagtggttcacagaagaagtcacaagacaagggtcctaaaacaggatcagtaaagaaggaaaaagcagtaaagccagaggaagggcagcttgtgcagctggaagagaaagggcagggttcagtgccctggtcagtatatggtgtctacatccaggctgctgggggccccttggcattcctggttattatggcccttttcatgctgaatgtaggcagcaccgccttcagcacctggtggttgagttactggatcaagcaaggaagcgggaacaccactgtgactcgagggaacgagacctcggtgagtgacagcatgaaggacaatcctcatatgcagtactatgccagcatctacgccctctccatggcagtcatgctgatcctgaaagccattcgaggagttgtctttgtcaagggcacgctgcgagcttcctcccggctgcatgacgagcttttccgaaggatccttcgaagccctatgaagttttttgacacgacccccacagggaggattctcaacaggttttccaaagacatggatgaagttgacgtgcggctgccgttccaggccgagatgttcatccagaacgttatcctggtgttcttctgtgtgggaatgatcgcaggagtcttcccgtggttccttgtggcagtggggccccttgtcatcctcttttcagtcctgcacattgtctccagggtcctgattcgggagctgaagcgtctggacaatatcacgcagtcacctttcctctcccacatcacgtccagcatacagggccttgccaccatccacgcctacaataaagggcaggagtttctgcacagataccaggagctgctggatgacaaccaagctcctttttttttgtttacgtgtgcgatgcggtggctggctgtgcggctggacctcatcagcatcgccctcatcaccaccacggggctgatgatcgttcttatgcacgggcagattcccccagcctatgcgggtctcgccatctcttatgctgtccagttaacggggctgttccagtttacggtcagactggcatctgagacagaagctcgattcacctcggtggagaggatcaatcactacattaagactctgtccttggaagcacctgccagaattaagaacaaggctccctcccctgactggccccaggagggagaggtgacctttgagaacgcagagatgaggtaccgagaaaacctccctctcgtcctaaagaaagtatccttcacgatcaaacctaaagagaagattggcattgtggggcggacaggatcagggaagtcctcgctggggatggccctcttccgtctggtggagttatctggaggctgcatcaagattgatggagtgagaatcagtgatattggccttgccgacctccgaagcaaactctctatcattcctcaagagccggtgctgttcagtggcactgtcagatcaaatttggaccccttcaaccagtacactgaagaccagatttgggatgccctggagaggacacacatgaaagaatgtattgctcagctacctctgaaacttgaatctgaagtgatggagaatggggataacttctcagtgggggaacggcagctcttgtgcatagctagagccctgctccgccactgtaagattctgattttagatgaagccacagctgccatggacacagagacagacttattgattcaagagaccatccgagaagcatttgcagactgtaccatgctgaccattgcccatcgcctgcacacggttctaggctccgataggattatggtgctggcccagggacaggtggtggagtttgacaccccatcggtccttctgtccaacgacagttcccgattctatgccatgtttgctgctgcagagaacaaggtcgctgtcaagggctgactcctccctgttgacgaagtctcttttctttagagcattgccattccctgcctggggcgggcccctcatcgcgtcctcctaccgaaaccttgcctttctcgattttatctttcgcacagcagttccggattggcttgtgtgtttcacttttagggagagtcatattttgattattgtatttattccatattcatgtaaacaaaatttagtttttgttcttaattgcactctaaaaggttcagggaaccgttattataattgtatcagaggcctataatgaagctttatacgtgtagctatatctatatataattctgtacatagcctatatttacagtgaaaatgtaagctgtttattttatattaaaataagcactgtgctaataacagtgcatattcctttctatcatttttgtacagtttgctgtactagagatctggttttgctattagactgtaggaagagtagcatttcattcttctctagctggtggtttcacggtgccaggttttctgggtgtccaaaggaagacgtgtggcaatagtgggccctccgacagccccctctgccgcctccccacagccgctccaggggtggctggagacgggtgggcggctggagaccatgcagagcgccgtgagttctcagggctcctgccttctgtcctggtgtcacttactgtttctgtcaggagagcagcggggcgaagcccaggccccttttcactccctccatcaagaatggggatcacagagacattcctccgagccggggagtttctttcctgccttcttctttttgctgttgtttctaaacaagaatcagtctatccacagagagtcccactgcctcaggttcctatggctggccactgcacagagctctccagctccaagacctgttggttccaagccctggagccaactgctgctttttgaggtggcactttttcatttgcctattcccacacctccacagttcagtggcagggctcaggatttcgtgggtctgttttcctttctcaccgcagtcgtcgcacagtctctctctctctctcccctcaaagtctgcaactttaagcagctcttgctaatcagtgtctcacactggcgtagaagtttttgtactgtaaagagacctacctcaggttgctggttgctgtgtggtttggtgtgttcccgcaaaccccctttgtgctgtggggctggtagctcaggtgggcgtggtcactgctgtcatcagttgaatggtcagcgttgcatgtcgtgaccaactagacattctgtcgccttagcatgtttgctgaacaccttgtggaagcaaaaatctgaaaatgtgaataaaattattttggattttgtaaaaaaaaaaaa

SEQ ID NO: 53891 - DNA, 2896 bp, Homo sapiens
cactctgtgctctgctcctcagggcacgctgcgagcttcctcccggctgcatgacgagcttttccgaaggatccttcgaagccctatgaagttttttgacacgacccccacagggaggattctcaacaggttttccaaagacatggatgaagttgacgtgcggctgccgttccaggccgagatgttcatccagaacgttatcctggtgttcttctgtgtgggaatgatcgcaggagtcttcccgtggttccttgtggcagtggggccccttgtcatcctcttttcagtcctgcacattgtctccagggtcctgattcgggagctgaagcgtctggacaatatcacgcagtcacctttcctctcccacatcacgtccagcatacagggccttgccaccatccacgcctacaataaagggcaggagtttctgcacagataccaggagctgctggatgacaaccaagctcctttttttttgtttacgtgtgcgatgcggtggctggctgtgcggctggacctcatcagcatcgccctcatcaccaccacggggctgatgatcgttcttatgcacgggcagattcccccagcctatgcgggtctcgccatctcttatgctgtccagttaacggggctgttccagtttacggtcagactggcatctgagacagaagctcgattcacctcggtggagaggatcaatcactacattaagactctgtccttggaagcacctgccagaattaagaacaaggctccctcccctgactggccccaggagggagaggtgacctttgagaacgcagagatgaggtaccgagaaaacctccctctcgtcctaaagaaagtatccttcacgatcaaacctaaagagaagattggcattgtggggcggacaggatcagggaagtcctcgctggggatggccctcttccgtctggtggagttatctggaggctgcatcaagattgatggagtgagaatcagtgatattggccttgccgacctccgaagcaaactctctatcattcctcaagagccggtgctgttcagtggcactgtcagatcaaatttggaccccttcaaccagtacactgaagaccagatttgggatgccctggagaggacacacatgaaagaatgtattgctcagctacctctgaaacttgaatctgaagtgatggagaatggggataacttctcagtgggggaacggcagctcttgtgcatagctagagccctgctccgccactgtaagattctgattttagatgaagccacagctgccatggacacagagacagacttattgattcaagagaccatccgagaagcatttgcagactgtaccatgctgaccattgcccatcgcctgcacacggttctaggctccgataggattatggtgctggcccagggacaggtggtggagtttgacaccccatcggtccttctgtccaacgacagttcccgattctatgccatgtttgctgctgcagagaacaaggtcgctgtcaagggctgactcctccctgttgacgaagtctcttttctttagagcattgccattccctgcctggggcgggcccctcatcgcgtcctcctaccgaaaccttgcctttctcgattttatctttcgcacagcagttccggattggcttgtgtgtttcacttttagggagagtcatattttgattattgtatttattccatattcatgtaaacaaaatttagtttttgttcttaattgcactctaaaaggttcagggaaccgttattataattgtatcagaggcctataatgaagctttatacgtgtagctatatctatatataattctgtacatagcctatatttacagtgaaaatgtaagctgtttattttatattaaaataagcactgtgctaataacagtgcatattcctttctatcatttttgtacagtttgctgtactagagatctggttttgctattagactgtaggaagagtagcatttcattcttctctagctggtggtttcacggtgccaggttttctgggtgtccaaaggaagacgtgtggcaatagtgggccctccgacagccccctctgccgcctccccacagccgctccaggggtggctggagacgggtgggcggctggagaccatgcagagcgccgtgagttctcagggctcctgccttctgtcctggtgtcacttactgtttctgtcaggagagcagcggggcgaagcccaggccccttttcactccctccatcaagaatggggatcacagagacattcctccgagccggggagtttctttcctgccttcttctttttgctgttgtttctaaacaagaatcagtctatccacagagagtcccactgcctcaggttcctatggctggccactgcacagagctctccagctccaagacctgttggttccaagccctggagccaactgctgctttttgaggtggcactttttcatttgcctattcccacacctccacagttcagtggcagggctcaggatttcgtgggtctgttttcctttctcaccgcagtcgtcgcacagtctctctctctctctcccctcaaagtctgcaactttaagcagctcttgctaatcagtgtctcacactggcgtagaagtttttgtactgtaaagagacctacctcaggttgctggttgctgtgtggtttggtgtgttcccgcaaaccccctttgtgctgtggggctggtagctcaggtgggcgtggtcactgctgtcatcagttgaatggtcagcgttgcatgtcgtgaccaactagacattctgtcgccttagcatgtttgctgaacaccttgtggaagcaaaaatctgaaaatgtgaataaaattattttggattttgtaaaaaaaaaaaa

SEQ ID NO: 53892 - DNA, 5293 bp, Homo sapiens
gggagatgaggtgggaggattgcttgagcccaggagttcaagaccagcccggggcaacatagtgaaaccctgtctgtacaaaaataaatctcgggagcgtggttgagcggctggcgcggttgtcctggagcaggggcgcaggaattctgatgtgaaactaacagtctgtgagccctggaacctccactcagagaagatgaaggatatcgacataggaaaagagtatatcatccccagtcctgggtatagaagtgtgagggagagaaccagcacttctgggacgcacagagaccgtgaagattccaagttcaggagaactcgaccgttggaatgccaagatgccttggaaacagcagcccgagccgagggcctctctcttgatgcctccatgcattctcagctcagaatcctggatgaggagcatcccaagggaaagtaccatcatggcttgagtgctctgaagcccatccggactacttccaaacaccagcacccagtggacaatgctgggcttttttcctgtatgactttttcgtggctttcttctctggcccgtgtggcccacaagaagggggagctctcaatggaagacgtgtggtctctgtccaagcacgagtcttctgacgtgaactgcagaagactagagagactgtggcaagaagagctgaatgaagttgggccagacgctgcttccctgcgaagggttgtgtggatcttctgccgcaccaggctcatcctgtccatcgtgtgcctgatgatcacgcagctggctggcttcagtggaccagccttcatggtgaaacacctcttggagtatacccaggcaacagagtctaacctgcagtacagcttgttgttagtgctgggcctcctcctgacggaaatcgtgcggtcttggtcgcttgcactgacttgggcattgaattaccgaaccggtgtccgcttgcggggggccatcctaaccatggcatttaagaagatccttaagttaaagaacattaaagagaaatccctgggtgagctcatcaacatttgctccaacgatgggcagagaatgtttgaggcagcagccgttggcagcctgctggctggaggacccgttgttgccatcttaggcatgatttataatgtaattattctgggaccaacaggcttcctgggatcagctgtttttatcctcttttacccagcaatgatgtttgcatcacggctcacagcatatttcaggagaaaatgcgtggccgccacggatgaacgtgtccagaagatgaatgaagttcttacttacattaaatttatcaaaatgtatgcctgggtcaaagcattttctcagagtgttcaaaaaatccgcgaggaggagcgtcggatattggaaaaagctgggtacttccagagcatcactgtgggtgtggctcccattgtggtggtgattgccagcgtggtgaccttctctgttcatatgaccctgggcttcgatctgacagcagcacaggctttcacagtggtgacagtcttcaattccatgacttttgctttgaaagtaacaccgttttcagtaaagtccctctcagaagcctcagtggctgttgacagatttaagagtttgtttctaatggaagaggttcacatgataaagaacaaaccagccagtcctcacatcaagatagagatgaaaaatgccaccttggcatgggactcctcccactccagtatccagaactcgcccaagctgacccccaaaatgaaaaaagacaagagggcttccaggggcaagaaagagaaggtgaggcagctgcagcgcactgagcatcaggcggtgctggcagagcagaaaggccacctcctcctggacagtgacgagcggcccagtcccgaagaggaagaaggcaagcacatccacctgggccacctgcgcttacagaggacactgcacagcatcgatctggagatccaagagggtaaactggttggaatctgcggcagtgtgggaagtggaaaaacctctctcatttcagccattttaggccagatgacgcttctagagggcagcattgcaatcagtggaaccttcgcttatgtggcccagcaggcctggatcctcaatgctactctgagagacaacatcctgtttgggaaggaatatgatgaagaaagatacaactctgtgctgaacagctgctgcctgaggcctgacctggccattcttcccagcagcgacctgacggagattggagagcgaggagccaacctgagcggtgggcagcgccagaggatcagccttgcccgggccttgtatagtgacaggagcatctacatcctggacgaccccctcagtgccttagatgcccatgtgggcaaccacatcttcaatagtgctatccggaaacatctcaagtccaagacagttctgtttgttacccaccagttacagtacctggttgactgtgatgaagtgatcttcatgaaagagggctgtattacggaaagaggcacccatgaggaactgatgaatttaaatggtgactatgctaccatttttaataacctgttgctgggagagacaccgccagttgagatcaattcaaaaaaggaaaccagtggttcacagaagaagtcacaagacaagggtcctaaaacaggatcagtaaagaaggaaaaagcagtaaagccagaggaagggcagcttgtgcagctggaagagaaagggcagggttcagtgccctggtcagtatatggtgtctacatccaggctgctgggggccccttggcattcctggttattatggcccttttcatgctgaatgtaggcagcaccgccttcagcacctggtggttgagttactggatcaagcaaggaagcgggaacaccactgtgactcgagggaacgagacctcggtgagtgacagcatgaaggacaatcctcatatgcagtactatgccagcatctacgccctctccatggcagtcatgctgatcctgaaagccattcgaggagttgtctttgtcaagggcacgctgcgagcttcctcccggctgcatgacgagcttttccgaaggatccttcgaagccctatgaagttttttgacacgacccccacagggaggattctcaacaggttttccaaagacatggatgaagttgacgtgcggctgccgttccaggccgagatgttcatccagaacgttatcctggtgttcttctgtgtgggaatgatcgcaggagtcttcccgtggttccttgtggcagtggggccccttgtcatcctcttttcagtcctgcacattgtctccagggtcctgattcgggagctgaagcgtctggacaatatcacgcagtcacctttcctctcccacatcacgtccagcatacagggccttgccaccatccacgcctacaataaagggcaggagtttctgcacagataccaggagctgctggatgacaaccaagctcctttttttttgtttacgtgtgcgatgcggtggctggctgtgcggctggacctcatcagcatcgccctcatcaccaccacggggctgatgatcgttcttatgcacgggcagattcccccagcctatgcgggtctcgccatctcttatgctgtccagttaacggggctgttccagtttacggtcagactggcatctgagacagaagctcgattcacctcggtggagaggatcaatcactacattaagactctgtccttggaagcacctgccagaattaagaacaaggctccctcccctgactggccccaggagggagaggtgacctttgagaacgcagagatgaggtaccgagaaaacctccctctcgtcctaaagaaagtatccttcacgatcaaacctaaagagaagattggcattgtggggcggacaggatcagggaagtcctcgctggggatggccctcttccgtctggtggagttatctggaggctgcatcaagattgatggagtgagaatcagtgatattggccttgccgacctccgaagcaaactctctatcattcctcaagagccggtgctgttcagtggcactgtcagatcaaatttggaccccttcaaccagtacactgaagaccagatttgggatgccctggagaggacacacatgaaagaatgtattgctcagctacctctgaaacttgaatctgaagtgatggagaatggggataacttctcagtgggggaacggcagctcttgtgcatagctagagccctgctccgccactgtaagattctgattttagatgaagccacagctgccatggacacagagacagacttattgattcaagagaccatccgagaagcatttgcagactgtaccatgctgaccattgcccatcgcctgcacacggttctaggctccgataggattatggtgctggcccagggacaggtggtggagtttgacaccccatcggtccttctgtccaacgacagttcccgattctatgccatgtttgctgctgcagagaacaaggtcgctgtcaagggctgactcctccctgttgacgaagtctcttttctttagagcattgccattccctgcctggggcgggcccctcatcgcgtcctcctaccgaaaccttgcctttctcgattttatctttcgcacagcagttccggattggcttgtgtgtttcacttttagggagagtcatattttgattattgtatttattccatattcatgtaaacaaaatttagtttttgttcttaattgcactctaaaaggttcagggaaccgttattataattgtatcagaggcctataatgaagctttatacgtgtagctatatctatatataattctgtacatagcctatatttacagtgaaaatgtaagctgtttattttatattaaaataagcactgtgctaataacagtgcatattcctttctatcatttttgtacagtttgctgtactagagatctggttttgctattagactgtaggaagagtagcatttcattcttctctagctggtggtttcacggtgccaggttttctgggtgtccaaaggaagacgtgtggcaatagtgggccctccgacagccccctctgccgcctccccacagccgctccaggggtggctggagacgggtgggcggctggagaccatgcagagcgccgtgagttctcagggctcctgccttctgtcctggtgtcacttactgtttctgtcaggagagcagcggggcgaagcccaggccccttttcactccctcctcctctcctccagcattctcctctgagcagccttagatagtgtccatgg

SEQ ID NO: 53893 - DNA, 2181 bp, Homo sapiens
gggagatgaggtgggaggattgcttgagcccaggagttcaagaccagcccggggcaacatagtgaaaccctgtctgtacaaaaataaatctcgggagcgtggttgagcggctggcgcggttgtcctggagcaggggcgcaggaattctgatgtgaaactaacagtctgtgagccctggaacctccactcagagaagatgaaggatatcgacataggaaaagagtatatcatccccagtcctgggtatagaagtgtgagggagagaaccagcacttctgggacgcacagagaccgtgaagattccaagttcaggagaactcgaccgttggaatgccaagatgccttggaaacagcagcccgagccgagggcctctctcttgatgcctccatgcattctcagctcagaatcctggatgaggagcatcccaagggaaagtaccatcatggcttgagtgctctgaagcccatccggactacttccaaacaccagcacccagtggacaatgctgggcttttttcctgtatgactttttcgtggctttcttctctggcccgtgtggcccacaagaagggggagctctcaatggaagacgtgtggtctctgtccaagcacgagtcttctgacgtgaactgcagaagactagagagactgtggcaagaagagctgaatgaagttgggccagacgctgcttccctgcgaagggttgtgtggatcttctgccgcaccaggctcatcctgtccatcgtgtgcctgatgatcacgcagctggctggcttcagtggaccaaattttcaggatggctgtattctgcggtcagaatgagagagtcaagctgggcagaatctctcgccaagagttcagttcagccttcctttggagactgctccatcagtgccgaggtgtgtgggaacaggcttcactgcaccgccatcttactgagttgcttcacgtgaggaaaagggggctttggccctgtgactcagttccacattttggattgcatactggaaaagaagccaatcttcttgctagtaaaccagcaacccggctgtatacagtggtgacccaagcaatggatataaacctaaaaatctgagggaggggagaggtggaatacagtagttcttggaatctgaagtctcctatttgatcaggttatttcctgggacttggcaaaaatctgattggtggggatctcctaggacctagtggacatctggtattaatttaatctcaggaaaaacaagaaattaacccagagagagtctgggttctggaattcagcgtagctacctccagaccgtggtgtctggcctccatttttgtctgtcattcagctctgacttacagctgcagtcacctttgctataaggcacctgggtagaagggtggatgggcttcacatcaatttttttcttcctttagggtgggggattggtttggctttcttttgttgtggctttttgttttatttttgtcaagattgatttttagatgcaaggacttgaaaagacccagaaggatgccaccagtttttccttgaggcctaggattttttattctgtcccgagcagaggtaattcctcacaacttagtgcaccagtagcaccagccattttgagcagagtacctctttggggagcttttcgttttgttttgtttttaattctctttccttagcagcaaggtcttttttcctagagaatctactccgttgcagaatcattgcaacctcaggagccctcactgattgagtgctgtcagcctgatatactactttggactctggaaacagatatgggttctattctctatttctactgtgtgtcgttaaacaaccgtcggagaccagatgacctgttagatggctagtcctgtataactcgactctgtatgtttcaatgtatgttactgcaatgcttcacctgctgtacagtgtttgtgagatgctctttgaagatggtacttttatattttttcattttcaataaaagtacattccttcccaaaaaaaaaaaaatccgggtcttttcgggggcgaacggtatgatggcacggctactgtccgccagtttggccaggaatccgggccatggggtaatcggaacggtgtctcccgcccaaatcgcaccggcgctcccaggggaattccccaccccgggatagaaacaaacccaagt

SEQ ID NO: 53894 - DNA, 2669 bp, Homo sapiens
gggagatgaggtgggaggattgcttgagcccaggagttcaagaccagcccggggcaacatagtgaaaccctgtctgtacaaaaataaatctcgggagcgtggttgagcggctggcgcggttgtcctggagcaggggcgcaggaattctgatgtgaaactaacagtctgtgagccctggaacctccactcagagaagatgaaggatatcgacataggaaaagagtatatcatccccagtcctgggtatagaagtgtgagggagagaaccagcacttctgggacgcacagagaccgtgaagattccaagttcaggagaactcgaccgttggaatgccaagatgccttggaaacagcagcccgagccgagggcctctctcttgatgcctccatgcattctcagctcagaatcctggatgaggagcatcccaagggaaagtaccatcatggcttgagtgctctgaagcccatccggactacttccaaacaccagcacccagtggacaatgctgggcttttttcctgtatgactttttcgtggctttcttctctggcccgtgtggcccacaagaagggggagctctcaatggaagacgtgtggtctctgtccaagcacgagtcttctgacgtgaactgcagaagactagagagactgtggcaagaagagctgaatgaagttgggccagacgctgcttccctgcgaagggttgtgtggatcttctgccgcaccaggctcatcctgtccatcgtgtgcctgatgatcacgcagctggctggcttcagtggaccagtaagttctaaccatcctttccgacagtctccaggggcccggccacggccagctctaacactcttattctgttgcagaggttgtgctcagctttgggctaggtagcagtcttagagatgccttcaggtctgttgaaaggggtcgatggattttggcaacagctggaaggatgaaagggcagtgttgccagagaagaaatggaactggcttgatttctgggtgggggtgaaatggaactgactccagttctgcacaggactgtgcttctcggttgtgtgttaacatgaactgacagtcggtgcaggcagatgtgtcttgcagtgctatgagtgggtgagagcacgttgtgtggcccgggctggtgagccagcaccgggaacataccaagtgcctggaggcagttatcacatgtttggcaggtctgtggcaaataagccctgagaaaactagaggactgtcgaggattttagagtctgacctggagtccgtttaagtttggcttatagtgtgactgtgtggcaagtgttggggtggcagccgtggttttccccagtctgtactgatgcagagtagacaagagagcctttgacgttcactctgtttcctgggcacctgtttcttacacctgctgtgctgccttacacttgagaccttgattaaatctattctctacacatttgccttgaggcatcggagcagtagtactgcttgtactgtgcgttttccatatgtgggtaagctggaggttcatggttttggtaagtatgtgcctaagatgcatggcaattaggtaaaactaatttgcagttttgtttttgtttttatttttttaacgtttgatgcctcttgttaaagttttgatctcttttctgaagcagagaacactacttttctggtattgggtttctatattattaataattgaccaactaacatactttatataaaagttttaagtaagaaggaccatgtaactgaaatgttgtgttatgtaatttaccaaaatggcaaacattttcatagagccagcttcccccaagaagagcttctgtcattgtttcactacagggctggtggctgctctgatctcatagaattcattcctctgggtagcaccatatgcaggctttgcgaataaagtgatcatgggctttcttgattccatttggccaatgcaagaacttcattggctcccctctaaaaaaaattccatggattgctgggatttttattttttattttttgaaaaaaatggtacctatccgtattcagcttggtggcttcacagtccctcccctgaacatccgtatattccttattctctcatttatggtgcagaacactggggtactaacctctaggaaactgttctagctgccagggaaagctaagagccctcctttaacaggaaagcagcagcatgctttttcttctctctgccgtttcagggaagagcaccttaaggccagtgttatttcatgggattctgccctagagctgagaaagtaatggactcatccataatctcttttatagatttgaaagtgtaaacaatacacacttccttttttggaactccaattctaatatgtttctttttcattggaaattgaaaaaccaggctggttttgagattagtactagcagtgagtaaacctcctgtctgtggacttaaatccttttgaggaacatttcgttttagatttttacaagttttctaatctggcacgactttcaaactagcttaatctgttcttacagaaacctgtgtaaggacagactgcccacatacgggctccccaaataaaatggcatttttatttcatgtccctgctcgggtttcaccgaaccttggtagccataatcagaacaaatgaaacac

SEQ ID NO: 53895 - DNA, 2402 bp, Homo sapiens
gggagatgaggtgggaggattgcttgagcccaggagttcaagaccagcccggggcaacatagtgaaaccctgtctgtacaaaaataaatctcgggagcgtggttgagcggctggcgcggttgtcctggagcaggggcgcaggaattctgatgtgaaactaacagtctgtgagccctggaacctccactcagagaagatgaaggatatcgacataggaaaagagtatatcatccccagtcctgggtatagaagtgtgagggagagaaccagcacttctgggacgcacagagaccgtgaagattccaagttcaggagaactcgaccgttggaatgccaagatgccttggaaacagcagcccgagccgagggcctctctcttgatgcctccatgcattctcagctcagaatcctggatgaggagcatcccaagggaaagtaccatcatggcttgagtgctctgaagcccatccggactacttccaaacaccagcacccagtggacaatgctgggcttttttcctgtatgactttttcgtggctttcttctctggcccgtgtggcccacaagaagggggagctctcaatggaagacgtgtggtctctgtccaagcacgagtcttctgacgtgaactgcagaagactagagagactgtggcaagaagagctgaatgaagttgggccagacgctgcttccctgcgaagggttgtgtggatcttctgccgcaccaggctcatcctgtccatcgtgtgcctgatgatcacgcagctggctggcttcagtggaccagccttcatggtgaaacacctcttggagtatacccaggcaacagagtctaacctgcagtacagcttgttgttagtgctgggcctcctcctgacggaaatcgtgcggtcttggtcgcttgcactgacttgggcattgaattaccgaaccggtgtccgcttgcggggggccatcctaaccatggcatttaagaagatccttaagttaaagaacattaaagagaaatccctgggtgagctcatcaacatttgctccaacgatgggcagagaatgtttgaggcagcagccgttggcagcctgctggctggaggacccgttgttgccatcttaggcatgatttataatgtaattattctgggaccaacaggcttcctgggatcagctgtttttatcctcttttacccagcaatgatgtttgcatcacggctcacagcatatttcaggagaaaatgcgtggccgccacggatgaacgtgtccagaagatgaatgaagttcttacttacattaaatttatcaaaatgtatgcctgggtcaaagcattttctcagagtgttcaaaaaatccgcgaggaggagcgtcggatattggaaaaagctgggtacttccagagcatcactgtgggtgtggctcccattgtggtggtgattgccagcgtggtgaccttctctgttcatatgaccctgggcttcgatctgacagcagcacaggctttcacagtggtgacagtcttcaattccatgacttttgctttgaaagtaacaccgttttcagtaaagtccctctcagaagcctcagtggctgttgacagatttaagagtttgtttctaatggaagaggttcacatgataaagaacaaaccagccagtcctcacatcaagatagagatgaaaaatgccaccttggcatgggactcctcccactccagtatccagaactcgcccaagctgacccccaaaatgaaaaaagacaagagggcttccaggggcaagaaagagaaggtgaggcagctgcagcgcactgagcatcaggcggtgctggcagagcagaaaggccacctcctcctggacagtgacgagcggcccagtcccgaagaggaagaaggcaagcacatccacctgggccacctgcgcttacagaggacactgcacagcatcgatctggagatccaagagggtaaactggttggaatctgcggcagtgtgggaagtggaaaaacctctctcatttcagccattttaggccagatgacacttcgtgggcagccacttcgtgggcagcgctgcccacgaaggtgacccggaaagaagcagaagtcgagtgaggtgaggaccacacagaaacattgagacccagactttcccatcatttagcatattgccagggaaagtgcccacacaggagaacctggaatccccaggccatagttagtcctggccatgtaactttagccatgacagtaatctccactttgttcattaccagagtgaacagattagtgcacaggatgaactgtaggctgggaatggtagctcaggcctgtaaaccaggactttgggaggccattcggggagggggtacgagtcgaatcgtaatatgtcctagtgttctggtgatgtc

SEQ ID NO: 53896 - DNA, 336 bp, Homo sapiens
aggccggggtctgaacgtgtgttcttgggccccagtggggaagcattgcttacgtaaagccgtcgagggtcccacaaaaccatccagccttaagaaggctctgagcagtcctgcagaaaggcagcccatttaagccaatttacccagagtttcccgaatttatttacccaagcgaacccctttttccttaaaatgtctgtgaatcaatcatgagattgaaaggtttcacgcccttctctgcttgggtgctattctctacctccatgaactgttcttgctgttcaaatctgagtagaaatcctggacatttggatttgcttgattagaaaacccttg

SEQ ID NO: 53897 - DNA, 522 bp, Homo sapiens
tccttccctctcttaggcaaaccttttagagaagtcagctgagcaaatatgtacaggtgaattcaaagcaaaagcctcacaaagttgatttgccttagagcaaaggacagttcctttcttcaattctaattagaggtgttgggtttttaattaaatatattactgctgtacttagaggagttcttaaacctccaagtaaaatcaaaaacctctttaaaatcaaaatttctgtcttgatttatttatttattattttttttttgagatggagttttgctcttgttgtccaggctggagtgcaatggcacgatctccgctcaccgcaacctccgcctcccaggttcaaatgattctcctgcctcagcctcctgagtagctgggaatacaggcatgcgccaccacacccagataattttgtatttttagtagagatggggtttctccgtgttggtcaggctggtcttgaactcccgacctcaggtgatctgcccacctctgcctcccagagtgccaggattacag

SEQ ID NO: 53898 - DNA, 299 bp, Homo sapiens
ttttttatgtctcagtagtattccgtcgtctatttacattacattgtctttatttactaattggttgttgggcacttaggttggttccatatttctgcaattgcaaattgtgttgctataagcatgcagattttacatacagttttgaagattgtttttattataaacttttagaatggcaattattttctttctccactaaaatatgtcattccattagcttttgtctgcaattatttctattgagaaatttcttatcctcacttctttgaagagaacatatccattttatttgtgct

SEQ ID NO: 53899 - DNA, 506 bp, Homo sapiens
tttgtatttttagtagagttggggtttcaccatgttggccaggctggtctggaactcctgacctcaagtgatccacccgcctcagcttcccaaagtgctggggttacaggcgtgactactgcacctggcctggttttttaaagtgatataaataatagattttcatagtagaaaaaagtgaaggcctgtattagcaaaagaataaaatataaatcacctctgctctcactaccaagtgataatcattgttaatagtatgggatatacttttttctagagtgcttttgattttagaaaaaggggagtttggtctactaaaatctgcctttacaaaaaattgggagcagtgttttgaataacttttcacatcacttgtatgtgtgtcccatcattttttagagctgctctgtgatgtgggttagcagtctactttcccccatattgttctgtttgcttctactttttccccatgataattagtaaatattaaattacatattttttcc

SEQ ID NO: 53900 - DNA, 87 bp, Homo sapiens
  misc_feature (76)..(76): n is a, c, g, or t
ctctcattaactacaacctctgcccatgttactcaaaatgtgattcaattcagttattcattcaacatacgataantgtgtgccttg

SEQ ID NO: 53901 - DNA, 353 bp, Homo sapiens
aggggccagaacacacatttttaactgacacctctaagaatacacaggtgagatgatcaccaggtttactaagaaattcactgatggatctcctttgcaggccagtgttgatggcaggggaagtggtcatttagatggctcattaatatacagatgaataacctgatcctggagtaacagaacctcaacagtcagaagtcagtagtcttcaattcaattaacatgttgacctgcaaaattggagtggcagccagtggaacttgtgaagatggttaataaactatggtatgcctagaggcagccaacaagggtatctattaacattgacagcaataacatgataatattgggag

SEQ ID NO: 53902 - DNA, 470 bp, Homo sapiens
aaaaaactgcaactgtaaccaaggtagctttgcctcttttgtagccttcctaaggctcaaacagaaaccttgtcatattcctctctcacctgatgagcaacagttatagaaattctataactaggagggtagcttaaatcactcaagtccatcttgtgggtgtgaaaatatttcattcccaagatataaagatctacatttaagtctcacactctttttctgccccaacttaattagaaattattcagaatgatttttattagaagtttatatgttttatggcacaataagaaaaataagtaatagatgtcccaaactgctactcagccttctctgcaactaaaacacacatcattagattcttcagcaatgttgtttagtactggctgactttcatccagacattcttgatttgacgctgcatccctgccccctcccgtaatctctcttttgccaaaggtccaagtttt

SEQ ID NO: 53903 - DNA, 427 bp, Homo sapiens
aaccaagaggccgtatcttcatttttgtcaacaactactaagagtcaccccaatgggtgatgtgccagaaatctatttaaaataaactgcctatcgcacctcattacatcaccagtgaaactgtacacaatgtcttcaaaactgcatctgcattaactcctaaaagcaaaagcgttctgcagcaaagacaaggccaagaaactgggagtcaaacccatgaagtttggctccccccaatcaatctcatttttactttaacttatccccatgaacttgacatgccacccagacaaactggcagcttttccatcctattaggttttaattatgaaactggcttcataccatgttattcggagaggagtccctccaccaatgaggctgctcctacagtctctgatctgctgaataaataccaattgccaga

SEQ ID NO: 53904 - DNA, 330 bp, Homo sapiens
agagacctggaataaagccactattaatcaactattagtttggtgactattagtcaaagccaggaccagagccagaagctggactttcctttcccctggccaaaccttgtgtgcacactgtttcttcccctccccaccctgtcaggccattgatgtgatggctccccattcacaccttcatttctcctctttaacgtgaccagggctgttctgaacctccttactttggcctcctctgcccagaacaggtcaggcccctctgcatccatcaaccaggtgtgctctcctgaccattctttgtcagatgggcaccttcactaactcagctct

SEQ ID NO: 53905 - DNA, 339 bp, Homo sapiens
ggaggattgcatgtcgggtaggggagttggggtggacatagacttaaaatcctccccaccaacaaacagctcaggacctgctgttcctgtgtctaggcagcccagcttcccccactgttcccccccttcatctcccaggtgctacaggacccccagagcgctgtggtgagccaagcagatatgccccaggtctcacaaggttcagtctggtgggaagacaggccctaaaggagaactgacaactgggttatgtggtctcggggttcagagggaggaagtcaaaaagggggaaccaacccagggcctgcttcctggaggaagaagtcatagggtagactt

SEQ ID NO: 53906 - DNA, 319 bp, Homo sapiens
tgcctcagcctccagagtaactgggattacaggcgcccgccgccacgcctggctaatttttgtatttttagtagagatgggattttgccatgttggccaggctggtctccaactcttgatctcaggtgatccacctgccacagcctcccaaagtgctgggatcacaggcatgagccactgcgcctgcctccatttcctttttataattcatccctgaactcccttaaggtagagaagctgtttgatcgtcccagcccctgggaggctgaaaggtaacttcaccagctccatgcctgagtttagcacctgctgtgccagg

SEQ ID NO: 53907 - DNA, 1267 bp, Homo sapiens
gaggaaccttattaaaagttatatttcctattagtagccttaagaatggcaaatgaagacctctttttgagactgtctgcttgtaaaaattttttaaatatgtgtctgtactatagagatatgtgtatggctgaatgtgctttgtgtatagattattgtcaaatggtacctagattattctatatgtgtgcaacagtgactttgggccactctctctttgagaaaccaatgatatgatggcccggagtagataggatcataatgatttaagtttctaaaaaccactggtaaatgaaaaactagtaaactgagctgagatttagggatgttgggcttcattcccagatgaactactttggagaatcctttcctttctattaggtgaggttaaacaagttgctttctttttctttctcttactttccttggctagtgtacagactccataaaatctgataaaaggggtttcctgtagtctgacccccgacattgaggagactgtaatggaggtgacttctcatgcaagatttggccagcgttctagcagtgtcccgggagtgccatggtttggcaggaagacaggaaccccacaaggccaacttctgcctggacttcggcctgaggagccagtgggagccagtgaaactgtctgactctccacatgcgtcagggccctgccgccctggcaccaaggctggcacgcaccagagggcaagtggagaagcggatggtggctcccatgttatctgactaaccactgggtgggctacactccctgtgcccccgctgttgcctctgataggagtatgcttggttcttggtattgacttgcctttttttgttgttttttaaaagcacccattttgttcaatgcttctgttctattactcaaaatgtagccaaaatagaagggaatcaattactagtgtattattttgaaagcttcaaacagaaattgtgaaatgttatttctgctcatattcttagtgttttctcttggtagaatcataatgtttagcctttatgatatttaaaacccattttgagtgttaggtttatttttatgatactctgccggtaacttttaagtcatcaggctaggatatgaagagtagttttttaagtttatgttttaaaagtgaaatattgtgaatctttcatcatagttctcatcaatatccctcagaatttttaaatgttaatgctttaatatttaggaaaaattttataccaaagttgaaaaaaaatagaatcctgttactcccga

SEQ ID NO: 53908 - DNA, 414 bp, Homo sapiens
  misc_feature (57)..(57): n is a, c, g, or t
  misc_feature (59)..(59): n is a, c, g, or t
  misc_feature (93)..(93): n is a, c, g, or t
gccaaaatagaagggaatcaattacctttaaaaagggggttggggtacaattttcantntttttgcaacagacgggggccctttttttcccanaacaagaaattgtgaaatgttatttctgctcatattcttagtgttttctcttggtagaatcataatgtttagcctttatgatatttaaaacccattttgagtgttaggtttatttttatgatactctgccggtaacttttaagtcatcaggctaggatatgaagagtagttttttaagtttatgttttaaaagtgaaatattgtgaatctttcatcatagttctcatcaatatccctcagaatttttaaatgttaatgctttaatatttaggaaaaattttataccaaagttgaaaaaaaatagaatcctgttactcccga

SEQ ID NO: 53909 - DNA, 398 bp, Homo sapiens
ttccatcttttttccccccatttttctatcttacgaactttctgatcaaatcttttgcctatatttttattgggtcatttatcttactattaagatagaattctgggccgggcacagtggctcatgcctgtaatctcagcactttgggagtctgaatcaggcagatcacttgaggtttgaggtcaggagttcgagaccagcctggccaacatggtgaaaccccatctgtactagaaatacaaaaaatcagccaggtgtggtggtgcacgcttgtaattccagctactcaggaggctgaggcaggagaaccgcttgaactttggaggcgaaggttgcagtgagccgagatctggccactgaactccagcatgggagacagagggagagtccatctcaaa

SEQ ID NO: 53910 - DNA, 390 bp, Homo sapiens
agccagatcacctcaggctgcatagaggaagaggttttacttcagctcttaaatccatttccaagtaatttttgtacatggtatccaaaatttttgtacataggagtccagtttcacagtccaattttcccagcaccatttattgaagattatcctttcctcagtgtatgttcttgttgactttgccaaaaatcagttggctgtaagtatgtggctttctgggttctctattctgtccattgatcaatgtgtctgtttttaacagcagtaccatgctgttttgattactatagccctgtagtgtaatttgcagtaaggaaatgctccagctttgttctttttgctgctattgctttagctatttggattcttttttggttccatatgaac

SEQ ID NO: 53911 - DNA, 3367 bp, Homo sapiens
agcggaagcctctcggtctgtggcagcagcgttggcccggccccgggagcggagagcgaggggaggcggagacggaggaaggtctgaggagcagcttcagtccccgccgagccgccaccgcaggtcgaggacggtcggactcccgcggcgggaggagcctgttcccctgagggtatttgaagtataccatacaactgttttgaaaatccagcgtggacaatggctactcaagctgatttgatggagttggacatggccatggaaccagacagaaaagcggctgttagtcactggcagcaacagtcttacctggactctggaatccattctggtgccactaccacagctccttctctgagtggtaaaggcaatcctgaggaagaggatgtggatacctcccaagtcctgtatgagtgggaacagggattttctcagtccttcactcaagaacaagtagctgatattgatggacagtatgcaatgactcgagctcagagggtacgagctgctatgttccctgagacattagatgagggcatgcagatcccatctacacagtttgatgctgctcatcccactaatgtccagcgtttggctgaaccatcacagatgctgaaacatgcagttgtaaacttgattaactatcaagatgatgcagaacttgccacacgtgcaatccctgaactgacaaaactgctaaatgacgaggaccaggtggtggttaataaggctgcagttatggtccatcagctttctaaaaaggaagcttccagacacgctatcatgcgttctcctcagatggtgtctgctattgtacgtaccatgcagaatacaaatgatgtagaaacagctcgttgtaccgctgggaccttgcataacctttcccatcatcgtgagggcttactggccatctttaagtctggaggcattcctgccctggtgaaaatgcttggttcaccagtggattctgtgttgttttatgccattacaactctccacaaccttttattacatcaagaaggagctaaaatggcagtgcgtttagctggtgggctgcagaaaatggttgccttgctcaacaaaacaaatgttaaattcttggctattacgacagactgccttcaaattttagcttatggcaaccaagaaagcaagctcatcatactggctagtggtggaccccaagctttagtaaatataatgaggacctatacttacgaaaaactactgtggaccacaagcagagtgctgaaggtgctatctgtctgctctagtaataagccggctattgtagaagctggtggaatgcaagctttaggacttcacctgacagatccaagtcaacgtcttgttcagaactgtctttggactctcaggaatctttcagatgctgcaactaaacaggaagggatggaaggtctccttgggactcttgttcagcttctgggttcagatgatataaatgtggtcacctgtgcagctggaattctttctaacctcacttgcaataattataagaacaagatgatggtctgccaagtgggtggtatagaggctcttgtgcgtactgtccttcgggctggtgacagggaagacatcactgagcctgccatctgtgctcttcgtcatctgaccagccgacaccaagaagcagagatggcccagaatgcagttcgccttcactatggactaccagttgtggttaagctcttacacccaccatcccactggcctctgataaaggctactgttggattgattcgaaatcttgccctttgtcccgcaaatcatgcacctttgcgtgagcagggtgccattccacgactagttcagttgcttgttcgtgcacatcaggatacccagcgccgtacgtccatgggtgggacacagcagcaatttgtggagggggtccgcatggaagaaatagttgaaggttgtaccggagcccttcacatcctagctcgggatgttcacaaccgaattgttatcagaggactaaataccattccattgtttgtgcagctgctttattctcccattgaaaacatccaaagagtagctgcaggggtcctctgtgaacttgctcaggacaaggaagctgcagaagctattgaagctgagggagccacagctcctctgacagagttacttcactctaggaatgaaggtgtggcgacatatgcagctgctgttttgttccgaatgtctgaggacaagccacaagattacaagaaacggctttcagttgagctgaccagctctctcttcagaacagagccaatggcttggaatgagactgctgatcttggacttgatattggtgcccagggagaaccccttggatatcgccaggatgatcctagctatcgttcttttcactctggtggatatggccaggatgccttgggtatggaccccatgatggaacatgagatgggtggccaccaccctggtgctgactatccagttgatgggctgccagatctggggcatgcccaggacctcatggatgggctgcctccaggtgacagcaatcagctggcctggtttgatactgacctgtaaatcatcctttagctgtattgtctgaacttgcattgtgattggcctgtagagttgctgagagggctcgaggggtgggctggtatctcagaaagtgcctgacacactaaccaagctgagtttcctatgggaacaattgaagtaaactttttgttctggtcctttttggtcgaggagtaacaatacaaatggattttgggagtgactcaagaagtgaagaatgcacaagaatggatcacaagatggaatttagcaaaccctagccttgcttgttaaaatttttttttttttttttttaagaatatctgtaatggtactgactttgcttgctttgaagtagctctttttttttttttttttttttttttttgcagtaactgttttttaagtctctcgtagtgttaagttatagtgaatactgctacagcaatttctaatttttaagaattgagtaatggtgtagaacactaattaattcataatcactctaattaattgtaatctgaataaagtgtaacaattgtgtagcctttttgtataaaatagacaaatagaaaatggtccaattagtttcctttttaatatgcttaaaataagcaggtggatctatttcatgtttttgatcaaaaactatttgggatatgtatgggtagggtaaatcagtaagaggtgttatttggaaccttgttttggacagtttaccagttgccttttatcccaaagttgttgtaacctgctgtgatacgatgcttcaagagaaaatgcggttataaaaaatggttcagaattaaacttttaattcatt

SEQ ID NO: 53912 - DNA, 2604 bp, Homo sapiens
agcggaagcctctcggtctgtggcagcagcgttggcccggccccgggagcggagagcgaggggaggcggagacggaggaaggtctgaggagcagcttcagtccccgccgagccgccaccgcaggtcgaggacggtcggactcccgcggcgggaggagcctgttcccctgagggtatttgaagtataccatacaactgttttgaaaatccagcgtggacaatggctactcaagctgatttgatggagttggacatggccatggaaccagacagaaaagcggctgttagtcactggcagcaacagtcttacctggactctggaatccattctggtgccactaccacagctccttctctgagtggtaaaggcaatcctgaggaagaggatgtggatacctcccaagtcctgtatgagtgggaacagggattttctcagtccttcactcaagaacaagtagctgatattgatggacagtatgcaatgactcgagctcagagggtacgagctgctatgttccctgagacattagatgagggcatgcagatcccatctacacagtttgatgctgctcatcccactaatgtccagcgtttggctgaaccatcacagatgctgaaacatgcagttgtaaacttgattaactatcaagatgatgcagaacttgccacacgtgcaatccctgaactgacaaaactgctaaatgacgaggaccaggtggtggttaataaggctgcagttatggtccatcagctttctaaaaaggaagcttccagacacgctatcatgcgttctcctcagatggtgtctgctattgtacgtaccatgcagaatacaaatgatgtagaaacagctcgttgtaccgctgggaccttgcataacctttcccatcatcgtgagggcttactggccatctttaagtctggaggcattcctgccctggtgaaaatgcttggttcaccagtggattctgtgttgttttatgccattacaactctccacaaccttttattacatcaagaaggagctaaaatggcagtgcgtttagctggtgggctgcagaaaatggttgccttgctcaacaaaacaaatgttaaattcttggctattacgacagactgccttcaaattttagcttatggcaaccaagaaagcaagctcatcatactggctagtggtggaccccaagctttagtaaatataatgaggacctatacttacgaaaaactactgtggaccacaagcagagtgctgaaggtgctatctgtctgctctagtaataagccggctattgtagaagctggtggaatgcaagctttaggacttcacctgacagatccaagtcaacgtcttgttcagaactgtctttggactctcaggaatctttcagatgctgcaactaaacaggaagggatggaaggtctccttgggactcttgttcagcttctgggttcagatgatataaatgtggtcacctgtgcagctggaattctttctaacctcacttgcaataattataagaacaagatgatggtctgccaagtgggtggtatagaggctcttgtgcgtactgtccttcgggctggtgacagggaagacatcactgagcctgccatctgtgctcttcgtcatctgaccagccgacaccaagaagcagagatggcccagaatgcagttcgccttcactatggactaccagttgtggttaagctcttacacccaccatcccactggcctctgataaaggctactgttggattgattcgaaatcttgccctttgtcccgcaaatcatgcacctttgcgtgagcagggtgccattccacgactagttcagttgcttgttcgtgcacatcaggatacccagcgccgtacgtccatgggtgggacacagcagcaatttgtggagggggtccgcatggaagaaatagttgaaggttgtaccggagcccttcacatcctagctcgggatgttcacaaccgaattgttatcagaggactaaataccattccattgtttgtgcagctgctttattctcccattgaaaacatccaaagagtagctgcaggggtcctctgtgaacttgctcaggacaaggaagctgcagaagctattgaagctgagggagccacagctcctctgacagagttacttcactctaggaatgaaggtgtggcgacatatgcagctgctgttttgttccgaatgtctgaggacaagccacaagattacaagaaacggctttcagttgagctgaccagctctctcttcagaacagagccaatggcttggaatgagactgctgatcttggacttgatattggtgcccagggagaaccccttggatatcgccaggatgatcctagctatcgttcttttcactctggtggatatggccaggatgccttgggtatggaccccatgatggaacatgagatgggtggccaccaccctggtgctgactatccagttgatgggctgccagatctggggcatgcccaggacctcatggatgggctgcctccaggtgacagcaatcagctggcctggtttgatactgacctgtaaatcatcctttaggagtaacaatacaaatggattttgccc

SEQ ID NO: 53913 - DNA, 2736 bp, Homo sapiens
agcggaagcctctcggtctgtggcagcagcgttggcccggccccgggagcggagagcgaggggaggcggagacggaggaaggtctgaggagcagcttcagtccccgccgagccgccaccgcaggtcgaggacggtcggactcccgcggcgggaggagcctgttcccctgagggtatttgaagtataccatacaactgttttgaaaatccagcgtggacaatggctactcaaggctaccttttgctccattttctgctcactcctcctaatggcttggtgaaatagcaaacaagccaccagcaggaatctagtctggatgactgcttctggagcctggatgcagtaccattcttccactgattcactgatttgatggagttggacatggccatggaaccagacagaaaagcggctgttagtcactggcagcaacagtcttacctggactctggaatccattctggtgccactaccacagctccttctctgagtggtaaaggcaatcctgaggaagaggatgtggatacctcccaagtcctgtatgagtgggaacagggattttctcagtccttcactcaagaacaagtagctgatattgatggacagtatgcaatgactcgagctcagagggtacgagctgctatgttccctgagacattagatgagggcatgcagatcccatctacacagtttgatgctgctcatcccactaatgtccagcgtttggctgaaccatcacagatgctgaaacatgcagttgtaaacttgattaactatcaagatgatgcagaacttgccacacgtgcaatccctgaactgacaaaactgctaaatgacgaggaccaggtggtggttaataaggctgcagttatggtccatcagctttctaaaaaggaagcttccagacacgctatcatgcgttctcctcagatggtgtctgctattgtacgtaccatgcagaatacaaatgatgtagaaacagctcgttgtaccgctgggaccttgcataacctttcccatcatcgtgagggcttactggccatctttaagtctggaggcattcctgccctggtgaaaatgcttggttcaccagtggattctgtgttgttttatgccattacaactctccacaaccttttattacatcaagaaggagctaaaatggcagtgcgtttagctggtgggctgcagaaaatggttgccttgctcaacaaaacaaatgttaaattcttggctattacgacagactgccttcaaattttagcttatggcaaccaagaaagcaagctcatcatactggctagtggtggaccccaagctttagtaaatataatgaggacctatacttacgaaaaactactgtggaccacaagcagagtgctgaaggtgctatctgtctgctctagtaataagccggctattgtagaagctggtggaatgcaagctttaggacttcacctgacagatccaagtcaacgtcttgttcagaactgtctttggactctcaggaatctttcagatgctgcaactaaacaggaagggatggaaggtctccttgggactcttgttcagcttctgggttcagatgatataaatgtggtcacctgtgcagctggaattctttctaacctcacttgcaataattataagaacaagatgatggtctgccaagtgggtggtatagaggctcttgtgcgtactgtccttcgggctggtgacagggaagacatcactgagcctgccatctgtgctcttcgtcatctgaccagccgacaccaagaagcagagatggcccagaatgcagttcgccttcactatggactaccagttgtggttaagctcttacacccaccatcccactggcctctgataaaggctactgttggattgattcgaaatcttgccctttgtcccgcaaatcatgcacctttgcgtgagcagggtgccattccacgactagttcagttgcttgttcgtgcacatcaggatacccagcgccgtacgtccatgggtgggacacagcagcaatttgtggagggggtccgcatggaagaaatagttgaaggttgtaccggagcccttcacatcctagctcgggatgttcacaaccgaattgttatcagaggactaaataccattccattgtttgtgcagctgctttattctcccattgaaaacatccaaagagtagctgcaggggtcctctgtgaacttgctcaggacaaggaagctgcagaagctattgaagctgagggagccacagctcctctgacagagttacttcactctaggaatgaaggtgtggcgacatatgcagctgctgttttgttccgaatgtctgaggacaagccacaagattacaagaaacggctttcagttgagctgaccagctctctcttcagaacagagccaatggcttggaatgagactgctgatcttggacttgatattggtgcccagggagaaccccttggatatcgccaggatgatcctagctatcgttcttttcactctggtggatatggccaggatgccttgggtatggaccccatgatggaacatgagatgggtggccaccaccctggtgctgactatccagttgatgggctgccagatctggggcatgcccaggacctcatggatgggctgcctccaggtgacagcaatcagctggcctggtttgatactgacctgtaaatcatcctttaggagtaacaatacaaatggattttgccc

SEQ ID NO: 53914 - DNA, 2498 bp, Homo sapiens
tcagcaggagtcttagtacagcgtcagggcggactcccgcggcgggaggagcctgttcccctgagggtatttgaagtataccatacaactgttttgaaaatccagcgtggacaatggctactcaagctgatttgatggagttggacatggccatggaaccagacagaaaagcggctgttagtcactggcagcaacagtcttacctggactctggaatccattctggtgccactaccacagctccttctctgagtggtaaaggcaatcctgaggaagaggatgtggatacctcccaagtcctgtatgagtgggaacagggattttctcagtccttcactcaagaacaagtagctgatattgatggacagtatgcaatgactcgagctcagagggtacgagctgctatgttccctgagacattagatgagggcatgcagatcccatctacacagtttgatgctgctcatcccactaatgtccagcgtttggctgaaccatcacagatgctgaaacatgcagttgtaaacttgattaactatcaagatgatgcagaacttgccacacgtgcaatccctgaactgacaaaactgctaaatgacgaggaccaggtggtggttaataaggctgcagttatggtccatcagctttctaaaaaggaagcttccagacacgctatcatgcgttctcctcagatggtgtctgctattgtacgtaccatgcagaatacaaatgatgtagaaacagctcgttgtaccgctgggaccttgcataacctttcccatcatcgtgagggcttactggccatctttaagtctggaggcattcctgccctggtgaaaatgcttggttcaccagtggattctgtgttgttttatgccattacaactctccacaaccttttattacatcaagaaggagctaaaatggcagtgcgtttagctggtgggctgcagaaaatggttgccttgctcaacaaaacaaatgttaaattcttggctattacgacagactgccttcaaattttagcttatggcaaccaagaaagcaagctcatcatactggctagtggtggaccccaagctttagtaaatataatgaggacctatacttacgaaaaactactgtggaccacaagcagagtgctgaaggtgctatctgtctgctctagtaataagccggctattgtagaagctggtggaatgcaagctttaggacttcacctgacagatccaagtcaacgtcttgttcagaactgtctttggactctcaggaatctttcagatgctgcaactaaacaggaagggatggaaggtctccttgggactcttgttcagcttctgggttcagatgatataaatgtggtcacctgtgcagctggaattctttctaacctcacttgcaataattataagaacaagatgatggtctgccaagtgggtggtatagaggctcttgtgcgtactgtccttcgggctggtgacagggaagacatcactgagcctgccatctgtgctcttcgtcatctgaccagccgacaccaagaagcagagatggcccagaatgcagttcgccttcactatggactaccagttgtggttaagctcttacacccaccatcccactggcctctgataaaggctactgttggattgattcgaaatcttgccctttgtcccgcaaatcatgcacctttgcgtgagcagggtgccattccacgactagttcagttgcttgttcgtgcacatcaggatacccagcgccgtacgtccatgggtgggacacagcagcaatttgtggagggggtccgcatggaagaaatagttgaaggttgtaccggagcccttcacatcctagctcgggatgttcacaaccgaattgttatcagaggactaaataccattccattgtttgtgcagctgctttattctcccattgaaaacatccaaagagtagctgcaggggtcctctgtgaacttgctcaggacaaggaagctgcagaagctattgaagctgagggagccacagctcctctgacagagttacttcactctaggaatgaaggtgtggcgacatatgcagctgctgttttgttccgaatgtctgaggacaagccacaagattacaagaaacggctttcagttgagctgaccagctctctcttcagaacagagccaatggcttggaatgagactgctgatcttggacttgatattggtgcccagggagaaccccttggatatcgccaggatgatcctagctatcgttcttttcactctggtggatatggccaggatgccttgggtatggaccccatgatggaacatgagatgggtggccaccaccctggtgctgactatccagttgatgggctgccagatctggggcatgcccaggacctcatggatgggctgcctccaggtgacagcaatcagctggcctggtttgatactgacctgtaaatcatcctttaggagtaacaatacaaatggattttgccc

SEQ ID NO: 53915 - DNA, 301 bp, Homo sapiens
aattaaatgacttcccagaaaaaaaaaagaattagtaaatgtaaattcatagactagtaaatagtgtcatactctatctgataaaatagaagaatgtgttggcaaagatgctgatggtacatacagaagctagagaaaaacagccaaaagggtaagaatttgatgttacatttctagcaatgtaatggtctgaggtcagaatgaagggattattaagctttctggctactagaaaaatatgtcctctcttatgggcctgacttaaaggccttgctgaagtcagctgggttgtagtatgtcc

SEQ ID NO: 53916 - DNA, 351 bp, Homo sapiens
gttaattatccaagtaaatgatgaaaaacaatgacttctcatttgggtgcctttatcctccaaacactataattattgtaaaaactctcaaagtatattctgagatgtataataagaatttaaataactatattcagattataacaaaagagagagaatacaacagatacggttggaagtatgagaactcaattatcagccaaatcctaagttttagatgaacacagtgaattctgaaaaaacagactgtttagcccaaaatcactccactaagtagcaggcttaaaagctataatttcatactctttatttcatagtagtttcatatatacaatagattattatatatac

SEQ ID NO: 53917 - DNA, 499 bp, Homo sapiens
tgagggttgcagcagatgcctgtgtccacatctggacagcattgctggctaacgccaaccccacctggcttgggaacaggcttgaatgtgtggtctgtcctgggcaaagagtaagttcctagaaaatcccagcagtcactgggaagtctgatgacttcctgagccgagctcttggtgtgatgtgatcccatcggtggtgttacttctggtttttgtcttgttcacaataggatttggagtagtttacaaaggttaacaaagttcagggagtcagggaagggaaaattaagaaaaagcccacaggacagagtggagcatgtggcaaggtcagcggccgcgtggacgtctccgattgtgctggctgtgctgctgtggccgcggtggggcagaaggccagacgtcctcacttcccccaaccccagtccagttgtacatgttgtgcactgcacaagggccctggcagaggaccaagttggagttgaaatccagccatggcatg

SEQ ID NO: 53918 - DNA, 514 bp, Homo sapiens
ttctgaggaggaagtcccagagcagactttggctcaactctaagagagcagctggaatggccccacaggctacagcccgtgtcggtgtgggatgcgagggagaggagccaggatggccccacatgctttccttggctgcctgggcgggtgcagcagccacctgagagggccgtctgaggacacgaggcgcatcagcctcatgagatctgggatgtgcacgggacgtccatgaagccgtcggagatgatttggagtagtttacaaaggttaacaaagttcagggagtcagggaagggaaaattaagaaaaagcccacaggacagagtggagcatgtggcaaggtcagcggccgcgtggacgtctccgattgtgctggctgtgctgctgtggccgcggtggggcagaaggccagacgtcctcacttcccccaaccccagtccagttgtacatgttgtgcactgcacaagggccctggcagaggaccaagttggagttgaaatccagccatggcatg

SEQ ID NO: 53919 - DNA, 321 bp, Homo sapiens
ttctgaggaggaagtcccagagcagactttggctcaactctaagagagcagctggaatggccccacaggctacagcccgtgtcggtgtgggatgcgagggagaggagccaggatggccccacatgctttccttggctgcctgggcgggtgcagcagccacctgagagggccgtctgaggacacgaggcgcatcagcctcatgagatctgggatgtgcacgggacgtccatgaagccgtcggagatgatttggactagtttacagaggttgacgcagggatgtgaatcatcacatgtgtgtacttgtaaatacaaatgtaag

SEQ ID NO: 53920 - DNA, 491 bp, Homo sapiens
cagcttatgctggcttgggaaatgtgcttgtcaaatttttaggaattctaatagccagttattaaatacagaccttaatacacacacacacacacacacgcacacacacacacacacacaagtttttcagagagccaattgttcaacatttaccaacacacatctgttgtttgagggatatttggcagaaagagcctgggaaggtgatttgggtttgagaagcactgtagtttttttttgtttggtttttagagaccaggtttcactgtgttgcccaggctggacttgaactcctggcctcaagcaatcatcttccctaagcctcccaagtacctgggactataggcacctgactaagaactgtttattggttggcatggccagatttacttgttaaaaatttaggctatgtcttagtcattttccttgtaccagcttccagcccagggcataaaatgtggtcaggaataaagtttgctaaatggatggat

SEQ ID NO: 53921 - DNA, 429 bp, Homo sapiens
aaaattccatctttgaaagggccggaaattcccccacctaaacaaccctattccctgggcaaacaccccccttcacagtgattaccagctgtccccattccagaattatttcagttccttcaaagcaaggagagtcctgtttaaagagttgccttacaaattgtatttttattggtgatggtcactcctgtatagcaccccaaggaggagacactaactgcatcccattatggcttatgatgccgtctgtcagatcatttctgcaggttaggtaccagtgtaaagttggaaagagtagtgctgcaattgacaactgaggtaggacctcaggagtcatctgtactctgatgggctcatcagcttactaatgactattcacattctgttagggaaaaattatttatataaaatgttcatattcatcatcaa

SEQ ID NO: 53922 - DNA, 317 bp, Homo sapiens
tccaacatcaccctcccatctaggctgccgggctgcccagcccccagtggaccctgcctcccctaaggccttgcttacccccacccggatatttcaacatcattactggatgggaaggtggaaattcagtcactgttttgttatatagccacgattcctaacttgtgtggggaaaagtttacatctttattgtcacaagcctttaactgaaattgagcattctcattcatcataaatacaaacagcgagccgtggtattaacagtactataactttgtcatcaatagaaatccagataatttcatcttctagttatg

SEQ ID NO: 53923 - DNA, 502 bp, Homo sapiens
gtgtttttttgtttgtttgttttaaagaaaagacttgtaccatcagtcttaggcgtaatctccttggcagtagtgaggagcaaggcatctgatggagaaacaaagcatggtaaggtttttaccattcaggaatcacaccgcagtagcattgtagtatttgatcacaatttactcttactttttttcataaagaaagaaataggcctacagtggctctcacttgtaatcccagcactttgggaggctgaggcaggaggattgcttgaggccagaagtttgagaccaatctggacaacataggaacacctcctctctacagaaaagattaaaaacattagctgggcatggtggtatgcgtctgtagtcccagctgttcaggaagctgaggtgggaggatccttcgagctaggaggtcgaggctgcagtgagccatgtcataccgctgcactccagcctgggtgacagaggggagaccctgtttcaagagagaaaaataaaaaaa

SEQ ID NO: 53924 - DNA, 196 bp, Homo sapiens
ttatgtttcttttattcactaaagtagctggcacaaaacacaccaaaacctagagcggtagttttatgtaaatgctcatgagtttgtatcaataatataattgttgatccacttataattcgtgcaatactgtatgtatgtagagattgaggtgtcaattaaaaaaatgtggccttaaaaaaaaaaatttaaaaaa

SEQ ID NO: 53925 - DNA, 331 bp, Homo sapiens
tcagcaaacatttactgagcactcagccaggagatatagtggcaaaaaaaaaccccaagagataccaccccacccccacaaccagacatcccagctgaaggaagtatggcctgggtagggctgtaacagggagacagtctccccctgccctgggcaccacgcacagggggctttggcagggagccaggggaagcagagttccaatcaccatttcctaccctatcctgaccctacccaccccaccagcagagctgcattatgactttcctgggccctaggcactttcacctttttgggtcctttcctccataaaaataaaaaataatatttt

SEQ ID NO: 53926 - DNA, 834 bp, Homo sapiens
catatttgctaattgtctcttcatatgggaaagttctcacaactccattagggatttggagatgatgtaattgataatatataagcccagtgtcttttgaggctgctggattccttagagtattgccagccaacaaaatccagacagtaatttgaaagtggaatttgaaataccatcagataacgtgtgaccagctggcccaggagaccttcagtgaatagcatggtaattcatggcacctaacatgaaactccaactttacccatctgtcactgttcaacctcagtttggtcagctgagtcatgtacagtacattatcctgcaaacagactaatcgatctaacctcccctctttcagggctctttcatcattactgggtgaaaaactcaccctgccaaaggaatgatcagtatgaacacgttactgtagctagaacatgtcacagactgttcagatgttctccacaatattagacgtttgataccgtgaatacatgcacaggaaaaagaaattgttcacgtataaaaccatctgacttgaaaactactgctaacaaatggacatgtgtacatccattagacaaagtgtccgaaaatccaagcgctatcctctagatttcacaaacctgtttcctgaaaatacatttgtttatgtaagcctgcttactttcatctccaattctttttatcataagtcacattgactctatctgaaaatctttatgttggttatgtgactaaattttgattcattgtatgccttaagcgttcaaatattcatatattttcttgactacatgactattgaataaatgccattgtcaaaaaccttaa

SEQ ID NO: 53927 - DNA, 1398 bp, Homo sapiens
tcgagttttttttcacccagagatgaggagcacagagctgtgaccaagatgctgaggactgttgggtcttgttttccaggtggttggcaacacgacatctggaagctatagctacagcatccagaagagtctggctttcgcatatgtccctgtacaactaagtgaagtgggacagcaagtggaagttgaactattaggcaaaaattacccagcagtcatcatacaagaacctttggtattgaccgaaccaaccagaaaccggcttcagaaaaaaggtggaaaggacaaaacttgaaaaaagaccttcagcagtcaactgaattagagttgctaatgactgtccttgaaattattataactggctcccaggggaatagaggaaaccaggaattcatttcaaaatcatcaaagtctaaatttagaatcttaatgaaacctttctgttaagtgttttctaagcaagacagaataatagataaatgatttacattgttcttttaaatgaagaaatttgaaatgaatgtttttttatttaccccacattacccaatcagtaaaacatttaggtgtttgctaatatacacaatcattactataacctaattaagggacattttataattttagtaacaaatgcattcggttcttgacagctgaaaacaaattaataaattatcttttacataaaaacatgtacaatattgtttatggatttacttctttgagaaatctttccttagatgaataaatgaaagttttaatttttcatgatatatctgtgatgaaaatagtaaaacttaacattgacatatagccaacattttaattcaattctgtgaaatatttatcattttcttaatgacttccctgaaaggagctttataggacattattattgtcctttcaaaggttgttttagaagagaaattgcaagaaagaacagagtcttccaaaggaagaggtacttgtaaactttcagaaatgaagctgacacataaatagattgtgccagtataaacacagtttgaatactgaacacctctctttgggaaagaattaatgcaagttgacatcacatggtgctgttctgaatatcatttcacaaagcatttgacaaagcaggtcaaacaaaagcttaagagctgacaggttttccttagcgctacgtacagcaagaaaaaaatcaatttagaaataattctttgatatactttttgaaattatttgggtgtagttgatggaataaataaattttttttgtaaagggtggtttctcatttataattaatttatacatacatacatttgttacacatttatagaagttttcttaagtattcaaaaaacagaatgtgaagcacgataagattctgtcatttgaataaactttaaaatgat

SEQ ID NO: 53928 - DNA, 1343 bp, Homo sapiens
tcgagttttttttcacccagagatgaggagcacagagctgtgaccaagatgctgaggactgttgggtcttgttttccaggtggttggcaacacgacatctggaagctatagctacagcatccagaagagtctggctttcgcatatgtccctgtacaactaagtgaagtgggacagcaagtggaagttgaactattaggcaaaaattacccagcagtcatcatacaagaacctttggtattgaccgaaccaaccagaaaccggcttcagaaaaaaggtggaaaggacaaaacttgaaaaaagaccttcagcagtcaactgaattagagttgctaatgactgtccttgaaattattataactggctcccaggggaatagaggaaaccaggaattcatttcaaaatcatcaaagtctaaatttagaatcttaatgaaacctttctgttaagtgttttctaagcaagacagaataatagataaatgatttacattgttcttttaaatgaagaaatttgaaatgaatgtttttttatttaccccacattacccaatcaggacattttataattttagtaacaaatgcattcggttcttgacagctgaaaacaaattaataaattatcttttacataaaaacatgtacaatattgtttatggatttacttctttgagaaatctttccttagatgaataaatgaaagttttaatttttcatgatatatctgtgatgaaaatagtaaaacttaacattgacatatagccaacattttaattcaattctgtgaaatatttatcattttcttaatgacttccctgaaaggagctttataggacattattattgtcctttcaaaggttgttttagaagagaaattgcaagaaagaacagagtcttccaaaggaagaggtacttgtaaactttcagaaatgaagctgacacataaatagattgtgccagtataaacacagtttgaatactgaacacctctctttgggaaagaattaatgcaagttgacatcacatggtgctgttctgaatatcatttcacaaagcatttgacaaagcaggtcaaacaaaagcttaagagctgacaggttttccttagcgctacgtacagcaagaaaaaaatcaatttagaaataattctttgatatactttttgaaattatttgggtgtagttgatggaataaataaattttttttgtaaagggtggtttctcatttataattaatttatacatacatacatttgttacacatttatagaagttttcttaagtattcaaaaaacagaatgtgaagcacgataagattctgtcatttgaataaactttaaaatgat

SEQ ID NO: 53929 - DNA, 485 bp, Homo sapiens
taacttacaagataggctgttatatacagtaaatgatatataaaaaggtaatgacaaatcttgttagtttttcacctttgacaattgattaaacattttcaatacctttccattattgtgtcccccagatctaagggtttccatacacaaaccttctgtttgagaactgcagagagaatgataacctgatatgataaatgtctagaaagactgtggtattaaaatgttttaaaaatcaaattaagaaatgccatggtacgttgctctacaaatatcacctagcttatagctgtactccccttacagactctgtgctaggtacggatctagatttataccacatttgcctgagagaacctacttgacatgaaatttagtgttttttcctagtgggtaataattccttttgaataataataacaatggctaacacttactgtagcacatatttatgtaccagttagtatgctaagtccttacatgca

SEQ ID NO: 53930 - DNA, 3704 bp, Homo sapiens
atgctccgtcccggcgcgcagctgctgcggggcctcctgctgcggagctgcccgctgcagggctcccccgggcgcccgcgctctgtctgcggccgggaaggagaggaaaaaccacccttatctgcagaaacacaatggaaagacagagcagaaacagtgataattggaggtggctgtgttggtgtgagtctggcttatcacctggccaaagcagggatgaaagatgtggtcctgctggagaaatcagagctcacggctggatctacctggcacgcagcaggtttaacaacttactttcatcctggaataaacttgaagaaaatacattatgatagcatcaaactttatgagaaactggaagaagaaactggtcaggtggtgggattccatcagccaggtagtatcagacttgctaccacccctgtaagggtagatgaatttaaatatcaaatgactcggactggctggcatgcaacagaacagtatctcattgaacctgaaaaaattcaagagatgttccctttactcaacatgaataaggttttagctggattgtataatcctggagatggtcacattgatccttattctctaactatggcactggctgctggggctaggaaatgtggtgcccttttaaaatatcctgcaccagtaacttctctgaaagccaggtcagatggaacatgggacgttgaaacaccacaggggtctatgagagcaaatagaattgtgaatgctgcaggattttgggctcgtgaagtaggtaaaatgattggactagaacatcctctcattccggttcaacatcaatatgttgttacatcgactatatctgaagtgaaagctttgaaacgagaactgcctgtgctccgtgacctggaaggatcatattatctccgacaggaaagggatgggcttttgtttggtccatatgaaagtcaagagaaaatgaaagttcaggactcctgggtcaccaatggagttcctccaggttttggaaaggaactctttgagtctgatctagatcgaatcatggaacacatcaaagctgccatggaaatggttcctgtcttgaaaaaggctgacatcatcaatgttgtcaatggtcctatcacgtattctcctgacattctgcctatggtggggccccatcagggggtcagaaactactgggtggctataggctttggatatggcataatccacgctggtggggtagggaaatatctcagtgactggatcctgcatggagaacctccttttgatctgatagaattggatcctaatcgctatggcaaatggacaacaacccagtacactgaggccaaagcaagagaatcatatggattcaacaatattgttggttatcctaaagaagaacggtttgctgggaggccgactcaacgagtcagtgggctctatcaaaggctggagtctaagtgttccatggggttccatgctggctgggagcagccgcactggttctacaaaccaggccaggacactcagtacaggccaagttttcgccgcacaaactggtttgagcctgtgggctcggagtataaacaggttatgcaaagagtaggggtaactgacctatcaccatttggcaagtttaacatcaaaggccaagattccattagactactggaccatctctttgcaaatgtcattccaaaggtgggttttacaaatataagtcacatgttaacacccaagggtcgagtgtatgctgagctgactgtttctcaccaatctcctggggagtttcttttaattactggctctggatcagaacttcatgatcttagatggattgaagaagaagcagtcaaaggtggatatgatgttgaaattaaaaacataactgatgagcttggagttcttggagttgctgggccacaggcaagaaaggtccttcagaaactgacctctgaagatcttagtgatgatgttttcaagtttcttcaaaccaagtccttaaaggtttccaacattcctgtcactgctattaggatatcttatactggtgagctgggttgggagctgtatcacagaagagaagattctgtggcgctgtatgacgctatcatgaatgcaggccaggaggagggaatcgacaattttggaacctatgccatgaatgccttacgcctggagaaagccttcagagcctgggggttagagatgaactgtgatacaaatcctttggaagctggactggaatattttgtgaagttaaataagccagcagacttcataggaaagcaagcactgaaacagattaaagccaaggggctgaaacgaagactggtctgcctcaccttggcaacggatgatgttgatccagagggaaatgaaagcatctggtacaatggcaaggtggttggcaacacgacatctggaagctatagctacagcatccagaagagtctggctttcgcatatgtccctgtacaactaagtgaagtgggacagcaagtggaagttgaactattaggcaaaaattacccagcagtcatcatacaagaacctttggtattgaccgaaccaaccagaaaccggcttcagaaaaaaggtggaaaggacaaaacttgaaaaaagaccttcagcagtcaactgaattagagttgctaatgactgtccttgaaattattataactggctcccaggggaatagaggaaaccaggaattcatttcaaaatcatcaaagtctaaatttagaatcttaatgaaacctttctgttaagtgttttctaagcaagacagaataatagataaatgatttacattgttcttttaaatgaagaaatttgaaatgaatgtttttttatttaccccacattacccaatcagtaaaacatttaggtgtttgctaatatacacaatcattactataacctaattaagggacattttataattttagtaacaaatgcattcggttcttgacagctgaaaacaaattaataaattatcttttacataaaaacatgtacaatattgtttatggatttacttctttgagaaatctttccttagatgaataaatgaaagttttaatttttcatgatatatctgtgatgaaaatagtaaaacttaacattgacatatagccaacattttaattcaattctgtgaaatatttatcattttcttaatgacttccctgaaaggagctttataggacattattattgtcctttcaaaggttgttttagaagagaaattgcaagaaagaacagagtcttccaaaggaagaggtacttgtaaactttcagaaatgaagctgacacataaatagattgtgccagtataaacacagtttgaatactgaacacctctctttgggaaagaattaatgcaagttgacatcacatggtgctgttctgaatatcatttcacaaagcatttgacaaagcaggtcaaacaaaagcttaagagctgacaggttttccttagcgctacgtacagcaagaaaaaaatcaatttagaaataattctttgatatactttttgaaattatttgggtgtagttgatggaataaataaattttttttgtaaagggtggtttctcatttataattaatttatacatacatacatttgttacacatttatagaagttttcttaagtattcaaaaaacagaatgtgaagcacgataagattctgtcatttgaataaactttaaaatgat

SEQ ID NO: 53931 - DNA, 3650 bp, Homo sapiens
atgctccgtcccggcgcgcagctgctgcggggcctcctgctgcggagctgcccgctgcagggctcccccgggcgcccgcgctctgtctgcggccgggaaggagaggaaaaaccacccttatctgcagaaacacaatggaaagacagagcagaaacagtgataattggaggtggctgtgttggtgtgagtctggcttatcacctggccaaagcagggatgaaagatgtggtcctgctggagaaatcagagctcacggctggatctacctggcacgcagcaggtttaacaacttactttcatcctggaataaacttgaagaaaatacattatgatagcatcaaactttatgagaaactggaagaagaaactggtcaggtggtgggattccatcagccaggtagtatcagacttgctaccacccctgtaagggtagatgaatttaaatatcaaatgactcggactggctggcatgcaacagaacagtatctcattgaacctgaaaaaattcaagagatgttccctttactcaacatgaataaggttttagctggattgtataatcctggagatggtcacattgatccttattctctaactatggcactggctgctggggctaggaaatgtggtgcccttttaaaatatcctgcaccagtaacttctctgaaagccaggtcagatggaacatgggacgttgaaacaccacaggggtctatgagagcaaatagaattgtgaatgctgcaggattttgggctcgtgaagtaggtaaaatgattggactagaacatcctctcattccggttcaacatcaatatgttgttacatcgactatatctgaagtgaaagctttgaaacgagaactgcctgtgctccgtgacctggaaggatcatattatctccgacaggaaagggatgggcttttgtttggtccatatgaaagtcaagagaaaatgaaagttcaggactcctgggtcaccaatggagttcctccaggttttggaaaggaactctttgagtctgatctagatcgaatcatggaacacatcaaagctgccatggaaatggttcctgtcttgaaaaaggctgacatcatcaatgttgtcaatggtcctatcacgtattctcctgacattctgcctatggtggggccccatcagggggtcagaaactactgggtggctataggctttggatatggcataatccacgctggtggggtagggaaatatctcagtgactggatcctgcatggagaacctccttttgatctgatagaattggatcctaatcgctatggcaaatggacaacaacccagtacactgaggccaaagcaagagaatcatatggattcaacaatattgttggttatcctaaagaagaacggtttgctgggaggccgactcaacgagtcagtgggctctatcaaaggctggagtctaagtgttccatggggttccatgctggctgggagcagccgcactggttctacaaaccaggccaggacactcagtacaggccaagttttcgccgcacaaactggtttgagcctgtgggctcggagtataaacaggttatgcaaagagtaggggtaactgacctatcaccatttggcaagtttaacatcaaaggccaagattccattagactactggaccatctctttgcaaatgtcattccaaaggtgggttttacaaatataagtcacatgttaacacccaagggtcgagtgtatgctgagctgactgtttctcaccaatctcctggggagtttcttttaattactggctctggatcagaacttcatgatcttagatggattgaagaagaagcagtcaaaggtggatatgatgttgaaattaaggtccttcagaaactgacctctgaagatcttagtgatgatgttttcaagtttcttcaaaccaagtccttaaaggtttccaacattcctgtcactgctattaggatatcttatactggtgagctgggttgggagctgtatcacagaagagaagattctgtggcgctgtatgacgctatcatgaatgcaggccaggaggagggaatcgacaattttggaacctatgccatgaatgccttacgcctggagaaagccttcagagcctgggggttagagatgaactgtgatacaaatcctttggaagctggactggaatattttgtgaagttaaataagccagcagacttcataggaaagcaagcactgaaacagattaaagccaaggggctgaaacgaagactggtctgcctcaccttggcaacggatgatgttgatccagagggaaatgaaagcatctggtacaatggcaaggtggttggcaacacgacatctggaagctatagctacagcatccagaagagtctggctttcgcatatgtccctgtacaactaagtgaagtgggacagcaagtggaagttgaactattaggcaaaaattacccagcagtcatcatacaagaacctttggtattgaccgaaccaaccagaaaccggcttcagaaaaaaggtggaaaggacaaaacttgaaaaaagaccttcagcagtcaactgaattagagttgctaatgactgtccttgaaattattataactggctcccaggggaatagaggaaaccaggaattcatttcaaaatcatcaaagtctaaatttagaatcttaatgaaacctttctgttaagtgttttctaagcaagacagaataatagataaatgatttacattgttcttttaaatgaagaaatttgaaatgaatgtttttttatttaccccacattacccaatcagtaaaacatttaggtgtttgctaatatacacaatcattactataacctaattaagggacattttataattttagtaacaaatgcattcggttcttgacagctgaaaacaaattaataaattatcttttacataaaaacatgtacaatattgtttatggatttacttctttgagaaatctttccttagatgaataaatgaaagttttaatttttcatgatatatctgtgatgaaaatagtaaaacttaacattgacatatagccaacattttaattcaattctgtgaaatatttatcattttcttaatgacttccctgaaaggagctttataggacattattattgtcctttcaaaggttgttttagaagagaaattgcaagaaagaacagagtcttccaaaggaagaggtacttgtaaactttcagaaatgaagctgacacataaatagattgtgccagtataaacacagtttgaatactgaacacctctctttgggaaagaattaatgcaagttgacatcacatggtgctgttctgaatatcatttcacaaagcatttgacaaagcaggtcaaacaaaagcttaagagctgacaggttttccttagcgctacgtacagcaagaaaaaaatcaatttagaaataattctttgatatactttttgaaattatttgggtgtagttgatggaataaataaattttttttgtaaagggtggtttctcatttataattaatttatacatacatacatttgttacacatttatagaagttttcttaagtattcaaaaaacagaatgtgaagcacgataagattctgtcatttgaataaactttaaaatgat

SEQ ID NO: 53932 - DNA, 365 bp, Homo sapiens
acttatttatatgctctcactggaattattgtcacaggtggtgggattccatcagccaggtagtatcagacttgctaccacccctgtaagggtagatgaatttaaatatcaaatgactcggactggctggcatgcaacagaacagtatctcattgaacctgaaaaaattcaagagatgttccctttactcaacatgaataaggtatttatcttaagggcatttttaccatttgttgacttaagtaaaaattagaaaaagttattaagaagttaactaaaaacagaaaacttggtacacacattttaaatgtgacaaaatcatatgattaattttggaatttgggtaacttacaagataggctgtt

SEQ ID NO: 53933 - DNA, 772 bp, Homo sapiens
tggctcactgcaagctccgccttttagtttcaagcaattctgctgcctcagcctcccgagtagctgggattacaggtgcccgccaccacgcccagctaatttttgtatttttaatagagacggggtttcaccatttgtatttttaatagagacggggtttcaccatgttggccaggctggtctcgaactcttgacctcatgatctgcccaccttggcctcccaagatacttttctatatagtcatacataggactatatagcacatagtcctaaaccttccatctaaatcatcccatttctgaatctctgtacaacgctatccatgttaacttgtagggacttaacatgtatgtttattggctggctctcactttactcacatagttcacattgcttcttaaaacctgtcatgagccttatgctctggtgtgctcaaactggtgctgatgtgttctcatcccaaaggactggctggtgcttctcagtttctttccagcattaaattattgcttaacagataaactgtcaacattttgagaatgttaattttttttcagtatttcttttcctctctgcttttaaggcaggtttaacaacttactttcatcctggaataaacttgaagaaaatacattatgatagcatcaaactttatgagaaactggaagaagaaactggtcaggtaaaggcatttaacttgaaactgtctgttaggtcggcttctcagaaacatgtaagatttctgaaggattttgatgcatcattgtgtat

SEQ ID NO: 53934 - DNA, 463 bp, Homo sapiens
ctgtgcctgcaccagaactgaaatactgtacccccacagttcagagtaacagtaaagcccctgacattgacagggggcttcctgtgtagcaagcagcatgctcagtgttttatgcatgttaccttaatccccgcagcaggcctgtcaggcgggtgttgtttcactccttgaataatgagaaagctgctatctggaaaggtcaaggaactggcccaagatctacagctattgagtgacaaagctgcaaattgaacccagatctttttgaccccaaagctaatgtttttaattgctgcactgtagctgccttcatggaaggggtttgtttcaggcattgataggccattgtaaacccatggccagaggtaacaagaaatcagaactatccctgatactcgaactgatacataacatgttcccatttctgctaaacacacacgcatgtgctcacacatgaatggaa

SEQ ID NO: 53935 - DNA, 244 bp, Homo sapiens
agattgccttccccaactctgaaatctcttttccctttattgaatctttgtggattgttcaactcaaccctctaattaaccacacttgcccattaaattgtgttctccctgtcttggaggttttaccattaaatggcttctctatagtggctagaccctcctaaatctttatcccagctctccaaaagatgggggagattctttcctttgggcagatggggaaactgaggtccatggaggggtc

SEQ ID NO: 53936 - DNA, 352 bp, Homo sapiens
ttacttgtgttctttttgtccctcttcttcagcccatccatgttagttctcagtaggtttgaataagccatccggaacttattcacttctttggagctcaccacaatgctaaccttctttttcccatcagtagttcttaacagacacctgtctgaagactcaaagcccgcaacagaacctttcactagaatgggtttggttcaacctcagttctcaaggaacaaatggtaccaggaaaagtccgctgtaagtgaacccattttaactgagaatcaaaacatcatagtaaatagtatggaaaaaaattaggtttggtcaaaacttcaacttgagaaataaaaccagaaattat

SEQ ID NO: 53937 - DNA, 438 bp, Homo sapiens
acacggggtgagcattgaagcaggtgctccatggcattggtctcacgtgatctttgctgtgatcctgaaatgggtagtattggctgtgcagattaggaacctgaggctcacagaagttacacagcttgaggacattgctcaaaattgtcccagtccagatttgactgggatttgtctgatttattacccatttgttgggggtgtgctgtttccaacagttccttcttccattagttttggttccattaatctgaattttctcagtctaatctagcagagttgcagtgctggacattaacatatgtatgcatcaaacccatccttagggctgtaggaggtactgcatgcaggttatgggagctataattttttttaggttgtaaataccgagtgcctcctctgtgtctacacagtgccaggtactatcggagaatacaa

SEQ ID NO: 53938 - DNA, 336 bp, Homo sapiens
tatcttactggcgaccgtggacagctaacttcgattttgagggggagggacagagacagagaaacagagagagatatgatcgcgattcaatctttgcagaagaaataacccgtgcacaaggggccacaccatcccccaccttacacttcgggaagggtcgttaccgtttttgtggtttttctcaaaagatgtgttttcatcagaaacgggcacatttttcctttctcctaatcgccaacttcccctccattttttgtgagtcccacactccggagcttcactccatttcccctgtctatttctcgggtttcccatcgtgggtaggggagattgcct

SEQ ID NO: 53939 - DNA, 765 bp, Homo sapiens
gaaaaaaacatacacacagacatatatgcatacatacaaggagcagccactacccttagggctaagacagtgtgtccaagaatgagtcccccatttccctaccaccaccccagggctgagattcatacctggttagaaagggctcagttgtggctcactgaatggcagagtaattgctgatgtgcttctctggggaagcgtgctgaaaggcttttcatgagaggtgtcactctgctacaaaactactcagatgaggtgctgagggaagctgctggtctctgagctcacttatatgtcagaacctggctttgaggaactgggtgctgtgggagcctgctgaaaaacacacgggaacaggaagtaaaaatctctccattgttctccgctggcagaagttaacatgccagctgtcaaaggaaaagttttaaagtgtccaggcacatttttgctcaacaggcagaagggatgactttgtgactaagaagcggtaaccagcacagggttctatcgttgttcatgctagctggccactatacccttccagaacaaagcccgtcactgaggacaaactgttggaaatataatccagattgagctgcagagagacaagttagtagagacgaaaggaaaggttcagataaaagcggtagggagaagataaccaggacattaaagaacgtaaacccgggaggcagaggttgcagtgagccaagatcgcaccattgcactccggcctgggcaacaagagtatgaaacttggtctca

SEQ ID NO: 53940 - DNA, 228 bp, Homo sapiens
cgacaaaaaaaaaaaaaaatataaaaaaaaaaaaaaaaaaaaaaaatcctaagaagttggtttaaaaaaaaaaatcatctgggaaaactcaaaataaggggctagaactcttgaaaagaagtaataataaaaaatttcagaaaaatactgaagaataaagagaataaataatatttttcaagaattagacagcgaaggaaaattttttaaatgaaggagaaatacata

SEQ ID NO: 53941 - DNA, 668 bp, Homo sapiens
aaggatttcaggttacatacttcaaatttctagaatggaatggaatcattttggaactggaaaaatggcataaacactgacgtcccttaaaacttcaattttataaagaaaattcttctgcaaaccacatcccctttatgtaacaagactaggtattatctacacctttgctttgattagacactatgtgctttttttttttaaccatagttcatcgaaatgcagctttttctgaacttcaaagatagaatcccatttttaatgaactgaagtagcaaaatcatctttttcattctttaggaaatagctattgccaaagtgaaggtattatctcgtgccgaattcggtcgactcttagaattattccgtagcttttgctgattactctgagatttcagttaagacttgtttcaaaagacagatagctgactggttcataatacattggaatagttggatccaaactaataagaataagctgtacaggaactagtgctcaatatacattgtataaatttgtggaaatctcttggatgtgaattgttacttcaagtggcttttattaagattttctcagacttacttggaggttaaagcaaacccaaatgtgtattattttgttacagagctctgctttataattttgtaataaagtttcaatacagaca

SEQ ID NO: 53942 - DNA, 765 bp, Homo sapiens
gcacattcggatttaaatttctggtctctccggctttctgtgctttaactatctttgctaaagtctcttgctacattgcctaaatccatttgtttctttggaccaaaaatgttagtttaccagaccgatagtggtccttaggacagattttagaccagtaaacttatctttggtgagaaatgaaatacaaatgctatagaaaaatttcaaagttgttaaaagccacttcattaaatgctgggattggaagctgttggtctcctgacctgactctgggagccaacaaaacatcaggctcccaaactgctgggaaatttgtttctgtctgcaagggatagtgcgtgcataatccctgctgctgcttctcttgggacctgatttgcaccatccttagtttatgcggaaaggggaagcaatgggtggaggcagtggccttctccttaattttggcttggcttctgatccttttcccaactagaagtcttaagccacttttcgctgaaaatgaaatccctcccttatccatggtagttttaaatttggtttcattgaagaaatagatttaggcaaagagcctgtgctcttctctggccagactgctgttgaagttcctggagagcaaatgttaagacagagcacttaagagctttcaggagaatggtgtgaacccgggaggcggagcttgcagtgagccaagattgcgccactgcagtccggcctgggcgaaagagcgagactctgtctcaaaaaacaaaacaaaaaaaa

SEQ ID NO: 53943 - DNA, 2442 bp, Homo sapiens
gcacattcggatttaaatttctggtctctccggctttctgtgctttaactatctttgctaaagtctcttgctacattgcctaaatccatttgtttctttggaccaaaaatgttagtttaccagaccgatagtggtccttaggacagattttagaccagtaaacttatctttggtgagaaatgaaatacaaatgctatagaaaaatttcaaagttgttaaaagccacttcattaaatgctgggattggaagctgttggtctcctgacctgactctgggagccaacaaaacatcaggctcccaaactgctgggaaatttgtttctgtctgcaagggatagtgcgtgcataatccctgctgctgcttctcttgggacctgatttgcaccatccttagtttatgcggaaaggggaagcaatgggtggaggcagtggccttctccttaattttggcttggcttctgatccttttcccaactagaagtcttaagccacttttcgctgaaaatgaaatccctcccttatccatggtagttttaaatttggtttcattgaagaaatagatttaggcaaagagcctgtgctcttctctggccagactgctgttgaagttcctggagagcaaatgttaagacagagcacttaagagctttcaggaggtactgaatgagactggattctgttgtaagccgacagttcaagtctttatttcccaggttggtggggagtgaggagaccctactttcattccctttcctagcccactgatttttgggggcaggtcagggagaaagcatttttttttttttttttgagtctcactctgttgcccaggctggagtgcagtggtacagtcttggcttactgcaacctccacctcccaggttcaagctattctcctgccttagcctccagagtagctgggattataggcgcccaccaccacaccaggctaatttttgtatttttagtagagacggggttttaccatgttcaccaggctggtcttgaactcttgaccttatgatccgcccgcctcagcttcccaaagtgctgggattacaggcgtgagccaccacacccagcaggagaaaccattttctaggctctttaggaaggaccatgcaatgagtaggtgatgtatttgagccctcacagtctttacacccctagaggagctggaggacttaagagtttgctgcagaagcgtggccaagcacaaaacacatgatcaggaaagcagagtgttttcccattaccaatggatgaactatgcaaaccctaaacgccttggcagacacctcccaccccttacccctcccatgcagctgaaaaatctgagactagaaccaatcatgactctggatggcagagggaaacctctaaagggacttattacattggtacagacatatttatgctttcttccatcaccaaccactaaacccctttggaggaatgaaataactgcataaactagtcaactgaacactgggccacttacctcaatgttatacaaagtcctggatgatttgattctgaaccacagcctttgcaggagttgggggaatcagatttgctcatgaagacatccctttccacttttgtcatgggcagtaaatactatagtttacaatgcctaccaattagcaaaggatcattcattcagctactcagttcctctgtaaaacaggtctatgtatgtgcaattcagctaagatctagcagtaacttaagggcagaagctggctctctacttacaacctgctttctctgctgaagccttacctcctcttcagtttccctcctagacacaaatcgaaaataatatactgatagctggttagtaacctcagtaagaattaaaactgaggttgtttactcattttgcctttaaatcttttatccccttttggtgaaggtttccctttaggaaaaaaggtgtcaaacaaccctgattttttttttttttgcatcatttttattacaccaaattaaagttgggagttccaagatcccattccagttaatatttaaccaaggtctaaaatttgattttttttaaatctttgaatcctcccttctgcccctcatggatccttggttttaatgatatggaaacatctaattcttagaattattccgtagcttttgctgattactctgagatttcagttaagacttgtttcaaaagacagatagctgactggttcataatacattggaatagttggatccaaactaataagaataagctgtacaggaactagtgctcaatatacattgtataaatttgtggaaatctcttggatgtgaattgttacttcaagtggcttttattaagattttctcagacttacttggaggttaaagcaaacccaaatgtgtattattttgttacagagctctgctttataattttgtaataaagtttcaatacagaca

SEQ ID NO: 53944 - DNA, 2388 bp, Homo sapiens
gcacattcggatttaaatttctggtctctccggctttctgtgctttaactatctttgctaaagtctcttgctacattgcctaaatccatttgtttctttggaccaaaaatgttagtttaccagaccgatagtggtccttaggacagattttagaccagtaaacttatctttggtgagaaatgaaatacaaatgctatagaaaaatttcaaagttgttaaaagccacttcattaaatgctgggattggaagctgttggtctcctgacctgactctgggagccaacaaaacatcaggctcccaaactgctgggaaatttgtttctgtctgcaagggatagtgcgtgcataatccctgctgctgcttctcttgggacctgatttgcaccatccttagtttatgcggaaaggggaagcaatgggtggaggcagtggccttctccttaattttggcttggcttctgatccttttcccaactagaagtcttaagccacttttcgctgaaaatgaaatccctcccttatccatggtagttttaaatttggtttcattgaagaaatagatttaggcaaagagcctgtgctcttctctggccagactgctgttgaagttcctggagagcaaatgttaagacagagcacttaagagctttcaggaggtactgaatgagactggattctgttgtaagccgacagttcaagtctttatttcccaggttggtggggagtgaggagaccctactttcattccctttcctagcccactgatttttgggggcaggtcagggagaaagcatttttttttttttttttgagtctcactctgttgcccaggctggagtgcagtggtacagtcttggcttactgcaacctccacctcccaggttcaagctattctcctgccttagcctccagagtagctgggattataggcgcccaccaccacaccaggctaatttttgtatttttagtagagacggggttttaccatgttcaccaggctggtcttgaactcttgaccttatgatccgcccgcctcagcttcccaaagtgctgggattacaggcgtgagccaccacacccagcaggagaaaccattttctaggctctttaggaaggaccatgcaatgagtaggtgatgtatttgagccctcacagtctttacacccctagaggagctggaggacttaagagtttgctgcagaagcgtggccaagcacgcaaaccctaaacgccttggcagacacctcccaccccttacccctcccatgcagctgaaaaatctgagactagaaccaatcatgactctggatggcagagggaaacctctaaagggacttattacattggtacagacatatttatgctttcttccatcaccaaccactaaacccctttggaggaatgaaataactgcataaactagtcaactgaacactgggccacttacctcaatgttatacaaagtcctggatgatttgattctgaaccacagcctttgcaggagttgggggaatcagatttgctcatgaagacatccctttccacttttgtcatgggcagtaaatactatagtttacaatgcctaccaattagcaaaggatcattcattcagctactcagttcctctgtaaaacaggtctatgtatgtgcaattcagctaagatctagcagtaacttaagggcagaagctggctctctacttacaacctgctttctctgctgaagccttacctcctcttcagtttccctcctagacacaaatcgaaaataatatactgatagctggttagtaacctcagtaagaattaaaactgaggttgtttactcattttgcctttaaatcttttatccccttttggtgaaggtttccctttaggaaaaaaggtgtcaaacaaccctgattttttttttttttgcatcatttttattacaccaaattaaagttgggagttccaagatcccattccagttaatatttaaccaaggtctaaaatttgattttttttaaatctttgaatcctcccttctgcccctcatggatccttggttttaatgatatggaaacatctaattcttagaattattccgtagcttttgctgattactctgagatttcagttaagacttgtttcaaaagacagatagctgactggttcataatacattggaatagttggatccaaactaataagaataagctgtacaggaactagtgctcaatatacattgtataaatttgtggaaatctcttggatgtgaattgttacttcaagtggcttttattaagattttctcagacttacttggaggttaaagcaaacccaaatgtgtattattttgttacagagctctgctttataattttgtaataaagtttcaatacagaca

SEQ ID NO: 53945 - DNA, 2799 bp, Homo sapiens
gcacattcggatttaaatttctggtctctccggctttctgtgctttaactatctttgctaaagtctcttgctacattgcctaaatccatttgtttctttggaccaaaaatgttagtttaccagaccgatagtggtccttaggacagattttagaccagtaaacttatctttggtgagaaatgaaatacaaatgctatagaaaaatttcaaagttgttaaaagccacttcattaaatgctgggattggaagctgttggtctcctgacctgactctgggagccaacaaaacatcaggctcccaaactgctgggaaatttgtttctgtctgcaagggatagtgcgtgcataatccctgctgctgcttctcttgggacctgatttgcaccatccttagtttatgcggaaaggggaagcaatgggtggaggcagtggccttctccttaattttggcttggcttctgatccttttcccaactagaagtcttaagccacttttcgctgaaaatgaaatccctcccttatccatggtagttttaaatttggtttcattgaagaaatagatttaggcaaagagcctgtgctcttctctggccagactgctgttgaagttcctggagagcaaatgttaagacagagcacttaagagctttcaggaggtactgaatgagactggattctgttgtaagccgacagttcaagtctttatttcccaggttggtggggagtgaggagaccctactttcattccctttcctagcccactgatttttgggggcaggtcagggagaaagcatttttttttttttttttgagtctcactctgttgcccaggctggagtgcagtggtacagtcttggcttactgcaacctccacctcccaggttcaagctattctcctgccttagcctccagagtagctgggattataggcgcccaccaccacaccaggctaatttttgtatttttagtagagacggggttttaccatgttcaccaggctggtcttgaactcttgaccttatgatccgcccgcctcagcttcccaaagtgctgggattacaggcgtgagccaccacacccagcaggagaaaccattttctaggctctttaggaaggaccatgcaatgagtaggtgatgtatttgagccctcacagtctttacacccctagaggagctggaggacttaagagtttgctgcagaagcgtggccaagcacaaaacacatgatcaggaaagcagagtgttttcccattaccaatggatgaactatgcaaaccctaaacgccttggcagacacctcccaccccttacccctcccatgcagctgaaaaatctgagactagaaccaatcatgactctggatggcagagggaaacctctaaagggacttattacattggtacagacatatttatgctttcttccatcaccaaccactaaacccctttggaggaatgaaataactgcataaactagtcaactgaacactgggccacttacctcaatgttatacaaagtcctggatgatttgattctgaaccacagcctttgcaggagttgggggaatcagatttgctcatgaagacatccctttccacttttgtcatgggcagtaaatactatagtttacaatgcctaccaattagcaaaggatcattcattcagctactcagttcctctgtaaaacaggtctatgtatgtgcaattcagctaagatctagcagtaacttaagggcagaagctggctctctacttacaacctgctttctctgctgaagccttacctcctcttcagtttccctcctagacacaaatcgaaaataatatactgatagctggttagtaacctcagtaagaattaaaactgaggttgtttactcattttgcctttaaatcttttatccccttttggtgaaggtttccctttaggaaaaaaggtgtcaaacaaccctgattttttttttttttgcatcatttttattacaccaaattaaagttgggagttccaagatcccattccagttaatatttaaccaaggtctaaaatttgattttttttaaatctttgaatcctcccttctgcccctcatggatccttggttttaatgatatggaaacatctaattcttagaattattccgtagcttttgctgattactctgagatttcagttaagacttgtttcaaaagacagatagctgactggttcataatacattggaatagttggatccaaactaataagaataagctgtacaggaactagtgctcaatatacattgtataaatttgtggaaatctcttggatgtgaattgttacttcaagtggcttttattaagattttctcagacttacttggaggttaaagcaaacccaaatgtgtattattttgttacagagctctgctttataattttgtaataaagtttcaatacagacacctgtcctgtctggtgcgaggatgttagaggttgataggactgacaaaagagcctgacagtggttcatgctataatttccacactttaggaggccaaggtgggaagactgcttgagctcaggagtttgagaccaacctgggcaatgtagtgagaccttgtctctacttaaaaaaacaaacaagggccgggtgcggtggctcacgcctgtaatcccagcactttgggaggctgaggcgggcagatcacgaggtcaggagatcgagaccaccctggctaacacggtgaaaccccgtctctactaaaaatacaaaaaattagccaggcgtggtggcgggtgcctgtagtcccagctactc

SEQ ID NO: 53946 - DNA, 2389 bp, Homo sapiens
gcacattcggatttaaatttctggtctctccggctttctgtgctttaactatctttgctaaagtctcttgctacattgcctaaatccatttgtttctttggaccaaaaatgttagtttaccagaccgatagtggtccttaggacagattttagaccagtaaacttatctttggtgagaaatgaaatacaaatgctatagaaaaatttcaaagttgttaaaagccacttcattaaatgctgggattggaagctgttggtctcctgacctgactctgggagccaacaaaacatcaggctcccaaactgctgggaaatttgtttctgtctgcaagggatagtgcgtgcataatccctgctgctgcttctcttgggacctgatttgcaccatccttagtttatgcggaaaggggaagcaatgggtggaggcagtggccttctccttaattttggcttggcttctgatccttttcccaactagaagtcttaagccacttttcgctgaaaatgaaatccctcccttatccatggtagttttaaatttggtttcattgaagaaatagatttaggcaaagagcctgtgctcttctctggccagactgctgttgaagttcctggagagcaaatgttaagacagagcacttaagagctttcaggaggtactgaatgagactggattctgttgtaagccgacagttcaagtctttatttcccaggttggtggggagtgaggagaccctactttcattccctttcctagcccactgatttttgggggcaggtcagggagaaagcatttttttttttttttttgagtctcactctgttgcccaggctggagtgcagtggtacagtcttggcttactgcaacctccacctcccaggttcaagctattctcctgccttagcctccagagtagctgggattataggcgcccaccaccacaccaggctaatttttgtatttttagtagagacggggttttaccatgttcaccaggctggtcttgaactcttgaccttatgatccgcccgcctcagcttcccaaagtgctgggattacaggcgtgagccaccacacccagcaggagaaaccattttctaggctctttaggaaggaccatgcaatgagtaggtgatgtatttgagccctcacagtctttacacccctagaggagctggaggacttaagagtttgctgcagaagcgtggccaagcacaaaacacatgatcaggaaagcagagtgttttcccattaccaatggatgaactatgcaaaccctaaacgccttggcagacacctcccaccccttacccctcccatgcagctgaaaaatctgagactagaaccaatcatgactctggatggcagagggaaacctctaaagggacttattacattggtacagacatatttatgctttcttccatcaccaaccactaaacccctttggaggaatgaaataactgcataaactagtcaactgaacactgggccacttacctcaatgttatacaaagtcctggatgatttgattctgaaccacagcctttgcaggagttgggggaatcagatttgctcatgaagacatccctttccacttttgtcatgggcagtaaatactatagtttacaatgcctaccaattagcaaaggatcattcattcagctactcagttcctctgtaaaacaggtctatgtatgtgcaattcagctaagatctagcagtaacttaagggcagaagctggctctctacttacaacctgctttctctgctgaagccttacctcctcttcagtttccctcctagacacaaatcgaaaataatatactgatagctggttagtaacctcagtaagaattaaaactgaggttgtttactcattttgcctttaaatcttttatccccttttggtgaaggtttccctttaggaaaaaaggtgtcaaacaaccctgattttttttttttttgcatcatttttattacaccaaattaaagttgggagttccaagatcccattccagttaatatttaaccaaggtctaaaatttgattttttttaaatctttgaatcctcccttctgcccctcatggatccttggttttaatgatatggaaacatctaattcttagaattattccgtagcttttgctgattactctgagatttcagttaagacttgtttctaataagaataagctgtacaggaactagtgctcaatatacattgtataaatttgtggaaatctcttggatgtgaattgttacttcaagtggcttttattaagattttctcagacttacttggaggttaaagcaaacccaaatgtgtattattttgttacagagctctgctttataattttgtaataaagtttcaatacagaca

SEQ ID NO: 53947 - DNA, 1187 bp, Homo sapiens
  misc_feature (1178)..(1178): n is a, c, g, or t
  misc_feature (1182)..(1182): n is a, c, g, or t
caaaatgtggcacatatacaccatggactatcacatagccataaaaagaatgaaatcatgtcctttgcagcaacatggatgcagctggaggccattatccaaagcaaattaacacaggaacagacaagctaataccacatgttctctcttataagtgggagataagcattgggtactcatggcaaaaagatggcaacaatagacactggggaatactagaaaggcagggggcaagggttaaaaaactaactattgggtgctatgttcactacctgagtgacaggatcaatcataccccaaacctcaacatcacacaatgcgcccacataacaaacctgcacatatattccctgaatctaaaataaaagttgaaatgataaaaaacgtgggcggagggggaggaattatttaaaaaaaaaaaaaaaagcaaattgtggtatacccacataatagaatactacttggcaataaaaaggaattaaatatggatactcacaacatgaccaaaagaatccagaccaaaaaatagtacattactgtatgattccacttatataaaaacctataaaatgtaaacaaatctatactgatagaaagtagctcgacagttgcctgagaattagggaggttagggaagggtggaaggaagggattaacaaagaagcagaaaggcactttggggaataatagatacgttaaccatcttaattgtggtgatggtttcatggtgtgtacatatgctggaatgtatcaaactatacagtttaaatacatgcagttttttttgtaggtcaatcatactgcaataaagctacaagaaaaatcctgcctttctttcaactcttaaatttttccaaatattaaataaagcatgaaaaacaaaaacagaagcttatattaaaacctgttaatgaccaggcacagtggctcatacctgtaatcccagcactttgggaggctgaggcaggaagattgcttgagaccaggagttcaaaaccagcctgagcaatatagcgagatcatcttacaagaataagtcgcagcatgtgtgatgctgtactactatcactcagtaacctgaggtgggaggattccttgagcccaggagtttgaggctgcagtgagctatgatcatgccactacactctagcctgggggacagagtgagaccttgtctntaanggatt

SEQ ID NO: 53948 - DNA, 270 bp, Homo sapiens
agcctgtgtttcatgaaggacatttgcaattagcccacggttgcaaaagcctttgtagctactgatgaaggccaccctgttccgtacccctctgacccatccaagccagatatctttttaagacaaagtacaatttttgtcttagataacacaaaatttatttttaaataccatcacttaaattgggagtcatttaaacttgaattttcttaacatagaaccaaagttgaacgtgtctgtaatccacataattaaaagaaacacaggagc

SEQ ID NO: 53949 - DNA, 389 bp, Homo sapiens
acctcaaccaaaaaaaatctccaacaaaccctaatataaaatgaagtgtcccttccataactgttcttcagtcttccagttcccctacttggaaacatccaaaagtcttccacagatattttatatgtatatatgcaaatatgttcatatattcttccttaaatgatagcaatatacacacaatgttctgcacactgcttttttcatgtacccaaatattttggatcattccatatgtgtagacagagaactacttcattcttttcaatggcagcatttgaacggacatttaggttgtttcaatcttctgctattacaaataaactgcaatgaataatcttgtacaaatgcttcattttacctacacaaatatgtctgtaagatgaatg

SEQ ID NO: 53950 - DNA, 345 bp, Homo sapiens
acctcaaccaaaaaaaatctccaacaaaccctaatataaaatgaagtgtcccttccataactgttcttcagtcttccagttcccctacttggaaacatccaaaagtcttccacagatattttatatgtatatatgcaaatatgttcatatattcttccttaaatgatagcaatatacacacaatgttctgcacactgcttttttcatgtacccaaatattttggatcattccatatgtgtagacagagaactacttcattcttttcaatggcagcatttgaacggacatttaggttgtttcaatcttcttttttttttttttttttttttttttttttttttggg

SEQ ID NO: 53951 - DNA, 293 bp, Homo sapiens
agataaatctagcagcaacacagggtaaggtggctacaatgggaaaagattgcatagggggttgggaagactgttgagtgtaagcgagatggttggcagcatcagggacctgggaattcaaggtcccattgtagggatggctgggcagaatgatttaagaatccaggggttatggggctgggtgaggtggctcatgcctgtaatcccagtgctttgggaggctgaggcaggatgatttgcttgaggtcaggagttcaagaccagcctgggcaacacagcgataccccatctct

SEQ ID NO: 53952 - DNA, 429 bp, Homo sapiens
cacgtgcaaaagagcatgtatagtatgctgccttttgtgtgagaaagaaggggaaataagaaaaacctacatataactgcttatctttacaaaaagaagcttcggaagcataaaccagaaaacagtgaagttggtgacctccacgaggtggtgtgagggaatgcggtggatagaatatgggaggaagagatacatttttgagtaacttttgctaattttaacttttggaagcatgttaatattctacatatttaaaaaatcattaagaactgaaagcaaattgaacaaatttgaactcaattgtatttcaaatggatattgtaactttactgaagagagaacaaataggaacccaagtagttcacgagcacagtttttaacaatatactccattcttggatgacacaggagggagggaaagttgcaaag

SEQ ID NO: 53953 - DNA, 316 bp, Homo sapiens
cttcttacctccaaagaccacactagcatcctagcaatggttcttaacctgttcaaaatgacagaattagaattcagaatatggatagaaacaaagatcatcaacatccaagagaaagtgaaaacccaatccgaggaatctaaggaatacaacaaaatgacacaggagataaaagacaaaatgtccatttaaagaaaggatcaaactgatctgatagagctgaataattcatttcaagaatttcataatacaaatgcaagctgaggaaagagtctcagctcaaagaccagttcttcaatataactcagtcagacaa

SEQ ID NO: 53954 - DNA, 797 bp, Homo sapiens
  misc_feature (435)..(435): n is a, c, g, or t
  misc_feature (791)..(791): n is a, c, g, or t
  misc_feature (794)..(794): n is a, c, g, or t
  misc_feature (797)..(797): n is a, c, g, or t
gaatggctttgtctgttattggtcttttgtggttccatatgagttttagaattatgttttatatttgtgtggataatatcattagtatttcaatagagattccattgcatttgtagattgctttgggtagtatggacattttaacaatattgattctttcaatccttgaacatgaaatatctttccattttttggtatcctattactttcatcagtgttttacaattttcatcataaagatctttcacttctttggttaattcctagacttttatttttatatatgactgttgtaaatgacattaccttctacatttctttttccatattttcactattggcatgtatttgtccgtttcaagctgctgataaagacgtaccaagatggggcaatttacaaaagagaggttaatggacttacagttccacgtggtngggaggcctcacaatcatggcagaaggtgaaaggcatgtctcacatgccagcagacaagagaagagagctagtgcaggcaaactcaactttttaaactatcaggtcttgtaagacttattcactatcatgagaacagcatgggaaagacctgccctggtgattcagttacctcctactgggtctctcccacaacacatggcaattcaagatgagatttgggtagggacagagccaaaccatatcatgtcatatggaaatgctaataaaggatgttgaattatatcaaatgctttttcagcatcaattgaaattatcatataatttgtctttcattctgttgatatgacatagcacnganttn

SEQ ID NO: 53955 - DNA, 1394 bp, Homo sapiens
agggtttggcgggaattctgaaagccgctggcggaccgcgcgcagcggccagagaccgagccctaaggagagtgcggcgcttcccgaggcgtgcagctgggaactgcaactcatctgggttgtgcgcagaaggctggggcaagcgagtagagaagtggagcgtaagccaggggcgttgggggccgtgcgggtcgggcgcgtgccacgcccgcggggtgaagtcggagcgcggggcctgctggagagaggagcgctgcggaccgagtaatggcaatgcagatgcagcttgaagcaaatgcagatacttcagtggaagaagaaagctttggcccacaacccatttcacggttagagcagtgtggcataaatgccaacgatgtgaagaaattggaagaagctggattccatactgtggaggctgttgcctatgcgccaaagaaggagctaataaatattaagggaattagtgaagccaaagctgataaaattctggtatggtctctctggcagtgatgtcctggataatgtagcatatgctcgagcgttcaacacagaccaccagacccagctcctttatcaagcatcagccatgatggtagaatctaggtatgcactgcttattgtagacagtgccaccgccctttacagaacagactactcgggtcgaggtgagctttcagccaggcagatgcacttggccaggtttctgcggatgcttctgcgactcgctgatgagtttggtgtagcagtggtaatcactaatcaggtggtagctcaagtggatggagcagcgatgtttgctgctgatcccaaaaaacctattggaggaaatatcatcgcccatgcatcaacaaccagattgtatctgaggaaaggaagaggggaaaccagaatctgcaaaatctacgactctccctgtcttcctgaagctgaagctatgttcgccattaatgcagatggagtgggagatgccaaagactgaatcattgggtttttcctctgttaaaaaccttaagtgctgcagcctaatgagagtgcactgctccctggggttctctacaggcctcttcctgttgtgactgccaggataaagcttccgggaaaacagctattatatcagcttttctgatggtataaacaggagacaggtcagtagtcacaaactgatctaaaatgtttattccttctgtagtgtattaatctctgtgtgttttctttggttttggaggaggggtatgaagtatctttgacatggtgccttaggaatgacttgggtttaacaagctgtctactggacaatcttatgtttccaagagaactaaagctggagagacctgacccttctctcacttctaaattaatggtaaaataaaatgcctcagctatgtagcaaa

SEQ ID NO: 53956 - DNA, 1699 bp, Homo sapiens
agggtttggcgggaattctgaaagccgctggcggaccgcgcgcagcggccagagaccgagccctaaggagagtgcggcgcttcccgaggcgtgcagctgggaactgcaactcatctgggttgtgcgcagaaggctggggcaagcgagtagagaagtggagcgtaagccaggggcgttgggggccgtgcgggtcgggcgcgtgccacgcccgcggggtgaagtcggagcgcggggcctgctggagagaggagcgctgcggaccgagtaatggcaatgcagatgcagcttgaagcaaatgcagatacttcagtggaagaagaaagctttggcccacaacccatttcacggttagagcagtgtggcataaatgccaacgatgtgaagaaattggaagaagctggattccatactgtggaggctgttgcctatgcgccaaagaaggagctaataaatattaagggaattagtgaagccaaagctgataaaattctggctgaggcagctaaattagttccaatgggtttcaccactgcaactgaattccaccaaaggcggtcagagatcatacagattactactggctccaaagagcttgacaaactacttcaaggtggaattgagactggatctatcacagaaatgtttggagaattccgaactgggaagacccagatctgtcatacgctagctgtcacctgccagcttcccattgaccggggtggaggtgaaggaaaggccatgtacattgacactgagggtacctttaggccagaacggctgctggcagtggctgagaggtatggtctctctggcagtgatgtcctggataatgtagcatatgctcgagcgttcaacacagaccaccagacccagctcctttatcaagcatcagccatgatggtagaatctaggtatgcactgcttattgtagacagtgccaccgccctttacagaacagactactcgggtcgaggtgagctttcagccaggcagatgcacttggccaggtttctgcggatgcttctgcgactcgctgatgagtttggtgtagcagtggtaatcactaatcaggtggtagctcaagtggatggagcagcgatgtttgctgctgatcccaaaaaacctattggaggaaatatcatcgcccatgcatcaacaaccagattgtatctgaggaaaggaagaggggaaaccagaatctgcaaaatctacgactctccctgtcttcctgaagctgaagctatgttcgccattaatgcagatggagtgggagatgccaaagactgaatcattgggtttttcctctgttaaaaaccttaagtgctgcagcctaatgagagtgcactgctccctggggttctctacaggcctcttcctgttgtgactgccaggataaagcttccgggaaaacagctattatatcagcttttctgatggtataaacaggagacaggtcagtagtcacaaactgatctaaaatgtttattccttctgtagtgtattaatctctgtgtgttttctttggttttggaggaggggtatgaagtatctttgacatggtgccttaggaatgacttgggtttaacaagctgtctactggacaatcttatgtttccaagagaactaaagctggagagacctgacccttctctcacttctaaattaatggtaaaataaaatgcctcagctatgtagcaaa

SEQ ID NO: 53957 - DNA, 1520 bp, Homo sapiens
  misc_feature (1394)..(1394): n is a, c, g, or t
agggtttggcgggaattctgaaagccgctggcggaccgcgcgcagcggccagagaccgagccctaaggagagtgcggcgcttcccgaggcgtgcagctgggaactgcaactcatctgggttgtgcgcagaaggctggggcaagcgagtagagaagtggagcgtaagccaggggcgttgggggccgtgcgggtcgggcgcgtgccacgcccgcggggtgaagtcggagcgcggggcctgctggagagaggagcgctgcggaccgagtaatggcaatgcagatgcagcttgaagcaaatgcagatacttcagtggaagaagaaagctttggcccacaacccatttcacggttagagcagtgtggcataaatgccaacgatgtgaagaaattggaagaagctggattccatactgtggaggctgttgcctatgcgccaaagaaggagctaataaatattaagggaattagtgaagccaaagctgataaaattctggctgaggcagctaaattagttccaatgggtttcaccactgcaactgaattccaccaaaggcggtcagagatcatacagattactactggctccaaagagcttgacaaactacttcaaggtggaattgagactggatctatcacagaaatgtttggagaattccgaactgggaagacccagatctgtcatacgctagctgtcacctgccagcttcccattgaccggggtggaggtgaaggaaaggccatgtacattgacactgagggtacctttaggccagaacggctgctggcagtggctgagaggtatggtctctctggcagtgatgtcctggataatgtagcatatgctcgagcgttcaacacagaccaccagacccagctcctttatcaagcatcagccatgatggtagaatctaggtatgcactgcttattgtagacagtgccaccgccctttacagaacagactactcgggtcgaggtgagctttcagccaggcagatgcacttggccaggtttctgcggatgcttctgcgactcgctgatgagtttggtgtagcagtggtaatcactaatcaggtggtagctcaagtggatggagcagcgatgtttgctgctgatcccaaaaaacctattggaggaaatatcatcgcccatgcatcaacaaccagtttctcttctttccatcgtgtggattcaatagtttggatttgaaggctgccctgcccccgactctcctgccgcacccctggccattgtaccttttgatgtttagaagttcgtggaagtagacgctgaggtgtgcagaggagctggtggataacagagaatgccagggaagatgagtgctgggtcagggtacttggatgaaacggtgcaggccaggcgggccctaataaaancctctgccaggtctgggagtcccaggccatctgctcaacgctctgtggtttgtcagacctgcaaggcaagcccctgctggggaagcctaggtgtccttgagctgcgtctgctgaggaagcagaaca

SEQ ID NO: 53958 - DNA, 2330 bp, Homo sapiens
agggtttggcgggaattctgaaagccgctggcggaccgcgcgcagcggccagagaccgagccctaaggagagtgcggcgcttcccgaggcgtgcagctgggaactgcaactcatctgggttgtgcgcagaaggctggggcaagcgagtagagaagtggagcgtaagccaggggcgttgggggccgtgcgggtcgggcgcgtgccacgcccgcggggtgaagtcggagcgcggggcctgctggagagaggagcgctgcggaccgagtaatggcaatgcagatgcagcttgaagcaaatgcagatacttcagtggaagaagaaagctttggcccacaacccatttcacggttagagcagtgtggcataaatgccaacgatgtgaagaaattggaagaagctggattccatactgtggaggctgttgcctatgcgccaaagaaggagctaataaatattaagggaattagtgaagccaaagctgataaaattctggtggaattgagactggatctatcacagaaatgtttggagaattccgaactgggaagacccagatctgtcatacgctagctgtcacctgccagcttcccattgaccggggtggaggtgaaggaaaggccatgtacattgacactgagggtacctttaggccagaacggctgctggcagtggctgagaggtatggtctctctggcagtgatgtcctggataatgtagcatatgctcgagcgttcaacacagaccaccagacccagctcctttatcaagcatcagccatgatggtagaatctaggtatgcactgcttattgtagacagtgccaccgccctttacagaacagactactcgggtcgaggtgagctttcagccaggcagatgcacttggccaggtttctgcggatgcttctgcgactcgctgatgagtttggtgtagcagtggtaatcactaatcaggtggtagctcaagtggatggagcagcgatgtttgctgctgatcccaaaaaacctattggaggaaatatcatcgcccatgcatcaacaaccagattgtatctgaggaaaggaagaggggaaaccagaatctgcaaaatctacgactctccctgtcttcctgaagctgaagctatgttcgccattaatgcagatggagtgggagatgccaaagactgaatcattgggtttttcctctgttaaaaaccttaagtgctgcagcctaatgagagtgcactgctccctggggttctctacaggcctcttcctgttgtgactgccaggataaagcttccgggaaaacagctattatatcagcttttctgatggtataaacaggagacaggtcagtagtcacaaactgatctaaaatgtttattccttctgtagtgtattaatctctgtgtgttttctttggttttggaggaggggtatgaagtatctttgacatggtgccttaggaatgacttgggtttaacaagctgtctactggacaatcttatgtttccaagagaactaaagctggagagacctgacccttctctcacttctaaattaatggtaaaataaaatgcctcagctatgtagcaaagggaatgggtctgcacagattctttttttctgtcagtaaaactctcaagcaggtttttaagttgtctgtctgaatgatcttgtgtaagggtttggttatggagtcttgtgccaaacctactaggccattagcccttcaccatctacctgcttggtctttcattgctaagactaactcaagataatcctagagtcttaaagcatttcaggccagtgtggtgtcttgcgcctgtactcccagcactttgggaggccgaggcaggtggatcgcttgagcccaggagttttaagtccagcttggccaagatggtgaaatcccatctctacaaaaaatgcagaacttaatctggacacactgttacacgtgcctgtagtcccagctactcgatagcctgaggtgggagaatcacttaagcctggaaggtggaagttgcagtgagtcgagattgcactgctgcattccagccagggtgacagagtgagaccatgtttcaaacaagaaacatttcagagggcaagtaaacagatttgattgtgaggcttctaataaagtagttattagtagtgaatgtgctgtttatagcaattattgcagtgcaagctatttcaagacagggtttccataatctttttggcactgtataggggtgatcagtttctgttgcttcaagatttgaaaccagaaaggaaagtcccacttgcagatgattgtgcttaaaagctaatggaaaaataaaagaaagacatacc

SEQ ID NO: 53959 - DNA, 2003 bp, Homo sapiens
cacgagctcggccccagattacacagctgaaaaattatcgcttggttggaaattgaatttttaacttacataaacatctttctgatgagctccaagaacatttctatgactacagtttctacatgtttgtattatgctaagagttatttcttatcgcttttttaggtggaattgagactggatctatcacagaaatgtttggagaattccgaactgggaagacccagatctgtcatacgctagctgtcacctgccagcttcccattgaccggggtggaggtgaaggaaaggccatgtacattgacactgagggtacctttaggccagaacggctgctggcagtggctgagaggtatggtctctctggcagtgatgtcctggataatgtagcatatgctcgagcgttcaacacagaccaccagacccagctcctttatcaagcatcagccatgatggtagaatctaggtatgcactgcttattgtagacagtgccaccgccctttacagaacagactactcgggtcgaggtgagctttcagccaggcagatgcacttggccaggtttctgcggatgcttctgcgactcgctgatgagtttggtgtagcagtggtaatcactaatcaggtggtagctcaagtggatggagcagcgatgtttgctgctgatcccaaaaaacctattggaggaaatatcatcgcccatgcatcaacaaccagattgtatctgaggaaaggaagaggggaaaccagaatctgcaaaatctacgactctccctgtcttcctgaagctgaagctatgttcgccattaatgcagatggagtgggagatgccaaagactgaatcattgggtttttcctctgttaaaaaccttaagtgctgcagcctaatgagagtgcactgctccctggggttctctacaggcctcttcctgttgtgactgccaggataaagcttccgggaaaacagctattatatcagcttttctgatggtataaacaggagacaggtcagtagtcacaaactgatctaaaatgtttattccttctgtagtgtattaatctctgtgtgttttctttggttttggaggaggggtatgaagtatctttgacatggtgccttaggaatgacttgggtttaacaagctgtctactggacaatcttatgtttccaagagaactaaagctggagagacctgacccttctctcacttctaaattaatggtaaaataaaatgcctcagctatgtagcaaagggaatgggtctgcacagattctttttttctgtcagtaaaactctcaagcaggtttttaagttgtctgtctgaatgatcttgtgtaagggtttggttatggagtcttgtgccaaacctactaggccattagcccttcaccatctacctgcttggtctttcattgctaagactaactcaagataatcctagagtcttaaagcatttcaggccagtgtggtgtcttgcgcctgtactcccagcactttgggaggccgaggcaggtggatcgcttgagcccaggagttttaagtccagcttggccaagatggtgaaatcccatctctacaaaaaatgcagaacttaatctggacacactgttacacgtgcctgtagtcccagctactcgatagcctgaggtgggagaatcacttaagcctggaaggtggaagttgcagtgagtcgagattgcactgctgcattccagccagggtgacagagtgagaccatgtttcaaacaagaaacatttcagagggcaagtaaacagatttgattgtgaggcttctaataaagtagttattagtagtgaatgtgctgtttatagcaattattgcagtgcaagctatttcaagacagggtttccataatctttttggcactgtataggggtgatcagtttctgttgcttcaagatttgaaaccagaaaggaaagtcccacttgcagatgattgtgcttaaaagctaatggaaaaataaaagaaagacatacc

SEQ ID NO: 53960 - DNA, 2119 bp, Homo sapiens
  misc_feature (17)..(17): n is a, c, g, or t
tatccgaggccctgctnaagggcatctgtggaaaacctaccggtagcatcatactaaatggtgctctgttaccccggctatcgccagaaaaaaaaaaaagaagaaaagaattttattacctactttgggctatatttctaagcagtccagttctgacaggactagctgtatgtactgagacacaatcagctttacatatttttctagctgtatttctattaatatcagaagggaatgcctccttcctaccactgtcatttttaaatgtttttttccctttgccttggaggaattataaagatgtcatgaggagcttggtcagctgtatcagaaatacaatgttcatttctactgttgtttttgttctctatagcttcccattgaccggggtggaggtgaaggaaaggccatgtacattgacactgagggtacctttaggccagaacggctgctggcagtggctgagaggtatggtctctctggcagtgatgtcctggataatgtagcatatgctcgagcgttcaacacagaccaccagacccagctcctttatcaagcatcagccatgatggtagaatctaggtatgcactgcttattgtagacagtgccaccgccctttacagaacagactactcgggtcgaggtgagctttcagccaggcagatgcacttggccaggtttctgcggatgcttctgcgactcgctgatgagtttggtgtagcagtggtaatcactaatcaggtggtagctcaagtggatggagcagcgatgtttgctgctgatcccaaaaaacctattggaggaaatatcatcgcccatgcatcaacaaccagattgtatctgaggaaaggaagaggggaaaccagaatctgcaaaatctacgactctccctgtcttcctgaagctgaagctatgttcgccattaatgcagatggagtgggagatgccaaagactgaatcattgggtttttcctctgttaaaaaccttaagtgctgcagcctaatgagagtgcactgctccctggggttctctacaggcctcttcctgttgtgactgccaggataaagcttccgggaaaacagctattatatcagcttttctgatggtataaacaggagacaggtcagtagtcacaaactgatctaaaatgtttattccttctgtagtgtattaatctctgtgtgttttctttggttttggaggaggggtatgaagtatctttgacatggtgccttaggaatgacttgggtttaacaagctgtctactggacaatcttatgtttccaagagaactaaagctggagagacctgacccttctctcacttctaaattaatggtaaaataaaatgcctcagctatgtagcaaagggaatgggtctgcacagattctttttttctgtcagtaaaactctcaagcaggtttttaagttgtctgtctgaatgatcttgtgtaagggtttggttatggagtcttgtgccaaacctactaggccattagcccttcaccatctacctgcttggtctttcattgctaagactaactcaagataatcctagagtcttaaagcatttcaggccagtgtggtgtcttgcgcctgtactcccagcactttgggaggccgaggcaggtggatcgcttgagcccaggagttttaagtccagcttggccaagatggtgaaatcccatctctacaaaaaatgcagaacttaatctggacacactgttacacgtgcctgtagtcccagctactcgatagcctgaggtgggagaatcacttaagcctggaaggtggaagttgcagtgagtcgagattgcactgctgcattccagccagggtgacagagtgagaccatgtttcaaacaagaaacatttcagagggcaagtaaacagatttgattgtgaggcttctaataaagtagttattagtagtgaatgtgctgtttatagcaattattgcagtgcaagctatttcaagacagggtttccataatctttttggcactgtataggggtgatcagtttctgttgcttcaagatttgaaaccagaaaggaaagtcccacttgcagatgattgtgcttaaaagctaatggaaaaataaaagaaagacatacc

SEQ ID NO: 53961 - DNA, 1490 bp, Homo sapiens
ggtctgactctagagctccccggtaacggaagcagatgcacttggccaggtttctgcggatgcttctgcgactcgctgatgagtttggtgtagcagtggtaatcactaatcaggtggtagctcaagtggatggagcagcgatgtttgctgctgatcccaaaaaacctattggaggaaatatcatcgcccatgcatcaacaaccagattgtatctgaggaaaggaagaggggaaaccagaatctgcaaaatctacgactctccctgtcttcctgaagctgaagctatgttcgccattaatgcagatggagtgggagatgccaaagactgaatcattgggtttttcctctgttaaaaaccttaagtgctgcagcctaatgagagtgcactgctccctggggttctctacaggcctcttcctgttgtgactgccaggataaagcttccgggaaaacagctattatatcagcttttctgatggtataaacaggagacaggtcagtagtcacaaactgatctaaaatgtttattccttctgtagtgtattaatctctgtgtgttttctttggttttggaggaggggtatgaagtatctttgacatggtgccttaggaatgacttgggtttaacaagctgtctactggacaatcttatgtttccaagagaactaaagctggagagacctgacccttctctcacttctaaattaatggtaaaataaaatgcctcagctatgtagcaaagggaatgggtctgcacagattctttttttctgtcagtaaaactctcaagcaggtttttaagttgtctgtctgaatgatcttgtgtaagggtttggttatggagtcttgtgccaaacctactaggccattagcccttcaccatctacctgcttggtctttcattgctaagactaactcaagataatcctagagtcttaaagcatttcaggccagtgtggtgtcttgcgcctgtactcccagcactttgggaggccgaggcaggtggatcgcttgagcccaggagttttaagtccagcttggccaagatggtgaaatcccatctctacaaaaaatgcagaacttaatctggacacactgttacacgtgcctgtagtcccagctactcgatagcctgaggtgggagaatcacttaagcctggaaggtggaagttgcagtgagtcgagattgcactgctgcattccagccagggtgacagagtgagaccatgtttcaaacaagaaacatttcagagggcaagtaaacagatttgattgtgaggcttctaataaagtagttattagtagtgaatgtgctgtttatagcaattattgcagtgcaagctatttcaagacagggtttccataatctttttggcactgtataggggtgatcagtttctgttgcttcaagatttgaaaccagaaaggaaagtcccacttgcagatgattgtgcttaaaagctaatggaaaaataaaagaaagacatacc

SEQ ID NO: 53962 - DNA, 2448 bp, Homo sapiens
agggtttggcgggaattctgaaagccgctggcggaccgcgcgcagcggccagagaccgagccctaaggagagtgcggcgcttcccgaggcgtgcagctgggaactgcaactcatctgggttgtgcgcagaaggctggggcaagcgagtagagaagtggagcgtaagccaggggcgttgggggccgtgcgggtcgggcgcgtgccacgcccgcggggtgaagtcggagcgcggggcctgctggagagaggagcgctgcggaccgagtaatggcaatgcagatgcagcttgaagcaaatgcagatacttcagtggaagaagaaagctttggcccacaacccatttcacggttagagcagtgtggcataaatgccaacgatgtgaagaaattggaagaagctggattccatactgtggaggctgttgcctatgcgccaaagaaggagctaataaatattaagggaattagtgaagccaaagctgataaaattctggctgaggcagctaaattagttccaatgggtttcaccactgcaactgaattccaccaaaggcggtcagagatcatacagattactactggctccaaagagcttgacaaactacttcaaggtggaattgagactggatctatcacagaaatgtttggagaattccgaactgggaagacccagatctgtcatacgctagctgtcacctgccagcttcccattgaccggggtggaggtgaaggaaaggccatgtacattgacactgagggtacctttaggccagaacggctgctggcagtggctgagaggtatggtctctctggcagtgatgtcctggataatgtagcatatgctcgagcgttcaacacagaccaccagacccagctcctttatcaagcatcagccatgatggtagaatctaggtatgcactgcttattgtagacagtgccaccgccctttacagaacagactactcgggtcgaggtgagctttcagccaggcagatgcacttggccaggtttctgcggatgcttctgcgactcgctgatgagtttggtgtagcagtggtaatcactaatcaggtggtagctcaagtggatggagcagcgatgtttgctgctgatcccaaaaaacctattggaggaaatatcatcgcccatgcatcaacaaccagattgtatctgaggaaaggaagaggggaaaccagaatctgcaaaatctacgactctccctgtcttcctgaagctgaagctatgttcgccattaatgcagatggagtgggagatgccaaagactgaatcattgggtttttcctctgttaaaaaccttaagtgctgcagcctaatgagagtgcactgctccctggggttctctacaggcctcttcctgttgtgactgccaggataaagcttccgggaaaacagctattatatcagcttttctgatggtataaacaggagacaggtcagtagtcacaaactgatctaaaatgtttattccttctgtagtgtattaatctctgtgtgttttctttggttttggaggaggggtatgaagtatctttgacatggtgccttaggaatgacttgggtttaacaagctgtctactggacaatcttatgtttccaagagaactaaagctggagagacctgacccttctctcacttctaaattaatggtaaaataaaatgcctcagctatgtagcaaagggaatgggtctgcacagattctttttttctgtcagtaaaactctcaagcaggtttttaagttgtctgtctgaatgatcttgtgtaagggtttggttatggagtcttgtgccaaacctactaggccattagcccttcaccatctacctgcttggtctttcattgctaagactaactcaagataatcctagagtcttaaagcatttcaggccagtgtggtgtcttgcgcctgtactcccagcactttgggaggccgaggcaggtggatcgcttgagcccaggagttttaagtccagcttggccaagatggtgaaatcccatctctacaaaaaatgcagaacttaatctggacacactgttacacgtgcctgtagtcccagctactcgatagcctgaggtgggagaatcacttaagcctggaaggtggaagttgcagtgagtcgagattgcactgctgcattccagccagggtgacagagtgagaccatgtttcaaacaagaaacatttcagagggcaagtaaacagatttgattgtgaggcttctaataaagtagttattagtagtgaatgtgctgtttatagcaattattgcagtgcaagctatttcaagacagggtttccataatctttttggcactgtataggggtgatcagtttctgttgcttcaagatttgaaaccagaaaggaaagtcccacttgcagatgattgtgcttaaaagctaatggaaaaataaaagaaagacatacc

SEQ ID NO: 53963 - DNA, 2294 bp, Homo sapiens
agggtttggcgggaattctgaaagccgctggcggaccgcgcgcagcggccagagaccgagccctaaggagagtgcggcgcttcccgaggcgtgcagctgggaactgcaactcatctgggttgtgcgcagaaggctggggcaagcgagtagagaagtggagcgtaagccaggggcgttgggggccgtgcgggtcgggcgcgtgccacgcccgcggggtgaagtcggagcgcggggcctgctggagagaggagcgctgcggaccgagtaatggcaatgcagatgcagcttgaagcaaatgcagatacttcagtggaagaagaaagctttggcccacaacccatttcacggttagagcagtgtggcataaatgccaacgatgtgaagaaattggaagaagctggattccatactgtggaggctgttgcctatgcgccaaagaaggagctaataaatattaagggaattagtgaagccaaagctgataaaattctggctgaggcagctaaattagttccaatgggtttcaccactgcaactgaattccaccaaaggcggtcagagatcatacagattactactggctccaaagagcttgacaaactacttcaaggtggaattgagactggatctatcacagaaatgtttggagaattccgaactgggaagacccagatctgtcatacgctagctgtcacctgccagcttcccattgaccggggtggaggtgaaggaaaggccatgtacattgacactgagggtacctttaggccagaacggctgctggcagtggctgagaggtatggtctctctggcagtgatgtcctggataatgtagcatatgctcgagcgttcaacacagaccaccagacccagctcctttatcaagcatcagccatgatggtagaatctaggtatgcactgcttattgtagacagtgccaccgccctttacagaacagactactcgggtcgaggtgagctttcagccaggcagatgcacttggccaggtttctgcggatgcttctgcgactcgctgatgagtttggtgtagcagtggtaatcactaatcaggtggtagctcaagtggatggagcagcgatgtttgctgctgatcccaaaaaacctattggaggaaatatcatcgcccatgcatcaacaaccagattgtatctgaggaaaggaagaggggaaaccagaatctgcaaaatctacgactctccctgtcttcctgaagctgaagctatgttcgccattaatgcagatggagtgggagatgccaaagactgaatcattgggtttttcctctgttaaaaaccttaagtgctgcagcctaatgagagtgcactgctccctggggttctctacaggcctcttcctgttgtgactgccaggataaagcttccgggaaaacagctattatatcagcttttctgatggtataaacaggagacaggtcagtagtcacaaactgatctaaaatgtttattccttctgtagtgtattaatctctgtgtgttttctttggttttggaggaggggtatgaagtatctttgacatggtgccttaggaatgacttgggtttaacaagctgtctactggacaatcttatgtttccaagagaactaaagctggagagacctgacccttctctcacttctaaattaatggtaaaataaaatgcctcagctatgtagcaaaaaaaaaaaaaaaaaaaaaaaaaaaaaaaaaaaaaaaaaaaaaaaaaaaaaaaaaaaaaaaaaaaaaaaaaaaaaaaaaaaaaaaaaaaaaacaaaaaaagaaagaaaagaagacagaaggcggcgcgcaccaaaggcgacccacctggcagccgcgcaggccacagcccagaaaacaatcagacagaaaggagagcggacacaccacatcaaccacgaacacggaacaaccagtccgcaacacacaccagaaagtcacccgcacaaaaaaaccacaaacaacaacgacagaacaaaaacaccgacacaagagcaaagaaaagacaaccacataacaaaaaacaatccacaaacaacagagaaaaacaaaccccaactcaaaccagcggagcgaaacaaaccccccaccacacagacacaccaacaaaaacagacacaacacacaagaagaaaagacaacgaaaacacaccaacacaacaccaaaaccagcgcaaacaagggagagaggcgaacacaccacaaaacccaccagcgcgaccacaaagaaccaaaaacaacaaacgaaccaaacagcaaacaaaaagaaaccacaaaa

SEQ ID NO: 53964 - DNA, 2326 bp, Homo sapiens
agggtttggcgggaattctgaaagccgctggcggaccgcgcgcagcggccagagaccgagccctaaggagagtgcggcgcttcccgaggcgtgcagctgggaactgcaactcatctgggttgtgcgcagaaggctggggcaagcgagtagagaagtggagcgtaagccaggggcgttgggggccgtgcgggtcgggcgcgtgccacgcccgcggggtgaagtcggagcgcggggcctgctggagagaggagcgctgcggaccgagtaatggcaatgcagatgcagcttgaagcaaatgcagatacttcagtggaagaagaaagctttggcccacaacccatttcacggttagagcagtgtggcataaatgccaacgatgtgaagaaattggaagaagctggattccatactgtggaggctgttgcctatgcgccaaagaaggagctaataaatattaagggaattagtgaagccaaagctgataaaattctggctgaggcagctaaattagttccaatgggtttcaccactgcaactgaattccaccaaaggcggtcagagatcatacagattactactggctccaaagagcttgacaaactacttcaaggtggaattgagactggatctatcacagaaatgtttggagaattccgaactgggaagacccagatctgtcatacgctagctgtcacctgccagcttcccattgaccggggtggaggtgaaggaaaggccatgtacattgacactgagggtacctttaggccagaacggctgctggcagtggctgagaggtatggtctctctggcagtgatgtcctggataatgtagcatatgctcgagcgttcaacacagaccaccagacccagctcctttatcaagcatcagccatgatggtagaatctaggtatgcactgcttattgtagacagtgccaccgccctttacagaacagactactcgggtcgaggtgagctttcagccaggcagatgcacttggccaggtttctgcggatgcttctgcgactcgctgatgagattgtatctgaggaaaggaagaggggaaaccagaatctgcaaaatctacgactctccctgtcttcctgaagctgaagctatgttcgccattaatgcagatggagtgggagatgccaaagactgaatcattgggtttttcctctgttaaaaaccttaagtgctgcagcctaatgagagtgcactgctccctggggttctctacaggcctcttcctgttgtgactgccaggataaagcttccgggaaaacagctattatatcagcttttctgatggtataaacaggagacaggtcagtagtcacaaactgatctaaaatgtttattccttctgtagtgtattaatctctgtgtgttttctttggttttggaggaggggtatgaagtatctttgacatggtgccttaggaatgacttgggtttaacaagctgtctactggacaatcttatgtttccaagagaactaaagctggagagacctgacccttctctcacttctaaattaatggtaaaataaaatgcctcagctatgtagcaaagggaatgggtctgcacagattctttttttctgtcagtaaaactctcaagcaggtttttaagttgtctgtctgaatgatcttgtgtaagggtttggttatggagtcttgtgccaaacctactaggccattagcccttcaccatctacctgcttggtctttcattgctaagactaactcaagataatcctagagtcttaaagcatttcaggccagtgtggtgtcttgcgcctgtactcccagcactttgggaggccgaggcaggtggatcgcttgagcccaggagttttaagtccagcttggccaagatggtgaaatcccatctctacaaaaaatgcagaacttaatctggacacactgttacacgtgcctgtagtcccagctactcgatagcctgaggtgggagaatcacttaagcctggaaggtggaagttgcagtgagtcgagattgcactgctgcattccagccagggtgacagagtgagaccatgtttcaaacaagaaacatttcagagggcaagtaaacagatttgattgtgaggcttctaataaagtagttattagtagtgaatgtgctgtttatagcaattattgcagtgcaagctatttcaagacagggtttccataatctttttggcactgtataggggtgatcagtttctgttgcttcaagatttgaaaccagaaaggaaagtcccacttgcagatgattgtgcttaaaagctaatggaaaaataaaagaaagacatacc

SEQ ID NO: 53965 - DNA, 2353 bp, Homo sapiens
agggtttggcgggaattctgaaagccgctggcggaccgcgcgcagcggccagagaccgagccctaaggagagtgcggcgcttcccgaggcgtgcagctgggaactgcaactcatctgggttgtgcgcagaaggctggggcaagcgagtagagaagtggagcgtaagccaggggcgttgggggccgtgcgggtcgggcgcgtgccacgcccgcggggtgaagtcggagcgcggggcctgctggagagaggagcgctgcggaccgagtaatggcaatgcagatgcagcttgaagcaaatgcagatacttcagtggaagaagaaagctttggcccacaacccatttcacggttagagcagtgtggcataaatgccaacgatgtgaagaaattggaagaagctggattccatactgtggaggctgttgcctatgcgccaaagaaggagctaataaatattaagggaattagtgaagccaaagctgataaaattctggctgaggcagctaaattagttccaatgggtttcaccactgcaactgaattccaccaaaggcggtcagagatcatacagattactactggctccaaagagcttgacaaactacttcaaggtggaattgagactggatctatcacagaaatgtttggagaattccgaactgggaagacccagatctgtcatacgctagctgtcacctgccaggtatggtctctctggcagtgatgtcctggataatgtagcatatgctcgagcgttcaacacagaccaccagacccagctcctttatcaagcatcagccatgatggtagaatctaggtatgcactgcttattgtagacagtgccaccgccctttacagaacagactactcgggtcgaggtgagctttcagccaggcagatgcacttggccaggtttctgcggatgcttctgcgactcgctgatgagtttggtgtagcagtggtaatcactaatcaggtggtagctcaagtggatggagcagcgatgtttgctgctgatcccaaaaaacctattggaggaaatatcatcgcccatgcatcaacaaccagattgtatctgaggaaaggaagaggggaaaccagaatctgcaaaatctacgactctccctgtcttcctgaagctgaagctatgttcgccattaatgcagatggagtgggagatgccaaagactgaatcattgggtttttcctctgttaaaaaccttaagtgctgcagcctaatgagagtgcactgctccctggggttctctacaggcctcttcctgttgtgactgccaggataaagcttccgggaaaacagctattatatcagcttttctgatggtataaacaggagacaggtcagtagtcacaaactgatctaaaatgtttattccttctgtagtgtattaatctctgtgtgttttctttggttttggaggaggggtatgaagtatctttgacatggtgccttaggaatgacttgggtttaacaagctgtctactggacaatcttatgtttccaagagaactaaagctggagagacctgacccttctctcacttctaaattaatggtaaaataaaatgcctcagctatgtagcaaagggaatgggtctgcacagattctttttttctgtcagtaaaactctcaagcaggtttttaagttgtctgtctgaatgatcttgtgtaagggtttggttatggagtcttgtgccaaacctactaggccattagcccttcaccatctacctgcttggtctttcattgctaagactaactcaagataatcctagagtcttaaagcatttcaggccagtgtggtgtcttgcgcctgtactcccagcactttgggaggccgaggcaggtggatcgcttgagcccaggagttttaagtccagcttggccaagatggtgaaatcccatctctacaaaaaatgcagaacttaatctggacacactgttacacgtgcctgtagtcccagctactcgatagcctgaggtgggagaatcacttaagcctggaaggtggaagttgcagtgagtcgagattgcactgctgcattccagccagggtgacagagtgagaccatgtttcaaacaagaaacatttcagagggcaagtaaacagatttgattgtgaggcttctaataaagtagttattagtagtgaatgtgctgtttatagcaattattgcagtgcaagctatttcaagacagggtttccataatctttttggcactgtataggggtgatcagtttctgttgcttcaagatttgaaaccagaaaggaaagtcccacttgcagatgattgtgcttaaaagctaatggaaaaataaaagaaagacatacc

SEQ ID NO: 53966 - DNA, 937 bp, Homo sapiens
agggtttggcgggaattctgaaagccgctggcggaccgcgcgcagcggccagagaccgagccctaaggagagtgcggcgcttcccgaggcgtgcagctgggaactgcaactcatctgggttgtgcgcagaaggctggggcaagcgagtagagaagtggagcgtaagccaggggcgttgggggccgtgcgggtcgggcgcgtgccacgcccgcggggtgaagtcggagcgcggggcctgctggagagaggagcgctgcggaccgagtaatggcaatgcagatgcagcttgaagcaaatgcagatacttcagtggaagaagaaagctttggcccacaacccatttcacggttagagcagtgtggcataaatgccaacgatgtgaagaaattggaagaagctggattccatactgtggaggctgttgcctatgcgccaaagaaggagctaataaatattaagggaattagtgaagccaaagctgataaaattctggctgaggcagctaaattagttccaatgggtttcaccactgcaactgaattccaccaaaggcggtcagagatcatacagattactactggctccaaagagcttgacaaactacttcaaggtggaattgagactggatctatcacagaaatgtttggagaattccgaactgggaagacccagatctgtcatacgctagctgtcacctgccagcttcccattgaccggggtggaggtgaaggaaaggccatgtacattgacactgagggtacctttaggccagaacggctgctggcagtggctgagagccctcagtgtcaatgttcctgtccttccccaccaccaagacctacttcccgcacttcgacctgagccacggctctgcccagggttaagggccacggcaagaaggtggccgacgcgctgaccaacgccgtgggcacgtgga

SEQ ID NO: 53967 - DNA, 1604 bp, Homo sapiens
agggtttggcgggaattctgaaagccgctggcggaccgcgcgcagcggccagagaccgagccctaaggagagtgcggcgcttcccgaggcgtgcagctgggaactgcaactcatctgggttgtgcgcagaaggctggggcaagcgagtagagaagtggagcgtaagccaggggcgttgggggccgtgcgggtcgggcgcgtgccacgcccgcggggtgaagtcggagcgcggggcctgctggagagaggagcgctgcggaccgagtaatggcaatgcagatgcagcttgaagcaaatgcagatacttcagtggaagaagaaagctttggcccacaacccatttcacggttagagcagtgtggcataaatgccaacgatgtgaagaaattggaagaagctggattccatactgtggaggctgttgcctatgcgccaaagaaggagctaataaatattaagggaattagtgaagccaaagctgataaaattctggctgaggcagctaaattagttccaatgggtttcaccactgcaactgaattccaccaaaggcggtcagagatcatacagattactactggctccaaagagcttgacaaactacttcaaggtggaattgagactggatctatcacagaaatgtttggagaattccgaactgggaagacccagatctgtcatacgctagctgtcacctgccaggtatggtctctctggcagtgatgtcctggataatgtagcatatgctcgagcgttcaacacagaccaccagacccagctcctttatcaagcatcagccatgatggtagaatctaggtatgcactgcttattgtagacagtgccaccgccctttacagaacagactactcgggtcgaggtgagctttcagccaggcagatgcacttggccaggtttctgcggatgcttctgcgactcgctgatgagtttggtgtagcagtggtaatcactaatcaggtggtagctcaagtggatggagcagcgatgtttgctgctgatcccaaaaaacctattggaggaaatatcatcgcccatgcatcaacaaccagattgtatctgaggaaaggaagaggggaaaccagaatctgcaaaatctacgactctccctgtcttcctgaagctgaagctatgttcgccattaatgcagatggagtgggagatgccaaagactgaatcattgggtttttcctctgttaaaaaccttaagtgctgcagcctaatgagagtgcactgctccctggggttctctacaggcctcttcctgttgtgactgccaggataaagcttccgggaaaacagctattatatcagcttttctgatggtataaacaggagacaggtcagtagtcacaaactgatctaaaatgtttattccttctgtagtgtattaatctctgtgtgttttctttggttttggaggaggggtatgaagtatctttgacatggtgccttaggaatgacttgggtttaacaagctgtctactggacaatcttatgtttccaagagaactaaagctggagagacctgacccttctctcacttctaaattaatggtaaaataaaatgcctcagctatgtagcaaa

SEQ ID NO: 53968 - DNA, 1072 bp, Homo sapiens
atttttctagaatcatctctttattgctgtctgctcagaacaatcaaaactggtagcgggaagagaatcagtgtaggaaggcaacattgacaaggccaaacaacgaagtggtgactcactgagtccttgcactctcgaaggaaacaaccaccttagaaaaaaccatgcactttcggcgggggcttaatcacattaggttctctgtgtagcatattaatgcctgccacaagggtgctatcaaccagaatcttcagtgaatcttctttgtctgaattgcacatatctcagaggagaatagagaatgtgtaaggacaccgtggcccatgcattgacactgtcatagataaagcatagttactcactatcagttctacccacagccaaagtccaggttccacctcctttagcaagccttctcgaaggactccatgcctcactgatcttcctcctcactgaacgccacagaccaagaacccataatgtcctcctcaggaaccagcacagtcccaaagtccacagaactcaaaagaacgctggtagattgatttgctctaccatcatctcaacagtgctttcctcgggtgtagcatgatgcattttaacacaattaaaatgacatgttagaaatgttgctgatggggttgctggggcaatgacttctttcaaagtcttccctctatttactgcactcatggaagtgagtctcatgggaagctatgtcttagctgaaagcctgtcttcaaagtcctttggcaaggaagttttctgttatgaataaattagtatcacaagtaaaattttcaagtgtttttccatacaattgacacttctaataatgaaaaagaatcaagcttctgactctgcacacagtggcaaatattggcatgtgtaatctggggcctgttgggtgaagatccttaagttaccacaacctattggtagagtgtctctaaattttggatgtagccagtcccaaactgacttgtaaaagtgtcagcttggacagtgtttcacaaactgggattggagaaagaccacagttctgaaagatgctgctcggtattgctcagtg

SEQ ID NO: 53969 - DNA, 338 bp, Homo sapiens
atttttctagaatcatctctttattgctgtctgctcagaacaatcaaaactggtagcgggaagagaatcagtgtaggaaggcaacattgacaaggccaaacaacgaagtggtgactcactgagtccttgcactctcgaaggaaacaaccaccttagaaaaaaccatgcactttcggcgggggcttaatcacattaggtgagtaatcacctcaaagacccaaatggcagctctgttaatgttcagtctgtatggccttctttatatgtaaatgccaaaacattaataactactaataacattaatagaatgccaaaaacactgcaggtacaaatatcta

SEQ ID NO: 53970 - DNA, 1110 bp, Homo sapiens
ctttgggaggccgaggtgggaggattgcttgagcccaggaattcaagaccagtctgggcaacataacgagaacaagtctctataaaaataaaaataaaaaccatataaaagtaggtatccatagtgctctgtgtccattagacattaataaaaggattccagttgagaggaacaacatttgaagtcattgttattccctcctctcttaattccattaatcttccatggtttcaggttctctgtgtagcatattaatgcctgccacaagggtgctatcaaccagaatcttcagtgaatcttctttgtctgaattgcacatatctcagaggagaatagagaatgtgtaaggacaccgtggcccatgcattgacactgtcatagataaagcatagttactcactatcagttctacccacagccaaagtccaggttccacctcctttagcaagccttctcgaaggactccatgcctcactgatcttcctcctcactgaacgccacagaccaagaacccataatgtcctcctcaggaaccagcacagtcccaaagtccacagaactcaaaagaacgctggtagattgatttgctctaccatcatctcaacagtgctttcctcgggtgtagcatgatgcattttaacacaattaaaatgacatgttagaaatgttgctgatggggttgctggggcaatgacttctttcaaagtcttccctctatttactgcactcatggaagtgagtctcatgggaagctatgtcttagctgaaagcctgtcttcaaagtcctttggcaaggaagttttctgttatgaataaattagtatcacaagtaaaattttcaagtgtttttccatacaattgacacttctaataatgaaaaagaatcaagcttctgactctgcacacagtggcaaatattggcatgtgtaatctggggcctgttgggtgaagatccttaagttaccacaacctattggtagagtgtctctaaattttggatgtagccagtcccaaactgacttgtaaaagtgtcagcttggacagtgtttcacaaactgggattggagaaagaccacagttctgaaagatgctgctcggtattgctcagtg

SEQ ID NO: 53971 - DNA, 391 bp, Homo sapiens
agagctaacatcaaccttcacacctatgcactttgatgctgaccctgggttcataattcacattctgttctgccttcctgccagctctcagattttcagaaacgtcagtgacatcctgtttcctaccgacacatgtttaaaattcttcttcctagcttacatagcactctagagttttatgtcatcctgcccaaccaatcatatctcccacctccctcaacacgtttccccttgtagaatgagtcagactctgccggcccctgaacgtcccatgcttgctttcactttggtgccttggttggaattctgccttattcttctaatctagtttgtcttcccgtgttcatttatctcttctagttctacccacagccaaagtccaggttccacc

SEQ ID NO: 53972 - DNA, 276 bp, Homo sapiens
ttttattgctaaagcactgccatttggggtcccaacccaagaccagggacatttgccaagccccatactttggtagaccctggactcagtcccatgagtctgacaaaagcactgtacacttgatcaaccaaccctcctgaaatgagtgaaaacccataaggcaagagtagcccacctctccagatctccatctttagccagatggtaacaccatttttttactctcttattagtcttctaagccttcaaatgtgtgtgtatgtgtgtgtgtgtaca

SEQ ID NO: 53973 - DNA, 338 bp, Homo sapiens
ttcaaaccctctccattattgacttgagagcaaacactcccagagtataaattacccttgctacattctgactctgaatgaataatatttcctgtgtagtgacatgctctacactatagacttggaattgaatggcatctgattcaggtggatttttttttttttttcctcccaaagcaagtagatggaaaaagcggtcaactctacccttgtcggagcataatgcaaatctaagtctgtggaccttgtatcataaatgaaatgctttagtaaatgtgtcaatgttttccttctgttaattgaaacttgaatgtaatatcaaacttttgggataatat

SEQ ID NO: 53974 - DNA, 242 bp, Homo sapiens
ggacatcctgcaagccttcagctgagcacatgggaaactacccaaggcccaggaaagagccacttaaaaagatcagagggaacattcgctggagcttatgcagggctgggagtgatttctgttcccattagccagattggaaaatctcataatttgcaggtaaagtgatacaagatttttgtgtcaaaagtggggcaaaatttcctctaaattcctgtagccttccttgcttaaaaaaaagc

SEQ ID NO: 53975 - DNA, 341 bp, Homo sapiens
ctctgatcatgccattgctctccagcctgagagacagatttgagactctgtctctaaaataaataaataaataaataaataaataaataaaaataaaagaaatggaaaccgtatagttataatttgttgagcacttatctttgccaggtggcctgggaagcattttatttctacgatctcatagatatctcttggcagccctctgagagcattgatatattattgctacatcacaggctcctacagaatcctgattctgacaattatcagccatgtggccttaggaaagtcacttcattttttgtaccttagctttctcatttctacatgaagaatgataa

SEQ ID NO: 53976 - DNA, 316 bp, Homo sapiens
aaagcaagattcaacagagaaatgaaatgagagctttaaggcatcagtatgtgcaggtctgcagacagcacagacagacttagaaccagaaagacgggagaagtgcctgtcccactggacagaaagcctgacccctctgggaggccactttccctccctcctggacccctcattaggcctcgctaccatctccccaaattccagaggtagtcctttgcagacaagatctactgccaggtccctcgacgcccccttgctcctctgtacaaggcaccaaaacatgggaagcaggcttcatttgcataccacacatata

SEQ ID NO: 53977 - DNA, 702 bp, Homo sapiens
acacacaccccttcatctgacacctgtggcttttaaaaagaaagccagataacggatagccatttaatcagtttgtatccacacaagcacttctccgatttccctcatgcattaggtaatgacactctcccctgagattgatatgtatattataattaataactagcgcagcgtgttctccaaaggggcagctgcaggaggaataccacagcctctgctgtgacccgcagacctcagtgggagggacatgggacatggtggctcgcactgtgttgaccagcagcccctgttcattgcatggctgggtctggttcctacctagtgggtcaaggctgatatattaaagttctgatgttttgtctcaaaaagaccaatatgacctagttggagtacgtatatataaatgtgtatgtgtatgtagcattctatattcacaagcctttaagtgatttttctaggaattaataagaagtaaaggccaggcacagtggctgcacttgtaatcctagtgctttgggaggctgaggcaggaggattgcttggggtcaggagtttaagaccagcctgggtagcatagctagactctatcgctacaaaaaaatgaaaatatttagctggccgtggtggcacatgcctttagtcccagttacgtcactccatacactccagcctgggtgacagagtaagaccctgtttctttaa

SEQ ID NO: 53978 - DNA, 374 bp, Homo sapiens
ccacacctgctttatttcccctgctttaaatagaccatgcctgctatatctcaccttctttaaatagagcatacctaattgaccttgcctgcttaatgtacaccacacctgcgttaaatcacccatacctgattgactacatgttctacataaaccacgcctgatcaatcccacctgctttaaatagaccatccctgattgaccctgcctgcttaatgtacaccacacctgctttatcccacctgctttaaatacaccacacttgattgactctacatgctctaaataaaccacacctgatcaatcccatctgctttaaatagaccgcacctgattgaccctgcctgctttgaaatagcccacatctcagtgat

SEQ ID NO: 53979 - DNA, 220 bp, Homo sapiens
tgtagctgttggaagtgggattgcctccttgatttggttcttggctaggtcgttactggtgtatagaaatgctactgatttctgtatattaattttgtatcctgaaactttactgaattcatttatcaaatctaaggtttttttggtggaatctttagggttctctagatactagatcttatcatcagtgaagaggcatccaatttggatgcctttgaat

SEQ ID NO: 53980 - DNA, 326 bp, Homo sapiens
cttgtggaaaccacaagaagagctctgggccatgctcttccctggctcctcctgcctcttcactaatgtagtgtttccctctctggccctgcatggcatccagtgcctactccctcttggaactgtggctagtaaacttctttcaatgacagtgactctctgtatcatcagtcacacctatatattaaatcccaggcacattttaaaacaacctgccttattagtaagaggactggccactcctttttaaggcttcctcctcttgaattgtccaagagcacctgaggtcaagagttcaagaccagcctggccaacatggtgaaacc

SEQ ID NO: 53981 - DNA, 419 bp, Homo sapiens
ttaatgtttgccctaaagttggctacaaagttgataaatatgaggtatgatgcctgaagtcaagataagaaaagttctaaaacatttactttgcttctacctgcaactatggagattacatttagatttcatctttggaacagctgccagttccttccttagaaaatagcagaggctagcttttggtgacacacagcatgaaagccaccatgggggtaggcgataagttggtaacacagaggcaaaagacaattagggacgattttcaaagtgcttcagggcctgcagctgtaagactcccgtggactgcacagcagtggtgtgcctacatttttcttcttcgcacagctctaaaaacataagcaatcaactcttggctgacttcaggaacccagttgcctatgtatgattcctcacag

SEQ ID NO: 53982 - DNA, 324 bp, Homo sapiens
gaaaaaacaaccataccctttcttttgaggaaaacttacaaactttataaagaataaacatgaatctgcttagaaagttccaagataacatacacaactgaatcacctcttcatatataggcaccacacacataaagatgtagcctaaatcacaatcacttctcaccagggatggagataggaatttacattcttgacttcattaagtctctaatttggcaaaaacctccaagccttttatacacatgctgcgtgtaggccagatctcactcattcttataattgtgcaaataatatggagaccaaaaggcagggttttcattt

SEQ ID NO: 53983 - DNA, 309 bp, Homo sapiens
ctcagctgtcttcagctgctagggagatttttttccccctcctgagctactgtttcccccaacccgagcctttctctcttattgtacccaccctttctgatgaagtcatcaaagcaaagattgcataactgatgcataggcctatcttgtgttatactgggagacaggccaatgtttccattaatagacaagagcaccaccacgctgccaaatggagctctctgctgcaaccactacaagacaggaagaagggaagggaagggaagctgagtgctcagggcatgctgtggagggaaggcgagggcactt

SEQ ID NO: 53984 - DNA, 484 bp, Homo sapiens
gcacactcctgccccaacaggcatcatcgacagcacacacactgagcagcggcaggtggtggccgtgacgggggacgggaccaacgacgggcctgcactcaagaaggccgacgtgggcttcgccatgggcatcgcaggcactgacgtggccaaggaggcctcagacatcatcctgacagacgacaatttcagcagcatcgtcaaggcagtgatgtggggccgcaacgtctatgacagcatctccaaattcttgcagttccagctcaccgtcaacgtggtggccgtgattgtggccttcacaggcgcctgcatcacgcaggactcccctctgaaggccgtgcagatgctctgggtgaacctcatcatggacacgtttgcctcgctggcactggccactgagccgcccacggagaccctgctgctgaggaagccgtacggccgcaacaagccgctcatctccaggaccatgatgaagaacatcctg

SEQ ID NO: 53985 - DNA, 1052 bp, Homo sapiens
agagagcgctgggagccggaggggagcgcagcgagttttggccagtggtcgtgcagtccaaggggctggatggcatgctggacccaagctcagctcagcgtccggacccaataacagttttaccaagggagcagctttctatcctggccacactgaggtgcatagcgtaatgtccatgttgttctacactctgatcacagcttttctgatcggcatacaggcggaaccacactcagagagcaatgtccctgcaggacacaccatcccccaagcccactggactaaacttcagcattcccttgacactgcccttcgcagagcccgcagcgccccggcagcggcgatagctgcacgcgtggcggggcagacccgcaacattactgtggaccccaggctgtttaaaaagcggcgactccgttcaccccgtgtgctgtttagcacccagcctccccgtgaagctgcagacactcaggatctggacttcgaggtcggtggtgctgcccccttcaacaggactcacaggagcaagcggtcatcatcccatcccatcttccacaggggcgaattctcggtgtgtgacagtgtcagcgtgtgggttggggataagaccaccgccacagacatcaagggcaaggaggtgatggtgttgggagaggtgaacattaacaacagtgtattcaaacagtacttttttgagaccaagtgccgggacccaaatcccgttgacagcgggtgccggggcattgactcaaagcactggaactcatattgtaccacgactcacacctttgtcaaggcgctgaccatggatggcaagcaggctgcctggcggtttatccggatagatacggcctgtgtgtgtgtgctcagcaggaaggctgtgagaagagcctgacctgccgacacgctccctccccctgccccttctacactctcctgggcccctccctacctcaacctgtaaattattttaaattataaggactgcatggtaatttatagtttatacagttttaaagaatcattatttattaaatttttggaagcataaa

SEQ ID NO: 53986 - DNA, 679 bp, Homo sapiens
  misc_feature (14)..(14): n is a, c, g, or t
cacaggagcaagtngtcttatccccaacccacacgctgacactgtcacacaccgagaattcgcccctgtggaagatgggatgggatgatgaccgcttgctcctgtgagtcctgttgaagggggcagcaccaccgacctcgaagtccagatcctgagtgtctgcagcttcacggggaggctgggtgctaaacagcacacggggtgaacggtgtcagcgtgtgggttggggataagaccaccgccacagacatcaagggcaaggaggtgatggtgttgggagaggtgaacattaacaacagtgtattcaaacagtacttttttgagaccaagtgccgggacccaaatcccgttgacagcgggtgccggggcattgactcaaagcactggaactcatattgtaccacgactcacacctttgtcaaggcgctgaccatggatggcaagcaggctgcctggcggtttatccggatagatacggcctgtgtgtgtgtgctcagcaggaaggctgtgagaagagcctgacctgccgacacgctccctccccctgccccttctacactctcctgggcccctccctacctcaacctgtaaattattttaaattataaggactgcatggtaatttatagtttatacagttttaaagaatcattatttattaaatttttggaagcataaa

SEQ ID NO: 53987 - DNA, 753 bp, Homo sapiens
atctacaagtagtccaggaagagggggagaagatccctttaggtgtgaaggaagaatggactggaaagtagagaccctgagatccaggacggaaggagggaagaggctcgcttgactgtcataagcttcattttgctgaaacagaccccagaaagggcagtgatgagagatgaggccacaatacagatatccaattatttcagcatcacttgctaaaaatactttcctttcgtctttggattccactggcaactttattgaaaaatcagataactatatggagtctttctctgtcacccaggctggagtattgtggaatctggtcagcagcccacagtgcaacgtggctctctctttgctctcagggacatggatgaagctggaaaccatcattctcagcaaactatcgcaaggacaaaaaaacagacaccgcatgttctcactcacaggtatgatggcatattcctgtggtaccagctacttaggagactgaggtgagagatacagcttgagccagggaggttgagcctgcagtgagccgtgaatatgccacttcactccagcctgggcaacagagccagatcccatctccaagggaaaaaaaaaaccactcctagatgattactctagaatagaatctatgtcctcaaggagccatgaaagggaactcaaaggatttcaggattggcaggtgtgcaggttttggcttaataaaacaaatctcagggcttgaccctgtacacattacttaaa

SEQ ID NO: 53988 - DNA, 1789 bp, Homo sapiens
gattacagatgtgagccaccatgcccggccattccaccacttctttaaaatagtaagaattcttaaaaaccatattccttgtttgatggaagagtaagatgttaacagagggcatcaaagggccagaggtgtctttgaatttattttttttcaatgtcttttctgagcttcagccttagcttttcagatcttcctcctacctgttcatttattcagccttctatctggtcatcctccccagcggctcctctctctgatgtgtccacctacggtggaacgaggattgcctttctgtgctccccatcaggactttgctgtcttggccggcaggagtcgtgctgctgcagagcctcacaggctgtgccttgtttcaggaaacagctcctaatactctcccatcactcactttacctgtctccatcttatttccctatactcctattgtcagcttgagactttttttttttttcaattccaaatgaagggtatgacctcagagtgagtgaggactcagtaaagactcacctctccttacttggtttattaaatgtcttcagattccagagataagacaaggtggccacttcacaaagaatccagaatcatgctcagtaaagctcattaaaagccactgcagctgagaaggttcacagcccttctttatagccacagaggcagcacacaggggaggtgggaagacacagggaaacgagagaagaaggataatgaggccttgaggtgttctgcccccaatttcaaggagcttatcaggcttcatgtgcaatttggggaggggagcttttgatggtgggtaaataatggctctacaaagattacctgactccactgacacaagaatatgtattctcagctgatataactgtgtgttcacatcccatccatagaactcactgaaggagattcatcaagtcagccttttggactgggttggggtttggggagtggatttggggatagagagaaaggtgtacttagtacacattttctaatgggcgttacgtgaactgtttgaacctgctgagtggcgctttgtagagctccatgttcacgttcagtgtcaacaccattcaacagctttgcacatcttcgtacaacataatctggctttggtgccccttgagccacctgtagaataatttatagcagggtcccacaatctactgcaatgatcgtgaacagttatcagtggatatagtgctccaagagtcaaattgtatccgttaagggttttctaacttttgctatcccccccgcgaccaaaaaaagggggggtttataatttaaagaaaaggaaaagaggcgtgggttggtagttgtgtccttaacattcaggaatgacatagcctctggagtctacaaactgaagaaactttcatctgatcagccttggaaatccaaagttaaagagcctatgtgtctcttgaggcgggggttagaggattcaaatttgggatgatgctcattgattcctgaccatagcagtgagaggccattttttgtgcaggaaatgtgcttaggactcagtcttgttttcgattatccaccacagaaaccctgagacacagagcagcttagaagtctctacccaggcgtaaatagagctccctactccagaccacctgccacccacctcccaagttgagaacacaagctccagctgggctggagagtcaggcttggtgcagggtgactttggcgaagttttgtcagatccataaagcaaactggaatttgagctttcacttaccctagtatacgttcttaaaaa

SEQ ID NO: 53989 - DNA, 788 bp, Homo sapiens
cccccttagagcattcatccaagttcagtgtgtagtgtgatggttattatagatatttaaagtatagtaagtggctgtgtaacaggagagactgctgtttacctacgtactgaagggtaactgctgcccgcgtaattaaatcagtattgtcctttcctgtcggtttgatcaattgcggtaccggtagcttcctgcttgtgactgttacctaattgtgtcaatgtacatctgtagtatgtacatgtgaaagtgcctttctattttagaggagttttagccttgctcttgtaccgttgccccgctctgtgccccacccccacctcctcctcccaattcctgctgcccactcgagtgtttcgaagcttcctccctgtcccccaccttccccatccccgccttcctgtgcctcggtgctcagtaatgtcccatctcacctccctgtcggtcctcagactgtctcgttttccttgtagacgtgattgtgcctttctcacccctgtgtcctcccatcccaccgcatccgtcccccgctcatgtgctgctgacagcatcgcattcgcccgtgctctgtactgcctctcaccatttcattccctcctctctgaggtgaaaataaagggggatgcttttacagtctggaaagaaaaaaaatgttttgttaatctgttgtgacaatgcacttttatgtatagtactgtacatttttggcatgtaccattacaggcttcagtatacagtcaggtttgttcttcacggtgtatctttataataaataagatagttctggc

SEQ ID NO: 53990 - DNA, 2526 bp, Homo sapiens
gattacagatgtgagccaccatgcccggccattccaccacttctttaaaatagtaagaattcttaaaaaccatattccttgtttgatggaagagtaagatgttaacagagggcatcaaagggccagaggtgtctttgaatttattttttttcaatgtcttttctgagcttcagccttagcttttcagatcttcctcctacctgttcatttattcagccttctatctggtcatcctccccagcggctcctctctctgatgtgtccacctacggtggaacgaggattgcctttctgtgctccccatcaggactttgctgtcttggccggcaggagtcgtgctgctgcagagcctcacaggctgtgccttgtttcaggaaacagctcctaatactctcccatcactcactttacctgtctccatcttatttccctatactcctattgtcagcttgagactttttttttttttcaattccaaatgaagggtatgacctcagagtgagtgaggactcagtaaagactcacctctccttacttggtttattaaatgtcttcagattccagagataagacaaggtggccacttcacaaagaatccagaatcatgctcagtaaagctcattaaaagccactgcagctgagaaggttcacagcccttctttatagccacagaggcagcacacaggggaggtgggaagacacagggaaacgagagaagaaggataatgaggccttgaggtgttctgcccccaatttcaaggagcttatcaggcttcatgtgcaatttggggaggggagcttttgatggtgggtaaataatggctctacaaagattacctgactccactgacacaagaatatgtattctcagctgatataactgtgtgttcacatcccatccatagaactcactgaaggagattcatcaagtcagccttttggactgggttggggtttggggagtggatttggggatagagagaaaggtgtacttagtacacattttctaatgggcgttacgtgaactgtttgaacctgctgagtggcgctttgtagagctccatgttcacgttcagtgtcaacaccattcaacagctttgcacatcttcgtacaacataatctggctttggtgccccttgagccacctgtagaataatttatagcagggtcccacaatctactgcaatgatcgtgaacagttatcagtggatatagtgctccaagagtcaaattgtatccgttaagggttttctaacttttgctatcccccccgcgaccaaaaaaagggggggtttataatttaaagaaaaggaaaagaggcgtgggttggtagttgtgtccttaacattcaggaatgacatagcctctggagtctacaaactgaagaaactttcatctgatcagccttggaaatccaaagttaaagagcctatgtgtcctcccatcccaccgcatccgtcccccgctcatgtgctgctgacagcatcgcattcgcccgtgctctgtactgcctctcaccatttcattccctcctctctgaggtgaaaataaagggggatgcttttacagtctggaaagaaaaaaaatgttttgttaatctgttgtgacaatgcacttttatgtatagtactgtacatttttggcatgtaccattacaggcttcagtatacagtcaggtttgttcttcacggtgtatctttataataaataagatagttctggctgcctttgtctgcttccagtttgatgtgcatctctgtggtgtctttgttcctttcctttcattcatcactactttctccttgacagctagcttgcattaaataatgtgaaacttttacctttaaaatatttttttatctcactttcatttcttgttcatttggaaatagggtgtcctgcacagggccctgcccatgaagctgtggtttttcagtcatggtttggaggctcaatgtgtagtcagagaaaagagtcttggcagacacttaactgagaagctgagagtgtacaagcctcctaaacatacaccagattgaaatctttcttttgagaaagactctagttaaccacggcaagcccatctttggtttcatttgaataaattgaaaaataatccttaggttatttttctgtgcttagaactccccgtgtattggtatttttctttactttttttttttttttttggagacgaatctctctgtgtcacccaggctgtagtgcaggtggtgcaatctcagctcactgcgaacctccccctcctggattcaagcgattctcctgcctcagcctcctaagtagctgtaattacaggcacccgccaccacacccagctacttttcgtatttttagtggaaacggggtttcaccatgttggccaggctggtctcaaactcctgacctaaagtgatctatctacctgcctcaagctcccaagtgctgggattacaggtgtgagccattgcatctggccaggtatttttctttaaatataaaaaaaagataacttgaggtctagcaat

SEQ ID NO: 53991 - DNA, 1590 bp, Homo sapiens
cccccttagagcattcatccaagttcagtgtgtagtgtgatggttattatagatatttaaagtatagtaagtggctgtgtaacaggagagactgctgtttacctacgtactgaagggtaactgctgcccgcgtaattaaatcagtattgtcctttcctgtcggtttgatcaattgcggtaccggtagcttcctgcttgtgactgttacctaattgtgtcaatgtacatctgtagtatgtacatgtgaaagtgcctttctattttagaggagttttagccttgctcttgtaccgttgccccgctctgtgccccacccccacctcctcctcccaattcctgctgcccactcgagtgtttcgaagcttcctccctgtcccccaccttccccatccccgccttcctgtgcctcggtgctcagtaatgtcccatctcacctccctgtcggtcctcagactgtctcgttttccttgtagacgtgattgtgcctttctcacccctgtgtcctcccatcccaccgcatccgtcccccgctcatgtgctgctgacagcatcgcattcgcccgtgctctgtactgcctctcaccatttcattccctcctctctgaggtgaaaataaagggggatgcttttacagtctggaaagaaaaaaaatgttttgttaatctgttgtgacaatgcacttttatgtatagtactgtacatttttggcatgtaccattacaggcttcagtatacagtcaggtttgttcttcacggtgtatctttataataaataagatagttctggctgcctttgtctgcttccagtttgatgtgcatctctgtggtgtctttgttcctttcctttcattcatcactactttctccttgacagctagcttgcattaaataatgtgaaacttttacctttaaaatatttttttatctcactttcatttcttgttcatttggaaatagggtgtcctgcacagggccctgcccatgaagctgtggtttttcagtcatggtttggaggctcaatgtgtagtcagagaaaagagtcttggcagacacttaactgagaagctgagagtgtacaagcctcctaaacatacaccagattgaaatctttcttttgagaaagactctagttaaccacggcaagcccatctttggtttcatttgaataaattgaaaaataatccttaggttatttttctgtgcttagaactccccgtgtattggtatttttctttactttttttttttttttttggagacgaatctctctgtgtcacccaggctgtagtgcaggtggtgcaatctcagctcactgcgaacctccccctcctggattcaagcgattctcctgcctcagcctcctaagtagctgtaattacaggcacccgccaccacacccagctacttttcgtatttttagtggaaacggggtttcaccatgttggccaggctggtctcaaactcctgacctaaagtgatctatctacctgcctcaagctcccaagtgctgggattacaggtgtgagccattgcatctggccaggtatttttctttaaatataaaaaaaagataacttgaggtctagcaat

SEQ ID NO: 53992 - DNA, 2172 bp, Homo sapiens
gattacagatgtgagccaccatgcccggccattccaccacttctttaaaatagtaagaattcttaaaaaccatattccttgtttgatggaagagtaagatgttaacagagggcatcaaagggccagaggtgtctttgaatttattttttttcaatgtcttttctgagcttcagccttagcttttcagatcttcctcctacctgttcatttattcagccttctatctggtcatcctccccagcggctcctctctctgatgtgtccacctacggtggaacgaggattgcctttctgtgctccccatcaggactttgctgtcttggccggcaggagtcgtgctgctgcagagcctcacaggctgtgccttgtttcaggaaacagctcctaatactctcccatcactcactttacctgtctccatcttatttccctatactcctattgtcagcttgagactttttttttttttcaattccaaatgaagggtatgacctcagagtgagtgaggactcagtaaagactcacctctccttacttggtttattaaatgtcttcagattccagagataagacaaggtggccacttcacaaagaatccagaatcatgctcagtaaagctcattaaaagccactgcagctgagaaggttcacagcccttctttatagccacagaggcagcacacaggggaggtgggaagacacagggaaacgagagaagaaggataatgaggccttgaggtgttctgcccccaatttcaaggagcttatcaggcttcatgtgcaatttggggaggggagcttttgatggtgggtaaataatggctctacaaagattacctgactccactgacacaagaatatgtattctcagctgatataactgtgtgttcacatcccatccatagaactcactgaaggagattcatcaagtcagccttttggactgggttggggtttggggagtggatttggggatagagagaaaggtgtacttagtacacattttctaatgggcgttacgtgaactgtttgaacctgctgagtggcgctttgtagagctccatgttcacgttcagtgtcaacaccattcaacagctttgcacatcttcgtacaacataatctggctttggtgccccttgagccacctgtagaataatttatagcagggtcccacaatctactgcaatgatcgtgaacagttatcagtggatatagtgctccaagagtcaaattgtatccgttaagggttttctaacttttgctatcccccccgcgaccaaaaaaagggggggtttataatttaaagaaaaggaaaagaggcgtgggttggtagttgtgtccttaacattcaggaatgacatagcctctggagtctacaaactgaagaaactttcatctgatcagccttggaaatccaaagttaaagagcctatgtgtcctcccatcccaccgcatccgtcccccgctcatgtgctgctgacagcatcgcattcgcccgtgctctgtactgcctctcaccatttcattccctcctctctgaggtgaaaataaagggggatgcttttacagtctggaaagaaaaaaaatgttttgttaatctgttgtgacaatgcacttttatgtatagtactgtacatttttggcatgtaccattacaggcttcagtatacagtcaggtttgttcttcacggtgtatctttataataaataagatagttctggctgcctttgtctgcttccagtttgatgtgcatctctgtggtgtctttgttcctttcctttcattcatcactactttctccttgacagctagcttgcattaaataatgtgaaacttttacctttaaaatatttttttatctcactttcatttcttgttcatttggaaatagggtgtcctgcacagggccctgcccatgaagctgtggtttttcagtcatggtttggaggctcaatgtgtagtcagagaaaagagtcttggcagacacttaactgagaagctgagagtgtacaagcctcctaaacatacaccagattgaaatctttcttttgagaaagactctagttaaccacggcaagcccatctttggtttcatttgaataaattgaaaaataatccttaggttatttttctgtgcttagaactcccacggtgcatgaacacaccacgg

SEQ ID NO: 53993 - DNA, 2381 bp, Homo sapiens
gattacagatgtgagccaccatgcccggccattccaccacttctttaaaatagtaagaattcttaaaaaccatattccttgtttgatggaagagtaagatgttaacagagggcatcaaagggccagaggtgtctttgaatttattttttttcaatgtcttttctgagcttcagccttagcttttcagatcttcctcctacctgttcatttattcagccttctatctggtcatcctccccagcggctcctctctctgatgtgtccacctacggtggaacgaggattgcctttctgtgctccccatcaggactttgctgtcttggccggcaggagtcgtgctgctgcagagcctcacaggctgtgccttgtttcaggaaacagctcctaatactctcccatcactcactttacctgtctccatcttatttccctatactcctattgtcagcttgagactttttttttttttcaattccaaatgaagggtatgacctcagagtgagtgaggactcagtaaagactcacctctccttacttggtttattaaatgtcttcagattccagagataagacaaggtggccacttcacaaagaatccagaatcatgctcagtaaagctcattaaaagccactgcagctgagaaggttcacagcccttctttatagccacagaggcagcacacaggggaggtgggaagacacagggaaacgagagaagaaggataatgaggccttgaggtgttctgcccccaatttcaaggagcttatcaggcttcatgtgcaatttggggaggggagcttttgatggtgggtaaataatggctctacaaagattacctgactccactgacacaagaatatgtattctcagctgatataactgtgtgttcacatcccatccatagaactcactgaaggagattcatcaagtcagccttttggactgggttggggtttggggagtggatttggggatagagagaaaggtgtacttagtacacattttctaatgggcgttacgtgaactgtttgaacctgctgagtggcgctttgtagagctccatgttcacgttcagtgtcaacaccattcaacagctttgcacatcttcgtacaacataatctggctttgctgcccactcgagtgtttcgaagcttcctccctgtcccccaccttccccatccccgccttcctgtgcctcggtgctcagtaatgtcccatctcacctccctgtcggtcctcagactgtctcgttttccttgtagacgtgattgtgcctttctcacccctgtgtcctcccatcccaccgcatccgtcccccgctcatgtgctgctgacagcatcgcattcgcccgtgctctgtactgcctctcaccatttcattccctcctctctgaggtgaaaataaagggggatgcttttacagtctggaaagaaaaaaaatgttttgttaatctgttgtgacaatgcacttttatgtatagtactgtacatttttggcatgtaccattacaggcttcagtatacagtcaggtttgttcttcacggtgtatctttataataaataagatagttctggctgcctttgtctgcttccagtttgatgtgcatctctgtggtgtctttgttcctttcctttcattcatcactactttctccttgacagctagcttgcattaaataatgtgaaacttttacctttaaaatatttttttatctcactttcatttcttgttcatttggaaatagggtgtcctgcacagggccctgcccatgaagctgtggtttttcagtcatggtttggaggctcaatgtgtagtcagagaaaagagtcttggcagacacttaactgagaagctgagagtgtacaagcctcctaaacatacaccagattgaaatctttcttttgagaaagactctagttaaccacggcaagcccatctttggtttcatttgaataaattgaaaaataatccttaggttatttttctgtgcttagaactccccgtgtattggtatttttctttactttttttttttttttttggagacgaatctctctgtgtcacccaggctgtagtgcaggtggtgcaatctcagctcactgcgaacctccccctcctggattcaagcgattctcctgcctcagcctcctaagtagctgtaattacaggcacccgccaccacacccagctacttttcgtatttttagtggaaacggggtttcaccatgttggccaggctggtctcaaactcctgacctaaagtgatctatctacctgcctcaagctcccaagtgctgggattacaggtgtgagccattgcatctggccaggtatttttctttaaatataaaaaaaagataacttgaggtctagcaat

SEQ ID NO: 53994 - DNA, 411 bp, Homo sapiens
gaaagaggggaagagccggggtatttcttcctctctttttctgccttgagaggggtctccactactgttcagatagcttatatcagataactcataatttggttcagtgattaacaaaaaaatcttttttactactataacatgggcaaatttcttcatagaagcatttttattcttgttctttcctgaccataaatatgaatgcctagctttgcacattgtagttatatagattatctaatctcattgatttatgacaggttgttttacatttgcaaatggttgctgtaagtaatacgcagaggaggaagaagctagcttgtgactttctctttctctctttcctttttctttccctttatctcttttgccctttcccttgtaaaaataaaacatacagaaaagtgaaaa

SEQ ID NO: 53995 - DNA, 918 bp, Homo sapiens
cacccatcccatagccaccctggtatcagggccctgccagcagagtagcttaggcttttcctagccagagtcttctttcagccacccagggctacctagttcctggggactctagatataaaaagaagccctggccaagaaggcagaaagtctgagttcagatctgagctttaccacagagtggctctaaaccttcatgttcaactgtacaatgggactatccgtcctatccgcctctcaggtagatgaaatggggtaggcaatacgaaagagctgtgtacattgtcaagagccctattcatatgtggcctgcttaatggctccctcctagtctgatttgagatgagcattctttcagcagcatttaatgggctaagtcagatacattcaaatattttttgaactattaatgtcaatgaaattttacacagtctctccatatataaagtaaatgaaagtagggctgcaagaatcagcaggaagaggggagctagagacttcccccaataccacccgacccatcagcctctcatggcagcatccaaggcctctgcacagacccctagggctcccagcgaccaggtgcaaaaagctctagaccagaccatgccaaaaggctcattcctggctactggcagcattaacagagagcagtagaagcatcatgcccctcccagtctgccagttccttaaggaaggaccttgagaggggagagaaggcaacttgacagcatggttcaaatcaaagaggcaggaaaggggctgtcatcaggggcttggaggggactgcaaaaagtgcctacagatgaggcgggaaatttgggcaaaggttatcaaggccacgtttaattatcctttccaagtcttgcccagcccagcctttctgcacacatcatgcaaaagaaaacctccagccag

SEQ ID NO: 53996 - DNA, 331 bp, Homo sapiens
tgtcctcacccatagagctatcagagggtgcctgctattggcagaccctttacatttccctttaataaatcacttccctgccaagatctctgtcaaggtttgagaagtcagagcattaagttattttcaataaatggtatgtacatgaacatcagcaagctccaagaaatgactcgagggccttttactactcagagaataaagcaaaaatgccaggttttcagtgcttgtgctttgtgccagggatttggacgtgttttttgttaagttccagcgttgagctatgttccagaagatggagccttccagaaattattgtagtgcttgatgt

SEQ ID NO: 53997 - DNA, 415 bp, Homo sapiens
gaaaaaataatagttgggtaggcataacatttaccagttcatggtgtaacacatttcttattttatgaagtgagttttgtcttcctacctttttatttttctgcttatctgtttcatctacttctcaatagaattttgttttagatagaatacaatttgtttatattctaaacctaattttccctacttacatttttttcatggcttactaagaaagataagtgtgaccttttaatgtttctgcagaaacgttgaatgactggacagattaatgcagaaattatcacttcttcactgtatcccagatgcaaatctgctttaactgtgcaaatagtcttcaaacttctagactcacaggttctcttagtgaataatctatgaccaggatcccctggtgccctcaggcctttctcct

SEQ ID NO: 53998 - DNA, 1566 bp, Homo sapiens
ttctaatggtagattgaaagtccaaatgcactttttccaggtggcatctttggatcttctgtgtctcttcttttaagaacaatgcaaatgtacttattgattatcaaaaacgaggatttttttaagtattcataacacacatttaacaccttggtgtcctgggccccagagttcctttgaaggcccataccaatattttcaatgtaaaactcagtcttttcagaagaaaatacagtatatgaatgttttacgataacattaattacctgattttcaatacagttatgactgaggaatgatatttctaagggcacattttgaaaactccataaatcgtattgtattaacaccttaatagatacaatagtaaaacttaagaatttttctctgtcatgtgaccctctgttcctgcagttttggggttcattaaaagcacaaataaaacaatttaatctctttgaaataaagtaataaaagtaccttttagaagttttctttttcccttgtgtataaaacttctctatgtttctgtaatgaacacataaatttccatactttttcccttaactggttattttcttaaaagtcagaatttaatatggcgtatttcttttttgcccctcctgccccccccaccaactgatattatccattccataggccacagttatttctctaggcctgcatagcgacattttcatactactttaaaactaagtgggttgtgcacagtatcaaaaacctttctaggtaaactctgagcgagctatctaaactccctcccagcttgggaagcacatactaatggagaagaatttctgttctaattagaattgccaagggttaccagacctctccagatctgcgattgacctggttgcagaacatggcaggcaagcactcagaacgaagcaatcatgctgaagctgcacagtgtctagtccactcagcagcacttgttgctgaatatttgagcatgctggaggaccggaaatatcttcctgtgggatgtgtaacatttcagaatatttcatctaatgttttagaagaatctgcggtctcagatgatgtggtatctccagatgaagaaggtatctgctctggaaaatactttactgagtcaggacttgtgggattactggaacaagcagctgcttccttctctatggtagatgactcttgttaattcttttcccacagtttcatacctctaattatcaatgacatgtgtatttattctctctggcttatgaccctacttttctttaaagataatttattctggacccagtatggtggctcatgcctgtaatctcagcactttgagaggctaagacgggaggattgcttgaatccaggagttcaagaccagcatggggaacatagtgagataccgtctctacagaaaattaaaaattcaccaggcatggtggctcatgcctgtggtcccagctacttgagaggctgaggtgggaggattgcttgagcccaagaggttgaggctgcagtgagccatgattatgctgctgcactccagcctggacaacagagtaaaaccctgtctcc

SEQ ID NO: 53999 - DNA, 4349 bp, Homo sapiens
gtccgatttcttcatcttctgctagataaactgatacttttagttattagacctcctgtcattgctggccaaatagttaacctaggtcaagcatcttttgaagccatggcatcaattataaatcgacttcacaaaaacttggaaggaaatcatgaccagcatggcagaaacagccttcttgcatcatatattcattatgttttccgcctaccaaatacttaccctaattcatcatcaccaggtcctgggggtttgggaggatcagtgcattatgccacaatggctagatctgcggtgagacctgcaagccttaatttaaatcgttctcgaagccttagtaatagcaatccagatatatctgggactcccacgtcaccagatgatgaagttcgatcaatcatcgggagtaaggctatggatcgaagttgtaatcgtatgtcttcgcacacagagacgtcaagtttcttacaaacattaacgggacgcttaccaactaaaaagctttttcacgaggagctggctttgcagtgggttgtttgcagtggcagcgttcgggaatcagctttgcaacaagcctggttcttttttgaattaatggtaaagagcatggtgcaccatttatactttaatgataaacttgaggctccaaggaaaagtcgttttccagaacgtttcatggatgacattgcagctcttgtcagcacgattgctagtgatatagtttcacgatttcagaaggacacagaaatggttgagagactcaatacaagccttgcattctttctcaatgatctgttgtctgttatggacagaggatttgtttttagccttataaagtcctgctataaacaggtgtcttcaaagctttactcattaccgaatcccagtgttctggtgtccttgaggctggattttctacgaatcatctgcagtcatgagcactatgttacattaaacttaccctgcagcttacttactccacctgcatctccatcaccttctgtttcttctgcaacatctcagagttctggattttctacgaatgtacaagaccaaaagattgcaaatatgtttgaattatccgtgcctttccgccaacagcattatttggcaggacttgtgttaacagagctggctgtcattttagaccctgatgctgaaggactgtttggattgcataagaaagtcatcaatatggtacacaatttactctccagtcacgactcagacccgcggtactctgaccctcagataaaggctcgagtggccatgttgtatctacctctgattggtattatcatggaaactgtacctcagctgtatgattttacagaaactcacaatcaacgaggaagaccaatttgtatagccactgatgattatgaaagtgagagcggaagtatgataagccagaccgttgccatggcaatcgcagggacatcggtccctcaactaacaaggcctggcagtttcctcctcacgtcaacgagtggcaggcaacacactaccttttcagcagaatcaagtcgaagccttttgatctgtctactttgggttctcaaaaatgcagatgaaacagttctacagaagtggtttacagatctctcagtcttgcagctaaaccggctattagatctgctttatctctgtgtgtcttgctttgagtataaagggaaaaaagtgtttgaacgaatgaatagcttgacctttaagaaatcaaaagacatgagagcaaagcttgaagaagctattcttgggagcataggtgccaggcaagaaatggtacggcgaagccgaggacagctcgagagaagcccatctggaagtgcctttggaagtcaagaaaatttgaggtggaggaaagatatgactcactggcgtcaaaacacagagaagcttgacaaatcaagagcagagattgaacacgaagcactgattgatggaaacctggctacagaagcaaacctaatcattttagatacattagagattgttgttcagaccgtttctgtaacggaatccaaagagagcattcttggtggagtgctaaaagtgctactacacagcatggcctgtaaccaaagtgcagtttatctacaacactgttttgctacacagagagccttggtttcaaagtttcctgaactcttatttgaagaagagacagagcagtgtgctgatttatgcctcaggcttctccgacactgtagcagtagcatcggtacaatacggtcacacgccagtgcctccctttacctactaatgaggcaaaactttgagattgggaataactttgccagggttaaaatgcaggtaacaatgtcactatcctccttggtgggcacatctcagaattttaatgaagaattcttaagacgttctctaaagactatattgacatatgctgaagaagatctggaattgagggaaacaacatttcctgatcaggtccaggatctggttttcaatctccatatgattctttctgatactgtgaaaatgaaggaacaccaggaggatcctgaaatgttgattgatctaatgtacagaattgccaagggttaccagacctctccagatctgcgattgacctggttgcagaacatggcaggcaagcactcagaacgaagcaatcatgctgaagctgcacagtgtctagtccactcagcagcacttgttgctgaatatttgagcatgctggaggaccggaaatatcttcctgtgggatgtgtaacatttcagaatatttcatctaatgttttagaagaatctgcggtctcagatgatgtggtatctccagatgaagaaggtatctgctctggaaaatactttactgagtcaggacttgtgggattactggaacaagcagctgcttccttctctatggctggcatgtatgaagcagttaatgaagtttacaaagtacttattcctattcatgaagctaatcgggatgcaaagaaactatccacaattcatggtaaacttcaagaagcattcagcaaaattgttcatcagagtactggctgggagcggatgtttggcacctattttcgtgttggtttttatggaaccaagttcggggatttggatgaacaagaatttgtttacaaggagcctgcaataaccaaacttgcagagatatctcacagattggagggattttacggagaaagatttggagaggatgtggttgaagtaatcaaagactctaatcctgtagacaagtgtaaattagatcctaacaaggcatatattcagattacctatgtggagccatactttgacacatatgagatgaaggacagaatcacctatttcgacaaaaattacaatcttcgtcgattcatgtactgtacaccctttactttagatggccgtgcccatggggaacttcatgaacaattcaaaaggaagaccattctgactacgtctcatgcctttccttatattaaaacaagggtcaatgtcactcataaagaagagatcatcttaacaccaattgaagttgctattgaggacatgcagaaaaagacacaggagttggcatttgcaacacatcaggatcccgcagaccccaaaatgcttcagatggtactccagggatctgtaggcaccacagtgaatcaggggcctttggaagttgcccaggtttttctgtctgaaatacctagtgacccaaagctcttcagacatcataataaactgcgactctgctttaaagattttactaaaaggtgtgaagatgccttaagaaaaaataagagcttaattgggccggatcaaaaggagtatcaaagggaactggagagaaactatcatcgccttaaagaggccctacagccactgatcaacagaaagatccctcagttatacaaggcagtattgcctgtcacctgccacagagattccttcagtcgaatgagccttcgcaaaatggatctctaaactgaatgcacttgttttattcatctgcaaagagccatgtattcaacatcgagtgtgaaaagatctattggaaaacaacatggaatggaattctggaaattattattcattgaagaatgcagtggccaagaaaatatcaaatgtagattgttaacgcttgagaatcatggctatggtttctaatgttctggtaacaagctgttatcttttaagacattttaatgactcaaaggtacactatacatttaccattatttataccatagctaaggttaaaaatttattcactttaagttcgtattttttaatttatattaccatttatagattcattttggaaccattttaaatgtagtaatgcttattttaaaggtactattaaatatgtgaatgtttacact

SEQ ID NO: 54000 - DNA, 4442 bp, Homo sapiens
gtccgatttcttcatcttctgctagataaactgatacttttagttattagacctcctgtcattgctggccaaatagttaacctaggtcaagcatcttttgaagccatggcatcaattataaatcgacttcacaaaaacttggaaggaaatcatgaccagcatggcagaaacagccttcttgcatcatatattcattatgttttccgcctaccaaatacttaccctaattcatcatcaccaggtcctgggggtttgggaggatcagtgcattatgccacaatggctagatctgcggtgagacctgcaagccttaatttaaatcgttctcgaagccttagtaatagcaatccagatatatctgggactcccacgtcaccagatgatgaagttcgatcaatcatcgggagtaagggtttagatcgctccaattcctgggttaacactggtggtccaaaagctgccccatggggatccaaccccagtccaagtgcagaatcaacacaggctatggatcgaagttgtaatcgtatgtcttcgcacacagagacgtcaagtttcttacaaacattaacgggacgcttaccaactaaaaagctttttcacgaggagctggctttgcagtgggttgtttgcagtggcagcgttcgggaatcagctttgcaacaagcctggttcttttttgaattaatggtaaagagcatggtgcaccatttatactttaatgataaacttgaggctccaaggaaaagtcgttttccagaacgtttcatggatgacattgcagctcttgtcagcacgattgctagtgatatagtttcacgatttcagaaggacacagaaatggttgagagactcaatacaagccttgcattctttctcaatgatctgttgtctgttatggacagaggatttgtttttagccttataaagtcctgctataaacaggtgtcttcaaagctttactcattaccgaatcccagtgttctggtgtccttgaggctggattttctacgaatcatctgcagtcatgagcactatgttacattaaacttaccctgcagcttacttactccacctgcatctccatcaccttctgtttcttctgcaacatctcagagttctggattttctacgaatgtacaagaccaaaagattgcaaatatgtttgaattatccgtgcctttccgccaacagcattatttggcaggacttgtgttaacagagctggctgtcattttagaccctgatgctgaaggactgtttggattgcataagaaagtcatcaatatggtacacaatttactctccagtcacgactcagacccgcggtactctgaccctcagataaaggctcgagtggccatgttgtatctacctctgattggtattatcatggaaactgtacctcagctgtatgattttacagaaactcacaatcaacgaggaagaccaatttgtatagccactgatgattatgaaagtgagagcggaagtatgataagccagaccgttgccatggcaatcgcagggacatcggtccctcaactaacaaggcctggcagtttcctcctcacgtcaacgagtggcaggcaacacactaccttttcagcagaatcaagtcgaagccttttgatctgtctactttgggttctcaaaaatgcagatgaaacagttctacagaagtggtttacagatctctcagtcttgcagctaaaccggctattagatctgctttatctctgtgtgtcttgctttgagtataaagggaaaaaagtgtttgaacgaatgaatagcttgacctttaagaaatcaaaagacatgagagcaaagcttgaagaagctattcttgggagcataggtgccaggcaagaaatggtacggcgaagccgaggacagctcgagagaagcccatctggaagtgcctttggaagtcaagaaaatttgaggtggaggaaagatatgactcactggcgtcaaaacacagagaagcttgacaaatcaagagcagagattgaacacgaagcactgattgatggaaacctggctacagaagcaaacctaatcattttagatacattagagattgttgttcagaccgtttctgtaacggaatccaaagagagcattcttggtggagtgctaaaagtgctactacacagcatggcctgtaaccaaagtgcagtttatctacaacactgttttgctacacagagagccttggtttcaaagtttcctgaactcttatttgaagaagagacagagcagtgtgctgatttatgcctcaggcttctccgacactgtagcagtagcatcggtacaatacggtcacacgccagtgcctccctttacctactaatgaggcaaaactttgagattgggaataactttgccagggttaaaatgcaggtaacaatgtcactatcctccttggtgggcacatctcagaattttaatgaagaattcttaagacgttctctaaagactatattgacatatgctgaagaagatctggaattgagggaaacaacatttcctgatcaggtccaggatctggttttcaatctccatatgattctttctgatactgtgaaaatgaaggaacaccaggaggatcctgaaatgttgattgatctaatgtacagaattgccaagggttaccagacctctccagatctgcgattgacctggttgcagaacatggcaggcaagcactcagaacgaagcaatcatgctgaagctgcacagtgtctagtccactcagcagcacttgttgctgaatatttgagcatgctggaggaccggaaatatcttcctgtgggatgtgtaacatttcagaatatttcatctaatgttttagaagaatctgcggtctcagatgatgtggtatctccagatgaagaaggtatctgctctggaaaatactttactgagtcaggacttgtgggattactggaacaagcagctgcttccttctctatggctggcatgtatgaagcagttaatgaagtttacaaagtacttattcctattcatgaagctaatcgggatgcaaagaaactatccacaattcatggtaaacttcaagaagcattcagcaaaattgttcatcagagtactggctgggagcggatgtttggcacctattttcgtgttggtttttatggaaccaagttcggggatttggatgaacaagaatttgtttacaaggagcctgcaataaccaaacttgcagagatatctcacagattggagggattttacggagaaagatttggagaggatgtggttgaagtaatcaaagactctaatcctgtagacaagtgtaaattagatcctaacaaggcatatattcagattacctatgtggagccatactttgacacatatgagatgaaggacagaatcacctatttcgacaaaaattacaatcttcgtcgattcatgtactgtacaccctttactttagatggccgtgcccatggggaacttcatgaacaattcaaaaggaagaccattctgactacgtctcatgcctttccttatattaaaacaagggtcaatgtcactcataaagaagagatcatcttaacaccaattgaagttgctattgaggacatgcagaaaaagacacaggagttggcatttgcaacacatcaggatcccgcagaccccaaaatgcttcagatggtactccagggatctgtaggcaccacagtgaatcaggggcctttggaagttgcccaggtttttctgtctgaaatacctagtgacccaaagctcttcagacatcataataaactgcgactctgctttaaagattttactaaaaggtgtgaagatgccttaagaaaaaataagagcttaattgggccggatcaaaaggagtatcaaagggaactggagagaaactatcatcgccttaaagaggccctacagccactgatcaacagaaagatccctcagttatacaaggcagtattgcctgtcacctgccacagagattccttcagtcgaatgagccttcgcaaaatggatctctaaactgaatgcacttgttttattcatctgcaaagagccatgtattcaacatcgagtgtgaaaagatctattggaaaacaacatggaatggaattctggaaattattattcattgaagaatgcagtggccaagaaaatatcaaatgtagattgttaacgcttgagaatcatggctatggtttctaatgttctggtaacaagctgttatcttttaagacattttaatgactcaaaggtacactatacatttaccattatttataccatagctaaggttaaaaatttattcactttaagttcgtattttttaatttatattaccatttatagattcattttggaaccattttaaatgtagtaatgcttattttaaaggtactattaaatatgtgaatgtttacact

SEQ ID NO: 54001 - DNA, 3113 bp, Homo sapiens
gtaccgcgggtctgagtcgtgactggagagtaaattgtgtatctacctctgattggtattatcatggaaactgtacctcagctgtatgattttacagaaactcacaatcaacgaggaagaccaatttgtatagccactgatgattatgaaagtgagagcggaagtatgataagccagaccgttgccatggcaatcgcagggacatcggtccctcaactaacaaggcctggcagtttcctcctcacgtcaacgagtggcaggcaacacactaccttttcagcagaatcaagtcgaagccttttgatctgtctactttgggttctcaaaaatgcagatgaaacagttctacagaagtggtttacagatctctcagtcttgcagctaaaccggctattagatctgctttatctctgtgtgtcttgctttgagtataaagggaaaaaagtgtttgaacgaatgaatagcttgacctttaagaaatcaaaagacatgagagcaaagcttgaagaagctattcttgggagcataggtgccaggcaagaaatggtacggcgaagccgaggacagctcgagagaagcccatctggaagtgcctttggaagtcaagaaaatttgaggtggaggaaagatatgactcactggcgtcaaaacacagagaagcttgacaaatcaagagcagagattgaacacgaagcactgattgatggaaacctggctacagaagcaaacctaatcattttagatacattagagattgttgttcagaccgtttctgtaacggaatccaaagagagcattcttggtggagtgctaaaagtgctactacacagcatggcctgtaaccaaagtgcagtttatctacaacactgttttgctacacagagagccttggtttcaaagtttcctgaactcttatttgaagaagagacagagcagtgtgctgatttatgcctcaggcttctccgacactgtagcagtagcatcggtacaatacggtcacacgccagtgcctccctttacctactaatgaggcaaaactttgagattgggaataactttgccagggttaaaatgcaggtaacaatgtcactatcctccttggtgggcacatctcagaattttaatgaagaattcttaagacgttctctaaagactatattgacatatgctgaagaagatctggaattgagggaaacaacatttcctgatcaggtccaggatctggttttcaatctccatatgattctttctgatactgtgaaaatgaaggaacaccaggaggatcctgaaatgttgattgatctaatgtacagaattgccaagggttaccagacctctccagatctgcgattgacctggttgcagaacatggcaggcaagcactcagaacgaagcaatcatgctgaagctgcacagtgtctagtccactcagcagcacttgttgctgaatatttgagcatgctggaggaccggaaatatcttcctgtgggatgtgtaacatttcagaatatttcatctaatgttttagaagaatctgcggtctcagatgatgtggtatctccagatgaagaaggtatctgctctggaaaatactttactgagtcaggacttgtgggattactggaacaagcagctgcttccttctctatggctggcatgtatgaagcagttaatgaagtttacaaagtacttattcctattcatgaagctaatcgggatgcaaagaaactatccacaattcatggtaaacttcaagaagcattcagcaaaattgttcatcagagtactggctgggagcggatgtttggcacctattttcgtgttggtttttatggaaccaagttcggggatttggatgaacaagaatttgtttacaaggagcctgcaataaccaaacttgcagagatatctcacagattggagggattttacggagaaagatttggagaggatgtggttgaagtaatcaaagactctaatcctgtagacaagtgtaaattagatcctaacaaggcatatattcagattacctatgtggagccatactttgacacatatgagatgaaggacagaatcacctatttcgacaaaaattacaatcttcgtcgattcatgtactgtacaccctttactttagatggccgtgcccatggggaacttcatgaacaattcaaaaggaagaccattctgactacgtctcatgcctttccttatattaaaacaagggtcaatgtcactcataaagaagagatcatcttaacaccaattgaagttgctattgaggacatgcagaaaaagacacaggagttggcatttgcaacacatcaggatcccgcagaccccaaaatgcttcagatggtactccagggatctgtaggcaccacagtgaatcaggggcctttggaagttgcccaggtttttctgtctgaaatacctagtgacccaaagctcttcagacatcataataaactgcgactctgctttaaagattttactaaaaggtgtgaagatgccttaagaaaaaataagagcttaattgggccggatcaaaaggagtatcaaagggaactggagagaaactatcatcgccttaaagaggccctacagccactgatcaacagaaagatccctcagttatacaaggcagtattgcctgtcacctgccacagagattccttcagtcgaatgagccttcgcaaaatggatctctaaactgaatgcacttgttttattcatctgcaaagagccatgtattcaacatcgagtgtgaaaagatctattggaaaacaacatggaatggaattctggaaattattattcattgaagaatgcagtggccaagaaaatatcaaatgtagattgttaacgcttgagaatcatggctatggtttctaatgttctggtaacaagctgttatcttttaagacattttaatgactcaaaggtacactatacatttaccattatttataccatagctaaggttaaaaatttattcactttaagttcgtattttttaatttatattaccatttatagattcattttggaaccattttaaatgtagtaatgcttattttaaaggtactattaaatatgtgaatgtttacact

SEQ ID NO: 54002 - DNA, 921 bp, Homo sapiens
tcttcattcttgtgttttggtgcgtatttgaagttttcaatttaaaaagtatttaggaagattggggaacccatgcctggatcaaaccagtgtacacatttgtatatacaataagatacatgcatatatataaccttatctaaaaattccattgcttttactaaatggtattatactcagtgtattaaatggtaattggggatggagattggtagcatttagggacagtacatatgactagaatgttttcttcccctcttcttagtataatgatcttaggtgacctggaaagtatcttaccttatttgatagtcttccatactgttagaaaacaggtaatggatgttatcaggtaattgctgataaatgtttgaaaattagttttttgtaaggacttagtgtatcatggtacagctagagtgtggaacctattttttatttcacccttagtagctttgcattttgtatggaaatgtttaatagtagttgctatacattttttaacatcaaagaaatagttcatgattatggtaagtactttggaagatatccttttcagtatctttttaaatgctaaaatacctctttttcaaaggcattttaaatagaagaaggagaagaaggctctatgctcatcgtgataaagtggagtttttaggaaagtaagctttaagctgcttttaccagttgaactccaaaaataatgtaggagagagatggctttctttgtttttgtttcagtggcggggcaaggtagaagaaggtggctttttaaattatttaggtgttacgttgttttaactaattttgagcacttggtagacagaggagaacaaaatgtacattaaagttcacctgtcaaattttcatttgtagagggaaggatggaggttctaaataccagcaatcttaaaaaaaaaa

SEQ ID NO: 54003 - DNA, 401 bp, Homo sapiens
tcttcattcttgtgttttggtgcgtatttgaagttttcaatttaaaaagtatttaggaagattggggaacccatgcctggatcaaaccagtgtacacatttgtatatacaataagatacatgcatatatataaccttatctaaaaattccattgcttttactaaatggtattatactcagtgtattaaatggtaattggggatggagattggtagcatttagggacagtacatatgactagaatgttttcttcccctcttcttagtataatgatcttaggtgacctggaaagtatcttaccttattttcaaacatttatcagcaattacctgataacatccattacctgttttctaacagtatggaagactatcaaataaggtaaggtcgacgcggccggc

SEQ ID NO: 54004 - DNA, 1529 bp, Homo sapiens
aagccgatcaatcccggaggcgtgggggcggagggacgacccgccggggctttcccgggcgctgctctcctcctgctgccccctcgctaggacccggcggacgcctcgtctggttttcacgccctctagcccctacccccacacccccaaaacagaacagacccccatccctgggctggaggacccgcctcttggcagccagctgagaaggcgccccggggagggggaaactgacatcccatctagagccgtccctcctcttcctcccctcccgactctctgctcctttcccgccccagaagttcaagggcccccggcctcctgcgctcctgccgccgggaccctcgacctcctcagagcagccggctgccgccccgggaagatggcgaggaggagccgccaccgcctcctcctgctgctgctgcgctacctggtggtcgccctgggctatcataaggcctatgggttttctgccccaaaagaccaacaagtagtcacagcagtagagtaccaagaggctattttagcctgcaaaaccccaaagaagactgtttcctccagattagagtggaagaaactgggtcggagtgtctcctttgtctactatcaacagactcttcaaggtgattttaaaaatcgagctgagatgatagatttcaatatccggatcaaaaatgtgacaagaagtgatgcggggaaatatcgttgtgaagttagtgccccatctgagcaaggccaaaacctggaagaggatacagtcactctggaagtattagtggctccagcagttccatcatgtgaagtaccctcttctgctctgagtggaactgtggtagagctacgatgtcaagacaaagaagggaatccagctcctgaatacacatggtttaaggatggcatccgtttgctagaaaatcccagacttggctcccaaagcaccaacagctcatacacaatgaatacaaaaactggaactctgcaatttaatactgtttccaaactggacactggagaatattcctgtgaagcccgcaattctgttggatatcgcaggtgtcctgggaaacgaatgcaagtagatgatctcaacataagtggcatcatagcagccgtagtagttgtggccttagtgatttccgtttgtggccttggtgtatgctatgctcagaggaaaggctacttttcaaaagaaacctccttccagaagagtaattcttcatctaaagccacgacaatgagtgaaaatgatttcaagcacacaaaatcctttataatttaaagactccactttagagatacaccaaagccaccgttgttacacaagttattaaactattataaaactctgctttgtccgacatttgcaaagaggtacacgaggaaatggaattggtatttcattttaattttcatgactactaactcacctgaacttgctattttaaacaaatagttctgtcgacacctaaaatataatctggcttcttgtgtctggactaagttaaaagaattaaaatactttgtaatgt

SEQ ID NO: 54005 - DNA, 588 bp, Homo sapiens
tttaggctttaaacttgagtttattaaaagggaaataaatgctttggttactaaatgaactgattagaggaaggtattacacagaaagctacttggattattactaacatcaatgtcttctttttctaaaaggtgattttaaaaatcgagctgagatgatagatttcaatatccggatcaaaaatgtgacaagaagtgatgcggggaaatatcgttgtgaagttagtgccccatctgagcaaggccaaaacctggaagaggatacagtcactctggaagtattaggtgatgtgcatgtatgtgtgtgactacgtctcccactccttctccaccacccagccctgggggcaagcaagcactggtccataaacatgccagcatcaactgggagcctcaaccagtcaagttacagagaccataagcatcaccttcctggcaatctcctggccatttctccccctctcctcattggctgctgaaattttagtaatgcgttatcacaaagtatctctttgttaaaggtggaggcaattcctaatgatcctacaatatacataggagtatctttcctgagagtttatttttcaa

SEQ ID NO: 54006 - DNA, 417 bp, Homo sapiens
atgtatggaagtaaaattaactaaaagagcatatatgttccagattggaagtgataatgtagtaaatattgtcttttatattccacaaacagaagagtaattcttcatctaaagccacgacaatgagtgaaaatgatttcaagcacacaaaatcctttataatttaaagactccactttagagatacaccaaagccaccgttgttacacaagttattaaactattataaaactctgctttgtccgacatttgcaaagaggtacacgaggaaatggaattggtatttcattttaattttcatgactactaactcacctgaacttgctattttaaacaaatagttctgtcgacacctaaaatataatctggcttcttgtgtctggactaagttaaaagaattaaaatactttgtaatgt

SEQ ID NO: 54007 - DNA, 2160 bp, Homo sapiens
aagccgatcaatcccggaggcgtgggggcggagggacgacccgccggggctttcccgggcgctgctctcctcctgctgccccctcgctaggacccggcggacgcctcgtctggttttcacgccctctagcccctacccccacacccccaaaacagaacagacccccatccctgggctggaggacccgcctcttggcagccagctgagaaggcgccccggggagggggaaactgacatcccatctagagccgtccctcctcttcctcccctcccgactctctgctcctttcccgccccagaagttcaagggcccccggcctcctgcgctcctgccgccgggaccctcgacctcctcagagcagccggctgccgccccgggaagatggcgaggaggagccgccaccgcctcctcctgctgctgctgcgctacctggtggtcgccctgggctatcataaggcctatgggttttctgccccaaaagaccaacaagtagtcacagcagtagagtaccaagaggctattttagcctgcaaaaccccaaagaagactgtttcctccagattagagtggaagaaactgggtcggagtgtctcctttgtctactatcaacagactcttcaaggtgattttaaaaatcgagctgagatgatagatttcaatatccggatcaaaaatgtgacaagaagtgatgcggggaaatatcgttgtgaagttagtgccccatctgagcaaggccaaaacctggaagaggatacagtcactctggaagtattagtggctccagcagttccatcatgtgaagtaccctcttctgctctgagtggaactgtggtagagctacgatgtcaagacaaagaagggaatccagctcctgaatacacatggtttaaggatggcatccgtttgctagaaaatcccagacttggctcccaaagcaccaacagctcatacacaatgaatacaaaaactggaactctgcaatttaatactgtttccaaactggacactggagaatattcctgtgaagcccgcaattctgttggatatcgcaggtgtcctgggaaacgaatgcaagtagatgatctcaacataagtggcatcatagcagccgtagtagttgtggccttagtgatttccgtttgtggccttggtgtatgctatgctcagaggaaaggctacttttcaaaagaaacctccttccagaagagtaattcttcatctaaagccacgacaatgagtgaaaatgatttcaagcacacaaaatcctttataatttaaagactccactttagagatacaccaaagccaccgttgttacacaagttattaaactattataaaactctgctttgtccgacatttgcaaagaggtacacgaggaaatggaattggtatttcattttaattttcatgactactaactcacctgaacttgctattttaaacaaatagttctgtcgacacctaaaatataatctggcttcttgtgtctggactaagttaaaagaattaaaatactttgtaatgtcctgggctttgggaaatgttaaccacgtcctaacttctagagaacgttactaaaatataacatactgattgtgaagtcaatccacaggtcatgaaaatataaatcagactctgcacgagagtctgatttagggggtccaacaaatactctgacagatgcaaaaggaacctctggtctcatttctgccagaatcctcttttctcccctaatatcatccttattctgatgctcgttcatcactaacacacccacagaaaggaggaagcgggatgggtcttatgcccaaggatttgcactttgtgtttacttccattcctgggaactaaaagcaacatcaaaagaaatgcctaatggctggagcccacaggtgtgcaccacaggatttgcctggtgtgtgtcactgatttcttcattaaacgtaatttagatggtcaaacacaaacccaagtggcttatttcacccctactgctgcttgccactgcttccttcttgtaagatttctttgaagaggatcagtgactttgacatcagaactcaccactggagcctacacaagtttgcagatacctttccctgcaggagtggtgacttcacatctttctgtctctaaaaatggtgcagtgacattcc

SEQ ID NO: 54008 - DNA, 1552 bp, Homo sapiens
caggattacctcttcacttgtgttgcggagacagtacggatgtcagaggggtgccttgggcaactctgggactcagaagtgatgcggggaaatatcgttgtgaagttagtgccccatctgagcaaggccaaaacctggaagaggatacagtcactctggaagtattagtggctccagcagttccatcatgtgaagtaccctcttctgctctgagtggaactgtggtagagctacgatgtcaagacaaagaagggaatccagctcctgaatacacatggtttaaggatggcatccgtttgctagaaaatcccagacttggctcccaaagcaccaacagctcatacacaatgaatacaaaaactggaactctgcaatttaatactgtttccaaactggacactggagaatattcctgtgaagcccgcaattctgttggatatcgcaggtgtcctgggaaacgaatgcaagtagatgatctcaacataagtggcatcatagcagccgtagtagttgtggccttagtgatttccgtttgtggccttggtgtatgctatgctcagaggaaaggctacttttcaaaagaaacctccttccagaagagtaattcttcatctaaagccacgacaatgagtgaaaatgatttcaagcacacaaaatcctttataatttaaagactccactttagagatacaccaaagccaccgttgttacacaagttattaaactattataaaactctgctttgtccgacatttgcaaagaggtacacgaggaaatggaattggtatttcattttaattttcatgactactaactcacctgaacttgctattttaaacaaatagttctgtcgacacctaaaatataatctggcttcttgtgtctggactaagttaaaagaattaaaatactttgtaatgtcctgggctttgggaaatgttaaccacgtcctaacttctagagaacgttactaaaatataacatactgattgtgaagtcaatccacaggtcatgaaaatataaatcagactctgcacgagagtctgatttagggggtccaacaaatactctgacagatgcaaaaggaacctctggtctcatttctgccagaatcctcttttctcccctaatatcatccttattctgatgctcgttcatcactaacacacccacagaaaggaggaagcgggatgggtcttatgcccaaggatttgcactttgtgtttacttccattcctgggaactaaaagcaacatcaaaagaaatgcctaatggctggagcccacaggtgtgcaccacaggatttgcctggtgtgtgtcactgatttcttcattaaacgtaatttagatggtcaaacacaaacccaagtggcttatttcacccctactgctgcttgccactgcttccttcttgtaagatttctttgaagaggatcagtgactttgacatcagaactcaccactggagcctacacaagtttgcagatacctttccctgcaggagtggtgacttcacatctttctgtctctaaaaatggtgcagtgacattcc

SEQ ID NO: 54009 - DNA, 1896 bp, Homo sapiens
aagccgatcaatcccggaggcgtgggggcggagggacgacccgccggggctttcccgggcgctgctctcctcctgctgccccctcgctaggacccggcggacgcctcgtctggttttcacgccctctagcccctacccccacacccccaaaacagaacagacccccatccctgggctggaggacccgcctcttggcagccagctgagaaggcgccccggggagggggaaactgacatcccatctagagccgtccctcctcttcctcccctcccgactctctgctcctttcccgccccagaagttcaagggcccccggcctcctgcgctcctgccgccgggaccctcgacctcctcagagcagccggctgccgccccgggaagatggcgaggaggagccgccaccgcctcctcctgctgctgctgcgctacctggtggtcgccctgggctatcataaggcctatgggttttctgccccaaaagaccaacaagtagtcacagcagtagagtaccaagaggctattttagcctgcaaaaccccaaagaagactgtttcctccagattagagtggaagaaactgggtcggagtgtctcctttgtctactatcaacagactcttcaaggtgattttaaaaatcgagctgagatgatagatttcaatatccggatcaaaaatgtgacaagaagtgatgcggggaaatatcgttgtgaagttagtgccccatctgagcaaggccaaaacctggaagaggatacagtcactctggaagtattagtggctccagcagttccatcatgtgaagtaccctcttctgctctgagtggaactgtggtagagctacgatgtcaagacaaagaagggaatccagctcctgaatacacatggtttaaggatggcatccgtttgctagaaaatcccagacttggctcccaaagcaccaacagctcatacacaatgaatacaaaaactggaactctgcaatttaatactgtttccaaactggacactggagaatattcctgtgaagcccgcaattctgttggatatcgcaggtgtcctgggaaacgaatgcaagtagatgatctcaacataagtggcatcatagcagccgtagtagttgtggccttagtgatttccgtttgtggccttggtgtatgctatgctcagaggaaaggctacttttcaaaagaaacctccttccagtaagtatactttcctacaatgcatgtctttctcctatgtcaactaattttctattaatcatctgtttaaagtcaaaagagagaagttgggttatttgtgtaggtttactctcacaagaagttactcaagtttatcaagaaatacatctgtattaggctgttcttgcattgctgtaagaaaatacccgagactgggtagtttattgtaaaaagaggtttaattggctcacggttctgcaagctgtacaatcctggcaccaacactgcttggcttttggggaggcctcaggaagctttttactcatggctgaaggcaaagcgggagcaggcacgtcacatggcaaaagcaggagcaaggttggggaggtgccacatacttttaaacaaccagatttcaagaaaactcagtcactattctgaggacagcatcaagggggcggtactaaaccattcatgagaaatccgcccccatgatttaatcggctccaacaaaccccacctccaacattggggattacaattcaacataagatttgggcaaggcaaatatccagactctatcaacatcccacttcacacttcatacctacttgtaaatggtagtacagagagaatgatgattacccagcctacttgtaaatggtagtacagagagaatgatgattacccagacaagaaatatggtcactaatt

SEQ ID NO: 54010 - DNA, 1385 bp, Homo sapiens
gtttgggagtggtgatgggaataagtggagaggttggagtgtttggaattttaatatttgatatgcttatttgattccaagtagaggttatcagtaactgaatattcaaaatctagagtttggggaaataactggaaatggaattgtaggagtcattggtacatgaaatatgggtgagctccccaacgccctgtagtttgtgtgtacttgttttatgactgtccttcttgtatgtacagatctggcagacctaactttggctctatgggcgtagagagaagatggatgacaaactatctgaggctatggcagctgggagtggagaagatatactgaagccatggcttcagacagtttgtcatctcctaattcctttgaagaatcatctgccattgacttcctgttcccagatttctggctcaatcctggaagagtaattcttcatctaaagccacgacaatgagtgaaaatgatttcaagcacacaaaatcctttataatttaaagactccactttagagatacaccaaagccaccgttgttacacaagttattaaactattataaaactctgctttgtccgacatttgcaaagaggtacacgaggaaatggaattggtatttcattttaattttcatgactactaactcacctgaacttgctattttaaacaaatagttctgtcgacacctaaaatataatctggcttcttgtgtctggactaagttaaaagaattaaaatactttgtaatgtcctgggctttgggaaatgttaaccacgtcctaacttctagagaacgttactaaaatataacatactgattgtgaagtcaatccacaggtcatgaaaatataaatcagactctgcacgagagtctgatttagggggtccaacaaatactctgacagatgcaaaaggaacctctggtctcatttctgccagaatcctcttttctcccctaatatcatccttattctgatgctcgttcatcactaacacacccacagaaaggaggaagcgggatgggtcttatgcccaaggatttgcactttgtgtttacttccattcctgggaactaaaagcaacatcaaaagaaatgcctaatggctggagcccacaggtgtgcaccacaggatttgcctggtgtgtgtcactgatttcttcattaaacgtaatttagatggtcaaacacaaacccaagtggcttatttcacccctactgctgcttgccactgcttccttcttgtaagatttctttgaagaggatcagtgactttgacatcagaactcaccactggagcctacacaagtttgcagatacctttccctgcaggagtggtgacttcacatctttctgtctctaaaaatggtgcagtgacattcc

SEQ ID NO: 54011 - DNA, 2043 bp, Homo sapiens
accggggggcgtcaggcctcgctggggattcagtggctgagaccccgagactcggagccggggcgcgttacctgtgctcgatacctgggcgcggtcacctacccagaggtgcagggcccccagggcggtcggcctgccgcccaccacgtaggctctgcagggaaacagagttccacaggcgtcgttgccctccgccttcagccctccgcgggttcgatcccggccacccaggtggaagtgccgcctaaggtacaaatatgaccctgcgccacgatagatcgaccgtctccttggcccaaatgttacactcacaaccactgcgccaggaaagtatcataaggcctatgggttttctgccccaaaagaccaacaagtagtcacagcagtagagtaccaagaggctattttagcctgcaaaaccccaaagaagactgtttcctccagattagagtggaagaaactgggtcggagtgtctcctttgtctactatcaacagactcttcaaggtgattttaaaaatcgagctgagatgatagatttcaatatccggatcaaaaatgtgacaagaagtgatgcggggaaatatcgttgtgaagttagtgccccatctgagcaaggccaaaacctggaagaggatacagtcactctggaagtattagtggctccagcagttccatcatgtgaagtaccctcttctgctctgagtggaactgtggtagagctacgatgtcaagacaaagaagggaatccagctcctgaatacacatggtttaaggatggcatccgtttgctagaaaatcccagacttggctcccaaagcaccaacagctcatacacaatgaatacaaaaactggaactctgcaatttaatactgtttccaaactggacactggagaatattcctgtgaagcccgcaattctgttggatatcgcaggtgtcctgggaaacgaatgcaagtagatgatctcaacataagtggcatcatagcagccgtagtagttgtggccttagtgatttccgtttgtggccttggtgtatgctatgctcagaggaaaggctacttttcaaaagaaacctccttccagaagagtaattcttcatctaaagccacgacaatgagtgaaaatgatttcaagcacacaaaatcctttataatttaaagactccactttagagatacaccaaagccaccgttgttacacaagttattaaactattataaaactctgctttgtccgacatttgcaaagaggtacacgaggaaatggaattggtatttcattttaattttcatgactactaactcacctgaacttgctattttaaacaaatagttctgtcgacacctaaaatataatctggcttcttgtgtctggactaagttaaaagaattaaaatactttgtaatgtcctgggctttgggaaatgttaaccacgtcctaacttctagagaacgttactaaaatataacatactgattgtgaagtcaatccacaggtcatgaaaatataaatcagactctgcacgagagtctgatttagggggtccaacaaatactctgacagatgcaaaaggaacctctggtctcatttctgccagaatcctcttttctcccctaatatcatccttattctgatgctcgttcatcactaacacacccacagaaaggaggaagcgggatgggtcttatgcccaaggatttgcactttgtgtttacttccattcctgggaactaaaagcaacatcaaaagaaatgcctaatggctggagcccacaggtgtgcaccacaggatttgcctggtgtgtgtcactgatttcttcattaaacgtaatttagatggtcaaacacaaacccaagtggcttatttcacccctactgctgcttgccactgcttccttcttgtaagatttctttgaagaggatcagtgactttgacatcagaactcaccactggagcctacacaagtttgcagatacctttccctgcaggagtggtgacttcacatctttctgtctctaaaaatggtgcagtgacattcc

SEQ ID NO: 54012 - DNA, 2117 bp, Homo sapiens
aagccgatcaatcccggaggcgtgggggcggagggacgacccgccggggctttcccgggcgctgctctcctcctgctgccccctcgctaggacccggcggacgcctcgtctggttttcacgccctctagcccctacccccacacccccaaaacagaacagacccccatccctgggctggaggacccgcctcttggcagccagctgagaaggcgccccggggagggggaaactgacatcccatctagagccgtccctcctcttcctcccctcccgactctctgctcctttcccgccccagaagttcaagggcccccggcctcctgcgctcctgccgccgggaccctcgacctcctcagagcagccggctgccgccccgggaagatggcgaggaggagccgccaccgcctcctcctgctgctgctgcgctacctggtggtcgccctgggctatcataaggcctatgggttttctgccccaaaagaccaacaagtagtcacagcagtagagtaccaagaggctattttagcctgcaaaaccccaaagaagactgtttcctccagattagagtggaagaaactgggtcggagtgtctcctttgtctactatcaacagactcttcaaggtgattttaaaaatcgagctgagatgatagatttcaatatccggatcaaaaatgtgacaagaagtgatgcggggaaatatcgttgtgaagttagtgccccatctgagcaaggccaaaacctggaagaggatacagtcactctggaagtattagtggctccagcagttccatcatgtgaagtaccctcttctgctctgagtggaactgtggtagagctacgatgtcaagacaaagaagggaatccagctcctgaatacacatggtttaaggatggcatccgtttgctagaaaatcccagacttggctcccaaagcaccaacagctcatacacaatgaatacaaaaactggaactctgcaatttaatactgtttccaaactggacactggagaatattcctgtgaagcccgcaattctgttggatatcgcaggtgtcctgggaaacgaatgcaagtagatgatctcaacataagtggcatcatagcagccgtttgtggccttggtgtatgctatgctcagaggaaaggctacttttcaagaagagtaattcttcatctaaagccacgacaatgagtgaaaatgatttcaagcacacaaaatcctttataatttaaagactccactttagagatacaccaaagccaccgttgttacacaagttattaaactattataaaactctgctttgtccgacatttgcaaagaggtacacgaggaaatggaattggtatttcattttaattttcatgactactaactcacctgaacttgctattttaaacaaatagttctgtcgacacctaaaatataatctggcttcttgtgtctggactaagttaaaagaattaaaatactttgtaatgtcctgggctttgggaaatgttaaccacgtcctaacttctagagaacgttactaaaatataacatactgattgtgaagtcaatccacaggtcatgaaaatataaatcagactctgcacgagagtctgatttagggggtccaacaaatactctgacagatgcaaaaggaacctctggtctcatttctgccagaatcctcttttctcccctaatatcatccttattctgatgctcgttcatcactaacacacccacagaaaggaggaagcgggatgggtcttatgcccaaggatttgcactttgtgtttacttccattcctgggaactaaaagcaacatcaaaagaaatgcctaatggctggagcccacaggtgtgcaccacaggatttgcctggtgtgtgtcactgatttcttcattaaacgtaatttagatggtcaaacacaaacccaagtggcttatttcacccctactgctgcttgccactgcttccttcttgtaagatttctttgaagaggatcagtgactttgacatcagaactcaccactggagcctacacaagtttgcagatacctttccctgcaggagtggtgacttcacatctttctgtctctaaaaatggtgcagtgacattcc

SEQ ID NO: 54013 - DNA, 1079 bp, Homo sapiens
aagccgatcaatcccggaggcgtgggggcggagggacgacccgccggggctttcccgggcgctgctctcctcctgctgccccctcgctaggacccggcggacgcctcgtctggttttcacgccctctagcccctacccccacacccccaaaacagaacagacccccatccctgggctggaggacccgcctcttggcagccagctgagaaggcgccccggggagggggaaactgacatcccatctagagccgtccctcctcttcctcccctcccgactctctgctcctttcccgccccagaagttcaagggcccccggcctcctgcgctcctgccgccgggaccctcgacctcctcagagcagccggctgccgccccgggaagatggcgaggaggagccgccaccgcctcctcctgctgctgctgcgctacctggtggtcgccctgggctatcataaggcctatgggttttctgccccaaaagaccaacaagtagtcacagcagtagagtaccaagaggctattttagcctgcaaaaccccaaagaagactgtttcctccagattagagtggaagaaactgggtcggagtgtctcctttgtctactatcaacagactcttcaaggtgattttaaaaatcgagctgagatgatagatttcaatatccggatcaaaaatgtgacaagaagtgatgcggggaaatatcgttgtgaagttagtgccccatctgagcaaggccaaaacctggaagaggatacagtcactctggaagtattaggtgatgtgcatgtatgtgtgtgactacgtctcccactccttctccaccacccagccctgggggcaagcaagcactggtccataaacatgccagcatcaactgggagcctcaaccagtcaagttacagagaccataagcatcaccttcctggcaatctcctggccatttctccccctctcctcattggctgctgaaattttagtaatgcgttatcacaaagtatctctttgttaaaggtggaggcaattcctaatgatcctacaatatacataggagtatctttcctgagagtttatttttcaa

SEQ ID NO: 54014 - DNA, 316 bp, Homo sapiens
gtgaactcagccccttctctgattctgcatcccacaggcagagcttggtgggggcaatgatgacagacactagctgccacactcacaggcacacacacggtatccacacagcagtgcacacatgtaaacagcagtgtacatgcacacaagcacgtgcacataactttaagctcacatgtgggtacacaacacagtccatacacatagaagtccacatgcacagcacacacacgcatagcacactcatgcccacaggggtgcatgttcacacacacacacacagccctgccatctctctgcatccgtccagaactcg

SEQ ID NO: 54015 - DNA, 711 bp, Homo sapiens
gggaggtgggagggccgcggagatatcttccctttgtacagggcattcgtgttgtgaacccagagctgggtagaagctgcttttgtattcagtgtgaggtggtgtttacagacgactttgacaacagtagaagtgtactcagtggtgtctgtgtatctgaactatttaatttcgtgttatgtttatatgcagaaatatttatggatactacaccaagtgtttatttaatgttgataaatatgactcttcagtcgtcagccatggtgtcctttcaaagtgattctttaaggtccacttgagcaatgaatagagtatattggagctttcctgtggctaagaagaagaaacatgtcatcctgttggcatcaccaagcacctaactctttctaggtaataaaaagtcaacggtcacttcaacgtaaatgtttaaaaccactctttagttaaatctgatgggaactgaacaaagctccaccattgtgtctgaaatcattttacacagggaaaaaaaaaaacaatcagcataattgtaagaatgatttttttgggcccacattcaaccaaagaacaagaaagaaacagacgattttctaatatgtacacagcaaactacagaatgtcatattatccacctgtgaaacatctagtaagcaattgcatctatattttatttctcaagttggcctggcactaataaatatgtgaaagctt

SEQ ID NO: 54016 - DNA, 583 bp, Homo sapiens
tttttttttatcttgaaaagtaatacagtgagtgcgagtattatttcttgccagcgggtggaagatgaatgattttgtcacagttttactgcttgatgagcagtgtcctgagggtcaggcttaagtctgtgtcactatgctgctcattactcttgagctaaataagggctgattggatctaaattgcctagcacatgggccacagatgagctcagtgagcaggggatgacctgctattcagtctgggagtaaccccggtgtgcaaatgcagcattagaacactgtgggagaatgagaggctaccggctgctgccagcaaaagaaatcgaaatgtaaaaactctttgatgctgtgatgttagaatttgaaatgtaggaagtgacaggttgatggtacttatcagctttggctggattagagaacagtgtcatcttgcttatataatgacagaagaatgaagtcagcagctaactactgtgcagagcagagccgctgctgttgccacagccagtcattgctgcctcctactggcagttttcctggaaactagtaaaatattataaagaaaaaatcctccttgttg

SEQ ID NO: 54017 - DNA, 484 bp, Homo sapiens
agagtttaattctcaaaataaggtactttatgttaacatgaagaagtttagcaacaatttcattatctggaaagactgaattatataaagtatgtggaatgagggtaaaaaagagcttaaagaaaatagctccctctttgattttggtatttcctagccaagtactttgccaccttacctgtttttactatctatctggcattttgatgaacttttccccagctaaatcgacgaatcggctctcatgttgcatcccagtgtagcgtggtgttgcctgctgctctggagtcctttgtgactcacccctggtgattaggggtccacattggtgggtcaaggtgtgtattggatggggaacactggggaagaaaactaacttttcacctgttactctttctttctgttctcttagactacatgtttatataaagtgtttgaattttagaatgtaaaaaactcaattgacttaacaaaatctgtctgg

SEQ ID NO: 54018 - DNA, 758 bp, Homo sapiens
agctggcgagtgtaccctttctgcagaaagtaaaaatgcccttgctgaggaaattaaatttatgttcaagtaaatttctttatggcactgggaaacaagcatttctaacaatttggtggaaatccgtacatggatacgttctcttctgggggcggtctccagtcctttctcatgagggagcacactcctctgcctcattgcagtggcctcagggatatggaattaagatccacctggtgtgatgaataaacccagactctcagcaacgcaggaaaaaaaaaacaaaaacgggctggcgatctggagtaaaggatcctcacatccacgtgaaccaggaaactctgtgcccaaatcgacgaaaaaaaaacactgggagagccgaactaaaagtcttttagcacgggtaccagccctagaatttccagtacaccagcagcagcctggaaaccacatcctcatcaaaagacagaaagaaaaaaactcgagccagcctgagaaggaccctattttatgctgttaacccactgagactgccatcctcacagctgagaaaggatggacccaccatactcaagtcaagaaaacatcttccctcgtcagaatcatgggttactgtactaggattaagccttactaagttaaagttaaagaaagcttaattttcatataccttctatatggcttcttttcctttccttattctgttactagctcctttgttattaatgtaactaagtctgagtcacctcagaccattg

SEQ ID NO: 54019 - DNA, 613 bp, Homo sapiens
ctctgcgctctcatgataggtgtcctgggatgattacccttaacctaccaaaggaactatgttctccaattagaattggttttatttagagtaaaggaatgattttggtgacagcaacatcaaagaatggatctgcagcaaagtcatgaggatctgataagctttatgattgattaacaacaggttaaaatcaaagaacagatttcatgtgtactgtgtttttagatgtatagagcaacttagctgaaaaattacccagaacttttattctataggttttcaggtttcagttttaatttaacatatatacattgatttagtcatgtatcattcagacattattgaacacctattgtgcagatattaggcttaggcttataactggcaaatctctacttcctgtctcctttcctcctggatacatcatagatagagatgctgcagcctgaaactccagattatatcattttccaccactgattttgcagaggtaatgcatgctccttattctgccgaagcaactagttgagagagatataaatactgctcagctgatcagctgtatcagtgctattaccaaacagaatccagagctgatgagtgttctgttatt

SEQ ID NO: 54020 - DNA, 1961 bp, Homo sapiens
gaaagcgagggagggaaagaggaggaaggaagatgcgagaaggcagaggaggagggagggagggaaggagcgcggagcccggcccggaagctaggtgagtgtggcatccgagctgagggacgcgagcctgagacgccgctgctgctccggctgagtatctagcttgtctccccgatgggattcccgtccaagctatctcgagcctgcagcgccacagtccccggccctcgcccaggttcactgcaaccgttcagaggtccccaggagctgctgctggcgagcccgctactgcagggacctatggagccattccgtagtgccatcccgagcaacgcactgctgcagcttccctgagcctttccagcaagtttgttcaagattggctgtcaagaatcatggactgttattatatgccttgttttctgtcaagacaccatgattcctggtaaccgaatgctgatggtcgttttattatgccaagtcctgctaggaggcgcgagccatgctagtttgatacctgagacggggaagaaaaaagtcgccgagattcagggccacgcgggaggacgccgctcagggcagagccatgagctcctgcgggacttcgaggcgacacttctgcagatgtttgggctgcgccgccgcccgcagcctagcaagagtgccgtcattccggactacatgcgggatctttaccggcttcagtctggggaggaggaggaagagcagatccacagcactggtcttgagtatcctgagcgcccggccagccgggccaacaccgtgaggagcttccaccacgaagaacatctggagaacatcccagggaccagtgaaaactctgcttttcgtttcctctttaacctcagcagcatccctgagaacgaggtgatctcctctgcagagcttcggctcttccgggagcaggtggaccagggccctgattgggaaaggggcttccaccgtataaacatttatgaggttatgaagcccccagcagaagtggtgcctgggcacctcatcacacgactactggacacgagactggtccaccacaatgtgacacggtgggaaacttttgatgtgagccctgcggtccttcgctggacccgggagaagcagccaaactatgggctagccattgaggtgactcacctccatcagactcggacccaccagggccagcatgtcaggattagccgatcgttacctcaagggagtgggaattgggcccagctccggcccctcctggtcacctttggccatgatggccggggccatgccttgacccgacgccggagggccaagcgtagccctaagcatcactcacagcgggccaggaagaagaataagaactgccggcgccactcgctctatgtggacttcagcgatgtgggctggaatgactggattgtggccccaccaggctaccaggccttctactgccatggggactgcccctttccactggctgaccacctcaactcaaccaaccatgccattgtgcagaccctggtcaattctgtcaattccagtatccccaaagcctgttgtgtgcccactgaactgagtgccatctccatgctgtacctggatgagtatgataaggtggtactgaaaaattatcaggagatggtagtagagggatgtgggtgccgctgagatcaggcagtccttgaggatagacagatatacacaccacacacacacaccacatacaccacacacacacgttcccatccactcacccacacactacacagactgcttccttatagctggacttttatttaaaaaaaaaaaaaaaaaaatggaaaaaatccctaaacattcaccttgaccttatttatgactttacgtgcaaatgttttgaccatattgatcatatattttgacaaaatatatttataactacgtattaaaagaaaaaaataaaatgagtcattattttaaaggtaaat

SEQ ID NO: 54021 - DNA, 1608 bp, Homo sapiens
gaggcactgcttggaagcaattgtagagcaatacagctcttgacaaactcgtgtcgaacatcagtgactgttgaagggaatgaggcaaacatatctacgaatgctgatggtcgttttattatgccaagtcctgctaggaggcgcgagccatgctagtttgatacctgagacggggaagaaaaaagtcgccgagattcagggccacgcgggaggacgccgctcagggcagagccatgagctcctgcgggacttcgaggcgacacttctgcagatgtttgggctgcgccgccgcccgcagcctagcaagagtgccgtcattccggactacatgcgggatctttaccggcttcagtctggggaggaggaggaagagcagatccacagcactggtcttgagtatcctgagcgcccggccagccgggccaacaccgtgaggagcttccaccacgaagaacatctggagaacatcccagggaccagtgaaaactctgcttttcgtttcctctttaacctcagcagcatccctgagaacgaggtgatctcctctgcagagcttcggctcttccgggagcaggtggaccagggccctgattgggaaaggggcttccaccgtataaacatttatgaggttatgaagcccccagcagaagtggtgcctgggcacctcatcacacgactactggacacgagactggtccaccacaatgtgacacggtgggaaacttttgatgtgagccctgcggtccttcgctggacccgggagaagcagccaaactatgggctagccattgaggtgactcacctccatcagactcggacccaccagggccagcatgtcaggattagccgatcgttacctcaagggagtgggaattgggcccagctccggcccctcctggtcacctttggccatgatggccggggccatgccttgacccgacgccggagggccaagcgtagccctaagcatcactcacagcgggccaggaagaagaataagaactgccggcgccactcgctctatgtggacttcagcgatgtgggctggaatgactggattgtggccccaccaggctaccaggccttctactgccatggggactgcccctttccactggctgaccacctcaactcaaccaaccatgccattgtgcagaccctggtcaattctgtcaattccagtatccccaaagcctgttgtgtgcccactgaactgagtgccatctccatgctgtacctggatgagtatgataaggtggtactgaaaaattatcaggagatggtagtagagggatgtgggtgccgctgagatcaggcagtccttgaggatagacagatatacacaccacacacacacaccacatacaccacacacacacgttcccatccactcacccacacactacacagactgcttccttatagctggacttttatttaaaaaaaaaaaaaaaaaaatggaaaaaatccctaaacattcaccttgaccttatttatgactttacgtgcaaatgttttgaccatattgatcatatattttgacaaaatatatttataactacgtattaaaagaaaaaaataaaatgagtcattattttaaaggtaaat

SEQ ID NO: 54022 - DNA, 1716 bp, Homo sapiens
ggacgcgtgggtcgacccacgcgtcgggaaggagcgcggagcccggcccggaagctaggagccattccgtagtgccatcccgagcaacgcactgctgcagcttccctgagcctttccagcaagtttgttcaagattggctgtcaagaatcatggactgttattatatgccttgttttctgtcaagacaccatgattcctggtaaccgaatgctgatggtcgttttattatgccaagtcctgctaggaggcgcgagccatgctagtttgatacctgagacggggaagaaaaaagtcgccgagattcagggccacgcgggaggacgccgctcagggcagagccatgagctcctgcgggacttcgaggcgacacttctgcagatgtttgggctgcgccgccgcccgcagcctagcaagagtgccgtcattccggactacatgcgggatctttaccggcttcagtctggggaggaggaggaagagcagatccacagcactggtcttgagtatcctgagcgcccggccagccgggccaacaccgtgaggagcttccaccacgaagaacatctggagaacatcccagggaccagtgaaaactctgcttttcgtttcctctttaacctcagcagcatccctgagaacgaggtgatctcctctgcagagcttcggctcttccgggagcaggtggaccagggccctgattgggaaaggggcttccaccgtataaacatttatgaggttatgaagcccccagcagaagtggtgcctgggcacctcatcacacgactactggacacgagactggtccaccacaatgtgacacggtgggaaacttttgatgtgagccctgcggtccttcgctggacccgggagaagcagccaaactatgggctagccattgaggtgactcacctccatcagactcggacccaccagggccagcatgtcaggattagccgatcgttacctcaagggagtgggaattgggcccagctccggcccctcctggtcacctttggccatgatggccggggccatgccttgacccgacgccggagggccaagcgtagccctaagcatcactcacagcgggccaggaagaagaataagaactgccggcgccactcgctctatgtggacttcagcgatgtgggctggaatgactggattgtggccccaccaggctaccaggccttctactgccatggggactgcccctttccactggctgaccacctcaactcaaccaaccatgccattgtgcagaccctggtcaattctgtcaattccagtatccccaaagcctgttgtgtgcccactgaactgagtgccatctccatgctgtacctggatgagtatgataaggtggtactgaaaaattatcaggagatggtagtagagggatgtgggtgccgctgagatcaggcagtccttgaggatagacagatatacacaccacacacacacaccacatacaccacacacacacgttcccatccactcacccacacactacacagactgcttccttatagctggacttttatttaaaaaaaaaaaaaaaaaaatggaaaaaatccctaaacattcaccttgaccttatttatgactttacgtgcaaatgttttgaccatattgatcatatattttgacaaaatatatttataactacgtattaaaagaaaaaaataaaatgagtcattattttaaaggtaaat

SEQ ID NO: 54023 - DNA, 1737 bp, Homo sapiens
ggacgcgtgggtcgacccacgcgtcgggcagaggaggagggagggagggaaggagcgcggagcccggcccggaagctaggagccattccgtagtgccatcccgagcaacgcactgctgcagcttccctgagcctttccagcaagtttgttcaagattggctgtcaagaatcatggactgttattatatgccttgttttctgtcaagacaccatgattcctggtaaccgaatgctgatggtcgttttattatgccaagtcctgctaggaggcgcgagccatgctagtttgatacctgagacggggaagaaaaaagtcgccgagattcagggccacgcgggaggacgccgctcagggcagagccatgagctcctgcgggacttcgaggcgacacttctgcagatgtttgggctgcgccgccgcccgcagcctagcaagagtgccgtcattccggactacatgcgggatctttaccggcttcagtctggggaggaggaggaagagcagatccacagcactggtcttgagtatcctgagcgcccggccagccgggccaacaccgtgaggagcttccaccacgaagaacatctggagaacatcccagggaccagtgaaaactctgcttttcgtttcctctttaacctcagcagcatccctgagaacgaggtgatctcctctgcagagcttcggctcttccgggagcaggtggaccagggccctgattgggaaaggggcttccaccgtataaacatttatgaggttatgaagcccccagcagaagtggtgcctgggcacctcatcacacgactactggacacgagactggtccaccacaatgtgacacggtgggaaacttttgatgtgagccctgcggtccttcgctggacccgggagaagcagccaaactatgggctagccattgaggtgactcacctccatcagactcggacccaccagggccagcatgtcaggattagccgatcgttacctcaagggagtgggaattgggcccagctccggcccctcctggtcacctttggccatgatggccggggccatgccttgacccgacgccggagggccaagcgtagccctaagcatcactcacagcgggccaggaagaagaataagaactgccggcgccactcgctctatgtggacttcagcgatgtgggctggaatgactggattgtggccccaccaggctaccaggccttctactgccatggggactgcccctttccactggctgaccacctcaactcaaccaaccatgccattgtgcagaccctggtcaattctgtcaattccagtatccccaaagcctgttgtgtgcccactgaactgagtgccatctccatgctgtacctggatgagtatgataaggtggtactgaaaaattatcaggagatggtagtagagggatgtgggtgccgctgagatcaggcagtccttgaggatagacagatatacacaccacacacacacaccacatacaccacacacacacgttcccatccactcacccacacactacacagactgcttccttatagctggacttttatttaaaaaaaaaaaaaaaaaaatggaaaaaatccctaaacattcaccttgaccttatttatgactttacgtgcaaatgttttgaccatattgatcatatattttgacaaaatatatttataactacgtattaaaagaaaaaaataaaatgagtcattattttaaaggtaaat

SEQ ID NO: 54024 - DNA, 1634 bp, Homo sapiens
gtctcattatattcaaatattccttttaggagccattccgtagtgccatcccgagcaacgcactgctgcagcttccctgagcctttccagcaagtttgttcaagattggctgtcaagaatcatggactgttattatatgccttgttttctgtcatcctgctaggaggcgcgagccatgctagtttgatacctgagacggggaagaaaaaagtcgccgagattcagggccacgcgggaggacgccgctcagggcagagccatgagctcctgcgggacttcgaggcgacacttctgcagatgtttgggctgcgccgccgcccgcagcctagcaagagtgccgtcattccggactacatgcgggatctttaccggcttcagtctggggaggaggaggaagagcagatccacagcactggtcttgagtatcctgagcgcccggccagccgggccaacaccgtgaggagcttccaccacgaagaacatctggagaacatcccagggaccagtgaaaactctgcttttcgtttcctctttaacctcagcagcatccctgagaacgaggtgatctcctctgcagagcttcggctcttccgggagcaggtggaccagggccctgattgggaaaggggcttccaccgtataaacatttatgaggttatgaagcccccagcagaagtggtgcctgggcacctcatcacacgactactggacacgagactggtccaccacaatgtgacacggtgggaaacttttgatgtgagccctgcggtccttcgctggacccgggagaagcagccaaactatgggctagccattgaggtgactcacctccatcagactcggacccaccagggccagcatgtcaggattagccgatcgttacctcaagggagtgggaattgggcccagctccggcccctcctggtcacctttggccatgatggccggggccatgccttgacccgacgccggagggccaagcgtagccctaagcatcactcacagcgggccaggaagaagaataagaactgccggcgccactcgctctatgtggacttcagcgatgtgggctggaatgactggattgtggccccaccaggctaccaggccttctactgccatggggactgcccctttccactggctgaccacctcaactcaaccaaccatgccattgtgcagaccctggtcaattctgtcaattccagtatccccaaagcctgttgtgtgcccactgaactgagtgccatctccatgctgtacctggatgagtatgataaggtggtactgaaaaattatcaggagatggtagtagagggatgtgggtgccgctgagatcaggcagtccttgaggatagacagatatacacaccacacacacacaccacatacaccacacacacacgttcccatccactcacccacacactacacagactgcttccttatagctggacttttatttaaaaaaaaaaaaaaaaaaatggaaaaaatccctaaacattcaccttgaccttatttatgactttacgtgcaaatgttttgaccatattgatcatatattttgacaaaatatatttataactacgtattaaaagaaaaaaataaaatgagtcattattttaaaggtaaat

SEQ ID NO: 54025 - DNA, 1684 bp, Homo sapiens
ggacgcgtgggtcgacccacgcgtcgggcagaggaggagggagggagggaaggagcgcggagcccggcccggaagctaggagccattccgtagtgccatcccgagcaacgcactgctgcagcttccctgagcctttccagcaagtttgttcaagattggctgtcaagaatcatggactgttattatatgccttgttttctgtcatcctgctaggaggcgcgagccatgctagtttgatacctgagacggggaagaaaaaagtcgccgagattcagggccacgcgggaggacgccgctcagggcagagccatgagctcctgcgggacttcgaggcgacacttctgcagatgtttgggctgcgccgccgcccgcagcctagcaagagtgccgtcattccggactacatgcgggatctttaccggcttcagtctggggaggaggaggaagagcagatccacagcactggtcttgagtatcctgagcgcccggccagccgggccaacaccgtgaggagcttccaccacgaagaacatctggagaacatcccagggaccagtgaaaactctgcttttcgtttcctctttaacctcagcagcatccctgagaacgaggtgatctcctctgcagagcttcggctcttccgggagcaggtggaccagggccctgattgggaaaggggcttccaccgtataaacatttatgaggttatgaagcccccagcagaagtggtgcctgggcacctcatcacacgactactggacacgagactggtccaccacaatgtgacacggtgggaaacttttgatgtgagccctgcggtccttcgctggacccgggagaagcagccaaactatgggctagccattgaggtgactcacctccatcagactcggacccaccagggccagcatgtcaggattagccgatcgttacctcaagggagtgggaattgggcccagctccggcccctcctggtcacctttggccatgatggccggggccatgccttgacccgacgccggagggccaagcgtagccctaagcatcactcacagcgggccaggaagaagaataagaactgccggcgccactcgctctatgtggacttcagcgatgtgggctggaatgactggattgtggccccaccaggctaccaggccttctactgccatggggactgcccctttccactggctgaccacctcaactcaaccaaccatgccattgtgcagaccctggtcaattctgtcaattccagtatccccaaagcctgttgtgtgcccactgaactgagtgccatctccatgctgtacctggatgagtatgataaggtggtactgaaaaattatcaggagatggtagtagagggatgtgggtgccgctgagatcaggcagtccttgaggatagacagatatacacaccacacacacacaccacatacaccacacacacacgttcccatccactcacccacacactacacagactgcttccttatagctggacttttatttaaaaaaaaaaaaaaaaaaatggaaaaaatccctaaacattcaccttgaccttatttatgactttacgtgcaaatgttttgaccatattgatcatatattttgacaaaatatatttataactacgtattaaaagaaaaaaataaaatgagtcattattttaaaggtaaat

SEQ ID NO: 54026 - DNA, 1753 bp, Homo sapiens
ggaggtaccatgctaacaggaacagcaactgtcgcgtgatgctgcagtgatcaaacattgaggagccgattccgtcagtgcactatcccgagtcaatcgcaactgcgggggagacttcctctgtgagcctattactcatgcaaagttggttgcaagattggctgtctacacgaatcataggcacgtgtatatgtatatgcctgtgtattctgtcatgacgagacaccatgattcctggtaaccgaatgctgatggtcgttttattatgccaagtcctgctaggaggcgcgagccatgctagtttgatacctgagacggggaagaaaaaagtcgccgagattcagggccacgcgggaggacgccgctcagggcagagccatgagctcctgcgggacttcgaggcgacacttctgcagatgtttgggctgcgccgccgcccgcagcctagcaagagtgccgtcattccggactacatgcgggatctttaccggcttcagtctggggaggaggaggaagagcagatccacagcactggtcttgagtatcctgagcgcccggccagccgggccaacaccgtgaggagcttccaccacgaagaacatctggagaacatcccagggaccagtgaaaactctgcttttcgtttcctctttaacctcagcagcatccctgagaacgaggtgatctcctctgcagagcttcggctcttccgggagcaggtggaccagggccctgattgggaaaggggcttccaccgtataaacatttatgaggttatgaagcccccagcagaagtggtgcctgggcacctcatcacacgactactggacacgagactggtccaccacaatgtgacacggtgggaaacttttgatgtgagccctgcggtccttcgctggacccgggagaagcagccaaactatgggctagccattgaggtgactcacctccatcagactcggacccaccagggccagcatgtcaggattagccgatcgttacctcaagggagtgggaattgggcccagctccggcccctcctggtcacctttggccatgatggccggggccatgccttgacccgacgccggagggccaagcgtagccctaagcatcactcacagcgggccaggaagaagaataagaactgccggcgccactcgctctatgtggacttcagcgatgtgggctggaatgactggattgtggccccaccaggctaccaggccttctactgccatggggactgcccctttccactggctgaccacctcaactcaaccaaccatgccattgtgcagaccctggtcaattctgtcaattccagtatccccaaagcctgttgtgtgcccactgaactgagtgccatctccatgctgtacctggatgagtatgataaggtggtactgaaaaattatcaggagatggtagtagagggatgtgggtgccgctgagatcaggcagtccttgaggatagacagatatacacaccacacacacacaccacatacaccacacacacacgttcccatccactcacccacacactacacagactgcttccttatagctggacttttatttaaaaaaaaaaaaaaaaaaatggaaaaaatccctaaacattcaccttgaccttatttatgactttacgtgcaaatgttttgaccatattgatcatatattttgacaaaatatatttataactacgtattaaaagaaaaaaataaaatgagtcattattttaaaggtaaat

SEQ ID NO: 54027 - DNA, 468 bp, Homo sapiens
aacaccgtgaggagcttccaccacgaaggtcagtctcttcccccagtctgcgtgggggagggctggtgggactggctagaggggcagtgaaagccctggggaagaagagttcgggttacatcaaagccccagtccaggaggctgaggaacagagctgcttacctccaagaatttgcagagctgccgccgaacttattttttggagacagagggggaggtgttcaggggaaggggaatgacagcactcagacgtgggctagccccagcggtgtgtttttgctatatcaaagccttttctgctaggttttctgcccgtttttttcaaagcacctactgaatttaatattacagctgtgtgtttgtcgggtttattcaataggggccttgtaatccgatctgaatgtttcctagcggatgtttcttttccaaagtaaatctgagttattaatccaccagcatcattactgt

SEQ ID NO: 54028 - DNA, 1752 bp, Homo sapiens
gaaagcgagggagggaaagaggaggaaggaagatgcgagaaggcagaggaggagggagggagggaaggagcgcggagcccggcccggaagctaggtgagtgtggcatccgagctgagggacgcgagcctgagacgccgctgctgctccggctgagtatctagcttgtctccccgatgggattcccgtccaagctatctcgagcctgcagcgccacagtccccggccctcgcccaggttcactgcaaccgttcagaggtccccaggagctgctgctggcgagcccgctactgcagggacctatggagccattccgtagtgccatcccgagcaacgcactgctgcagcttccctgagcctttccagcaagtttgttcaagattggctgtcaagaatcatggactgttattatatgccttgttttctgtcaagacaccatgattcctggtaaccgaatgctgatggtcgttttattatgccaagtcctgctaggaggcgcgagccatgctagtttgatacctgagacggggaagaaaaaagtcgccgagattcagggccacgcgggaggacgccgctcagggcagagccatgagctcctgcgggacttcgaggcgacacttctgcagatgtttgggctgcgccgccgcccgcagcctagcaagagtgccgtcattccggactacatgcgggatctttaccggcttcagtctggggaggaggaggaagagcagatccacagcactggtcttgagtatcctgagcgcccggccagccgggccaacaccgtgaggagcttccaccacgaagaacatctggagaacatcccagggaccagtgaaaactctgcttttcgtttcctctttaacctcagcagcatccctgagaacgaggtgatctcctctgcagagcttcggctcttccgggagcaggtggaccagggccctgattgggaaaggggcttccaccgtataaacatttatgaggttatgaagcccccagcagaagtggtgcctgggcacctcatcacacgactactggacacgagactggtccaccacaatgtgacacggtgggaaacttttgatgtgagccctgcggtccttcgctggacccgggagaagcagccaaactatgggctagccattgaggtgactcacctccatcagactcggacccaccagggccagcatgtcaggattagccgatcgttacctcaagggagtgggaattgggcccagctccggcccctcctggtcacctttggccatgatggccggggccatgccttgacccgacgccggagggccaagcgtagccctaagcatcactcacagcgggccaggaagaagaataagaactgccggcgccactcgctctatgtggacttcagcgatgtgggctggaatgactggattgtggccccaccaggctaccaggccttctactgccatggggactgcccctttccactggctgaccacctcaactcaaccaaccatgccattgtgcagaccctggtcaattctgtcaattccagtatccccaaagcctgttgtgtgcccactgaactgagtgccatctccatgctgtacctggatgagtatgataaggtggtactgaaaaattatcaggagatggtagtagagggatgtgggtgccgctgagatcaggcagtccttgaggatagacagatatacacaccacacacacacaccacatagttcagcgtctgacggcgtacgcgacatcgatgt

SEQ ID NO: 54029 - DNA, 1709 bp, Homo sapiens
gaaagcgagggagggaaagaggaggaaggaagatgcgagaaggcagaggaggagggagggagggaaggagcgcggagcccggcccggaagctaggtgagtgtggcatccgagctgagggacgcgagcctgagacgccgctgctgctccggctgagtatctagcttgtctccccgatgggattcccgtccaagctatctcgagcctgcagcgccacagtccccggccctcgcccaggttcactgcaaccgttcagaggtccccaggagctgctgctggcgagcccgctactgcagggacctatggagccattccgtagtgccatcccgagcaacgcactgctgcagcttccctgagcctttccagcaagtttgttcaagattggctgtcaagaatcatggactgttattatatgccttgttttctgtcaagacaccatgattcctggtaaccgaatgctgatggtcgttttattatgccaagtcctgctaggaggcgcgagccatgctagtttgatacctgagacggggaagaaaaaagtcgccgagattcagggccacgcgggaggacgccgctcagggcagagccatgagctcctgcgggacttcgaggcgacacttctgcagatgtttgggctgcgccgccgcccgcagcctagcaagagtgccgtcattccggactacatgcgggatctttaccggcttcagtctggggaggaggaggaagagcagatccacagcactggtcttgagtatcctgagcgcccggccagccgggccaacaccgtgaggagcttccaccacgaagaacatctggagaacatcccagggaccagtgaaaactctgcttttcgtttcctctttaacctcagcagcatccctgagaacgaggtgatctcctctgcagagcttcggctcttccgggagcaggtggaccagggccctgattgggaaaggggcttccaccgtataaacatttatgaggttatgaagcccccagcagaagtggtgcctgggcacctcatcacacgactactggacacgagactggtccaccacaatgtgacacggtgggaaacttttgatgtgagccctgcggtccttcgctggacccgggagaagcagccaaactatgggctagccattgaggtgactcacctccatcagactcggacccaccagggccagcatgtcaggattagccgatcgttacctcaagggagtgggaattgggcccagctccggcccctcctggtcacctttggccatgatggccggggccatgccttgacccgacgccggagggccaagcgtagccctaagcatcactcacagcgggccaggaagaagaataagaactgccggcgccactcgctctatgtggacttcagcgatgtgggctggaatgactggattgtggccccaccaggctaccaggccttctactgccatggggactgcccctttccactggctgaccacctcaactcaaccaaccatgccattgtgcagaccctggtcaattctgtcaattccagtatccccaaagcctgttgtgtgcccactgaactgagtgccatctccatgctgtacctggatgagtatgataaggtggtactgaaaaattatcaggagatggtagtagagggatgtgggtgccgctgagatcaggcagtccttgaggatggtccgcacagggggatcctcggagt

SEQ ID NO: 54030 - DNA, 1701 bp, Homo sapiens
tgctaaaggagcacaatgcctgatgctgcaggagaaacattaggagccattccgtagtgccatcccgagcaacgcactgctgcagcttccctgagcctttccagcaagtttgttcaagattggctgtcaagaatcatggactgttattatatgccttgttttctgtcaagacaccatgattcctggtaaccgaatgctgatggtcgttttattatgccaagtcctgctaggaggcgcgagccatgctagtttgatacctgagacggggaagaaaaaagtcgccgagattcagggccacgcgggaggacgccgctcagggcagagccatgagctcctgcgggacttcgaggcgacacttctgcagatgtttgggctgcgccgccgcccgcagcctagcaagagtgccgtcattccggactacatgcgggatctttaccggcttcagtctggggaggaggaggaagagcagatccacagcactggtcttgagtatcctgagcgcccggccagccgggccaacaccgtgaggagcttccaccacgaagaacatctggagaacatcccagggaccagtgaaaactctgcttttcgtttcctctttaacctcagcagcatccctgagaacgaggtgatctcctctgcagagcttcggctcttccgggagcaggtggaccagggccctgattgggaaaggggcttccaccgtataaacatttatgaggttatgaagcccccagcagaagtggtgcctgggcacctcatcacacgactactggacacgagactggtccaccacaatgtgacacggtgggaaacttttgatgtgagccctgcggtccttcgctggacccgggagaagcagccaaactatgggctagccattgaggtgactcacctccatcagactcggacccaccagggccagcatgtcaggattagccgatcgttacctcaagggagtgggaattgggcccagctccggcccctcctggtcacctttggccatgatggccggggccatgccttgacccgacgccggagggccaagcgtagccctaagcatcactcacagcgggccaggaagaagaataagaactgccggcgccactcgctctatgtggacttcagcgatgtgggctggaatgactggattgtggccccaccaggctaccaggccttctactgccatggggactgcccctttccactggctgaccacctcaactcaaccaaccatgccattgtgcagaccctggtcaattctgtcaattccagtatccccaaagcctgttgtgtgcccactgaactgagtgccatctccatgctgtacctggatgagtatgataaggtggtactgaaaaattatcaggagatggtagtagagggatgtgggtgccgctgagatcaggcagtccttgaggatagacagatatacacaccacacacacacaccacatacaccacacacacacgttcccatccactcacccacacactacacagactgcttccttatagctggacttttatttaaaaaaaaaaaaaaaaaaatggaaaaaatccctaaacattcaccttgaccttatttatgactttacgtgcaaatgttttgaccatattgatcatatattttgacaaaatatatttataactacgtattaaaagaaaaaaataaaatgagtcattattttaaaggtaaat

SEQ ID NO: 54031 - DNA, 1584 bp, Homo sapiens
gaaagcgagggagggaaagaggaggaaggaagatgcgagaaggcagaggaggagggagggagggaaggagcgcggagcccggcccggaagctaggtgagtgtggcatccgagctgagggacgcgagcctgagacgccgctgctgctccggctgagtatctagcttgtctccccgatgggattcccgtccaagctatctcgagcctgcagcgccacagtccccggccctcgcccaggttcactgcaaccgttcagaggtccccaggagctgctgctggcgagcccgctactgcagggacctatggagccattccgtagtgccatcccgagcaacgcactgctgcagcttccctgagcctttccagcaagtttgttcaagattggctgtcaagaatcatggactgttattatatgccttgttttctgtcaagacaccatgattcctggtaaccgaatgctgatggtcgttttattatgccaagtcctgctaggaggcgcgagccatgctagtttgatacctgagacggggaagaaaaaagtcgccgagattcagggccacgcgggaggacgccgctcagggcagagccatgagctcctgcgggacttcgaggcgacacttctgcagatgtttgggctgcgccgccgcccgcagcctagcaagagtgccgtcattccggactacatgcgggatctttaccggcttcagtctggggaggaggaggaagagcagatccacagcactggtcttgagtatcctgagcgcccggccagccgggccaacaccgtgaggagcttccaccacgaagaacatctggagaacatcccagggaccagtgaaaactctgcttttcgtttcctctttaacctcagcagcatccctgagaacgaggtgatctcctctgcagagcttcggctcttccgggagcaggtggaccagggccctgattgggaaaggggcttccaccgtataaacatttatgaggttatgaagcccccagcagaagtggtgcctgggcacctcatcacacgactactggacacgagactggtccaccacaatgtgacacggtgggaaacttttgatgtgagccctgcggtccttcgctggacccgggagaagcagccaaactatgggctagccattgaggtgactcacctccatcagactcggacccaccagggccagcatgtcaggattagccgatcgttacctcaagggagtgggaattgggcccagctccggcccctcctggtcacctttggccatgatggccggggccatgccttgacccgacgccggagggccaagcgtagccctaagcatcactcacagcgggccaggaagaagaataagaactgccggcgccactcgctctatgtggacttcagcgatgtgggctggaatgactggattgtggccccaccaggctaccaggccttctactgccatggggactgcccctttccactggctgaccaccatgcaagttcgggactaaccagccatgcaagttcggactaaccagcatgcaaggtcgggctaaccagccatgcaaggtcgggactaaccagccatgcaaggtcg

SEQ ID NO: 54032 - DNA, 209 bp, Homo sapiens
cccaccttattattttatgatcacataatattctaccatatgactatattgacatttattctttcttttgatgtataagtacaaattttttttattaaaagagataaagattcattaagactctttgtgcacatgtctataatgtattaaaggtattccatgtcctctagaagtagaatgccatgttgaatgctatatacctttaacat

SEQ ID NO: 54033 - DNA, 400 bp, Homo sapiens
cttatttttttttattttttgtagagacagggtctcactttgttgcccaggctgggacactgatatttgagtttcatgtaatttccacatgtcacaaagcattcttttgctttttttcccctaaccattaaaaatcacaggtcatataggccaggcatagtggctcatgcctataatcccagcattcgagaggccaaggagggaggactgcttgaagccagaagtttgagaccagcctgggtaacaaaccaagaccctatctctactaaaaaaatcagtcaatcaggccagtcatggtggctcacgcctgtaatcccagcactttggaaggctgaggcgggcagatcacctgaggttggaagttcgagactagcctgaccaacatggagaaaccctgtct

SEQ ID NO: 54034 - DNA, 5293 bp, Homo sapiens
acagacgctgggacccacgacgacagaaggcgccgatggccgcgcctgctgagccctgcgcggggcagggggtctggaaccagacagagcctgaacctgccgccaccagcctgctgagcctgtgcttcctgagaacagcaggggtctgggtaccccccatgtacctctgggtccttggtcccatctacctcctcttcatccaccaccatggccggggctacctccggatgtccccactcttcaaagccaagatggtgcttggattcgccctcatagtcctgtgtacctccagcgtggctgtcgctctttggaaaatccaacagggaacgcctgaggccccagaattcctcattcatcctactgtgtggctcaccacgatgagcttcgcagtgttcctgattcacaccgagaggaaaaagggagtccagtcatctggagtgctgtttggttactggcttctctgctttgtcttgccagctaccaacgctgcccagcaggcctccggagcgggcttccagagcgaccctgtccgccacctgtccacctacctatgcctgtctctggtggtggcacagtttgtgctgtcctgcctggcggatcaaccccccttcttccctgaagacccccagcagtctaacccctgtccagagactggggcagccttcccctccaaagccacgttctggtgggtttctggcctggtctggaggggatacaggaggccactgagaccaaaagacctctggtcgcttgggagagaaaactcctcagaagaacttgtttcccggcttgaaaaggagtggatgaggaaccgcagtgcagcccggaggcacaacaaggcaatagcatttaaaaggaaaggcggcagtggcatgaaggctccagagaccgagcccttcctacggcaagaagggagccagtggcgcccactgctgaaggccatctggcaggtgttccattctaccttcctcctggggaccctcagcctcatcatcagtgatgtcttcaggttcactgtccccaagctgctcagccttttcctggagtttattggtgatcccaagcctccagcctggaagggctacctcctcgccgtgctgatgttcctctcagcctgcctgcaaacgctgtttgagcagcagaacatgtacaggctcaaggtgctgcagatgaggttgcggtcggccatcactggcctggtgtacagaaaggtcctggctctgtccagcggctccagaaaggccagtgcggtgggtgatgtggtcaatctggtgtccgtggacgtgcagcggctgaccgagagcgtcctctacctcaacgggctgtggctgcctctcgtctggatcgtggtctgcttcgtctatctctggcagctcctggggccctccgccctcactgccatcgctgtcttcctgagcctcctccctctgaatttcttcatctccaagaaaaggaaccaccatcaggaggagcaaatgaggcagaaggactcacgggcacggctcaccagctctatcctcaggaactcgaagaccatcaagttccatggctgggagggagcctttctggacagagtcctgggcatccgaggccaggagctgggcgccttgcggacctccggcctcctcttctctgtgtcgctggtgtccttccaagtgtctacatttctggtcgcactggtggtgtttgctgtccacactctggtggccgagaatgctatgaatgcagagaaagcctttgtgactctcacagttctcaacatcctcaacaaggcccaggctttcctgcccttctccatccactccctcgtccaggcccgggtgtcctttgaccgtctggtcaccttcctctgcctggaagaagttgaccctggtgtcgtagactcaagttcctctggaagcgctgccgggaaggattgcatcaccatacacagtgccaccttcgcctggtcccaggaaagccctccctgcctccacagaataaacctcacggtgccccagggctgtctgctggctgttgtcggtccagtgggggcagggaagtcctccctgctgtccgccctccttggggagctgtcaaaggtggaggggttcgtgagcatcgagggtgctgtggcctacgtgccccaggaggcctgggtgcagaacacctctgtggtagagaatgtgtgcttcgggcaggagctggacccaccctggctggagagagtactagaagcctgtgccctgcagccagatgtggacagcttccctgagggaatccacacttcaattggggagcagggcatgaatctctccggaggccagaagcagcggctgagcctggcccgggctgtatacagaaaggcagctgtgtacctgctggatgaccccctggcggccctggatgcccacgttggccagcatgtcttcaaccaggtcattgggcctggtgggctactccagggaacaacacggattctcgtgacgcacgcactccacatcctgccccaggctgattggatcatagtgctggcaaatggggccatcgcagagatgggttcctaccaggagcttctgcagaggaagggggccctcgtgtgtcttctggatcaagccagacagccaggagatagaggagaaggagaaacagaacctgggaccagcaccaaggaccccagaggcacctctgcaggcaggaggcccgagcttagacgcgagaggtccatcaagtcagtccctgagaaggaccgtaccacttcagaagcccagacagaggttcctctggatgaccctgacagggcaggatggccagcaggaaaggacagcatccaatacggcagggtgaaggccacagtgcacctggcctacctgcgtgccgtgggcacccccctctgcctctacgcactcttcctcttcctctgccagcaagtggcctccttctgccggggctactggctgagcctgtgggcggacgaccctgcagtaggtgggcagcagacgcaggcagccctgcgtggcgggatcttcgggctcctcggctgtctccaagccattgggctgtttgcctccatggctgcggtgctcctaggtggggcccgggcatccaggttgctcttccagaggctcctgtgggatgtggtgcgatctcccatcagcttctttgagcggacacccattggtcacctgctaaaccgcttctccaaggagacagacacggttgacgtggacattccagacaaactccggtccctgctgatgtacgcctttggactcctggaggtcagcctggtggtggcagtggctaccccactggccactgtggccatcctgccactgtttctcctctacgctgggtttcagagcctgtatgtggttagctcatgccagctgagacgcttggagtcagccagctactcgtctgtctgctcccacatggctgagacgttccagggcagcacagtggtccgggcattccgaacccaggccccctttgtggctcagaacaatgctcgcgtagatgaaagccagaggatcagtttcccgcgactggtggctgacaggtggcttgcggccaatgtggagctcctggggaatggcctggtgtttgcagctgccacgtgtgctgtgctgagcaaagcccacctcagtgctggcctcgtgggcttctctgtctctgctgccctccaggtgacccagacactgcagtgggttgttcgcaactggacagacctagagaacagcatcgtgtcagtggagcggatgcaggactatgcctggacgcccaaggaggctccctggaggctgcccacatgtgcagctcagcccccctggcctcagggcgggcagatcgagttccgggactttgggctaagataccgacctgagctcccgctggctgtgcagggcgtgtccttcaagatccacgcaggagagaaggtgggcatcgttggcaggaccggggcagggaagtcctccctggccagtgggctgctgcggctccaggaggcagctgagggtgggatctggatcgacggggtccccattgcccacgtggggctgcacacactgcgctccaggatcagcatcatcccccaggaccccatcctgttccctggctctctgcggatgaacctcgacctgctgcaggagcactcggacgaggctatctgggcagccctggagacggtgcagctcaaagccttggtggccagcctgcccggccagctgcagtacaagtgtgctgaccgaggcgaggacctgagcgtgggccagaaacagctcctgtgtctggcacgtgcccttctccggaagacccagatcctcatcctggacgaggctactgctgccgtggaccctggcacggagctgcagatgcaggccatgctcgggagctggtttgcacagtgcactgtgctgctcattgcccaccgcctgcgctccgtgatggactgtgcccgggttctggtcatggacaaggggcaggtggcagagagcggcagcccggcccagctgctggcccagaagggcctgttttacagactggcccaggagtcaggcctggtctgagccaggaccctcaaccgtaccccagttggaccagcccgcacagcctgcagtgctggagatggaagtgacccgtggtcatcgatagctccacacgatattgagtctagacctgtgtttgctctctgggaggaaaatggcagagaaagtggccaattatcacagagcatcagagccggaaggacctagcaatacacaggtctgcccgggcagggcccatctcgccctgtccaccctgcagccaatgtcaacagcgactctcagccccgctgtactctggactcacctgggggcctcaagcacatgcccaggctcccggctagacccttaaatcagaatctctgaggctgggaactgccatgctgtgtgtactttttacaaattaacacttttattttgggataatcccagactcacatgcagttaaagaaacaataatatagagagattcgtgtacttggtaccccatttcacccaatggtaacatcttgcaaaactctaggataaagcatcacagccagggtgttgacattgacacaacaatcttgctcgatttcccgttttacctgtaaaaaaaaaaaaaaaaaaaaaaaactcgagttaaagggtttattgaaatgcctgtggataaattatcatcagcttaaaactgttttggggttttaaacagggggtcttttgctcttaaaatgaaaggaagctttgcaggtccattgtccaataggaaaaaaattttatttctttggtaa

SEQ ID NO: 54035 - DNA, 2777 bp, Homo sapiens
acagacgctgggacccacgacgacagaaggcgccgatggccgcgcctgctgagccctgcgcggggcagggggtctggaaccagacagagcctgaacctgccgccaccagcctgctgagcctgtgcttcctgagaacagcaggggtctgggtaccccccatgtacctctgggtccttggtcccatctacctcctcttcatccaccaccatggccggggctacctccggatgtccccactcttcaaagccaagatggtgcttggattcgccctcatagtcctgtgtacctccagcgtggctgtcgctctttggaaaatccaacagggaacgcctgaggccccagaattcctcattcatcctactgtgtggctcaccacgatgagcttcgcagtgttcctgattcacaccgagaggaaaaagggagtccagtcatctggagtgctgtttggttactggcttctctgctttgtcttgccagctaccaacgctgcccagcaggcctccggagcgggcttccagagcgaccctgtccgccacctgtccacctacctatgcctgtctctggtggtggcacagtttgtgctgtcctgcctggcggatcaaccccccttcttccctgaagacccccagcagtctaacccctgtccagagactggggcagccttcccctccaaagccacgttctggtgggtttctggcctggtctggaggggatacaggaggccactgagaccaaaagacctctggtcgcttgggagagaaaactcctcagaagaacttgtttcccggcttgaaaaggagtggatgaggaaccgcagtgcagcccggaggcacaacaaggcaatagcatttaaaaggaaaggcggcagtggcatgaaggctccagagaccgagcccttcctacggcaagaagggagccagtggcgcccactgctgaaggccatctggcaggtgttccattctaccttcctcctggggaccctcagcctcatcatcagtgatgtcttcaggttcactgtccccaagctgctcagccttttcctggagtttattggtgatcccaagcctccagcctggaagggctacctcctcgccgtgctgatgttcctctcagcctgcctgcaaacgctgtttgagcagcagaacatgtacaggctcaaggtgctgcagatgaggttgcggtcggccatcactggcctggtgtacagaaaggcatccacagcatatctgaagaaatattcagaagttaactaatctcagatgatttcagcaggagtaaagaagagaaacagactcagaaatgccattacaacagttaattatgtcaaatttatcaccctgattgatcacgcagcattaacctcaagaacgccaagccaagtttttttgacaaatgtgagccaaggtttccgaaaaactagcagatatgactgtgacttacaaaatggaaaaagtaaacgagaaacacaatttgatatgatttaataaaagatttgtttccaccacttctcctgggaacctcagcacattttctttccactgacagttattatctctacctttattgaacaaagacacccggaacacagctgctgaggatcagtaaagaaaatcattcttttattaataagactgttattagcaggaaaaaaaaatccatgtttgggagtttgcactgaagttacaggccattttgaagaaatatggctgactagtgccaacattatttcaggcaatttcatgatcaaatgtcttattaggttgtttaaaatttttatagagattgtaaatcagaactattttctatttgccctaaatatttagatgctacagggaaagcagatcaaattaaagggtactgtgcacatttttttactgggaactcccagggatataaatcatttcgcctgcagcatgggaattcttcagtacacatgcttgtggaaacattccacgctccgccagcacgctcattaaagtgatgatttgggttgcaacaacagtgccaagtacttcctgtgttcaactggggaccatgtggcaagacccaaagcttccccagagatcctatgggaataagttttttgagccaccatattccattatttcagcctaaaataacaccatgggacaagaatcagaagacagaggagcagacaaatgtgtgtagacatgctggaaggaatctttctttttagaaacagggtcaatatctattaaactttaagatgtgtatctcttgacctggcagtttctgtatttgagttttaacctactgatatacccatgcatgtgaataaagtatcttcctgcatgtaacaggatatttaatgtaaccttgattatagttgcaaatgctgggaaacgatccaaatgtctttcaatatggcactgattaaataaattatggcacagtctcacaatgaaaaacaaatgtagccattaaacagaatgaaatgggtctagctaaattgaaataggactacctctaagatatgttgttaaaaagaaaaaaaagaaagtgcagaggaacaagtatgataccattttgtattttttaacatatgcaagcgtgattgtgcccacacagaatacctttgaaaataaactcagtatttgcctcagtggataaaaacaagaaccagccttattttcactgttatatcttttggtgccactttttgaactttttaccatatgtgcatatgtaactttctaaataaattttgtaaaaaagagaaatatggctcgttgcaataaatctaacaagataaaaga

SEQ ID NO: 54036 - DNA, 3023 bp, Homo sapiens
acagacgctgggacccacgacgacagaaggcgccgatggccgcgcctgctgagccctgcgcggggcagggggtctggaaccagacagagcctgaacctgccgccaccagcctgctgagcctgtgcttcctgagaacagcaggggtctgggtaccccccatgtacctctgggtccttggtcccatctacctcctcttcatccaccaccatggccggggctacctccggatgtccccactcttcaaagccaagatggtgcttggattcgccctcatagtcctgtgtacctccagcgtggctgtcgctctttggaaaatccaacagggaacgcctgaggccccagaattcctcattcatcctactgtgtggctcaccacgatgagcttcgcagtgttcctgattcacaccgagaggaaaaagggagtccagtcatctggagtgctgtttggttactggcttctctgctttgtcttgccagctaccaacgctgcccagcaggcctccggagcgggcttccagagcgaccctgtccgccacctgtccacctacctatgcctgtctctggtggtggcacagtttgtgctgtcctgcctggcggatcaaccccccttcttccctgaagacccccagcagtctaacccctgtccagagactggggcagccttcccctccaaagccacgttctggtgggtttctggcctggtctggaggggatacaggaggccactgagaccaaaagacctctggtcgcttgggagagaaaactcctcagaagaacttgtttcccggcttgaaaaggagtggatgaggaaccgcagtgcagcccggaggcacaacaaggcaatagcatttaaaaggaaaggcggcagtggcatgaaggctccagagaccgagcccttcctacggcaagaagggagccagtggcgcccactgctgaaggccatctggcaggtgttccattctaccttcctcctggggaccctcagcctcatcatcagtgatgtcttcaggttcactgtccccaagctgctcagccttttcctggagtttattggtgatcccaagcctccagcctggaagggctacctcctcgccgtgctgatgttcctctcagcctgcctgcaaacgctgtttgagcagcagaacatgtacaggctcaaggtgctgcagatgaggttgcggtcggccatcactggcctggtgtacagaaaggtcctggctctgtccagcggctccagaaaggccagtgcggtgggtgatgtggtcaatctggtgtccgtggacgtgcagcggctgaccgagagcgtcctctacctcaacgggctgtggctgcctctcgtctggatcgtggtctgcttcgtctatctctggcagctcctggggccctccgccctcactgccatcgctgtcttcctgagcctcctccctctgaatttcttcatctccaagaaaaggaaccaccatcaggaggagcaaatgaggcagaaggactcacgggcacggctcaccagctctatcctcaggaactcgaagaccatcaagttccatggctgggagggagcctttctggacagagtcctgggcatccgaggccaggagctgggcgccttgcggacctccggcctcctcttctctgtgtcgctggtgtccttccaagtgtctacatttctggtcgcactggtggtgtttgctgtccacactctggtggccgagaatgctatgaatgcagagaaagcctttgtgactctcacagttctcaacatcctcaacaaggcccaggctttcctgcccttctccatccactccctcgtccaggcccgggtgtcctttgaccgtctggtcaccttcctctgcctggaagaagttgaccctggtgtcgtagactcaagttcctctggaagcgctgccgggaaggattgcatcaccatacacagtgccaccttcgcctggtcccaggaaagccctccctgcctccacagaataaacctcacggtgccccagggctgtctgctggctgttgtcggtccagtgggggcagggaagtcctccctgctgtccgccctccttggggagctgtcaaaggtggaggggttcgtgagcatcgagggtgctgtggcctacgtgccccaggaggcctgggtgcagaacacctctgtggtagagaatgtgtgcttcgggcaggagctggacccaccctggctggagagagtactagaagcctgtgccctgcagccagatgtggacagcttccctgagggaatccacacttcaattggggagcagggcatgaatctctccggaggccagaagcagcggctgagcctggcccgggctgtatacagaaaggcagctgtgtacctgctggatgaccccctggcggccctggatgcccacgttggccagcatgtcttcaaccaggtcattgggcctggtgggctactccagggaacaacacggattctcgtgacgcacgcactccacatcctgccccaggctgattggatcatagtgctggcaaatggggccatcgcagagatgggttcctaccaggagcttctgcagaggaagggggccctcgtgtgtcttctggatcaagccagacagccaggagatagaggagaaggagaaacagaacctgggaccagcaccaaggaccccagaggcacctctgcaggcaggaggcccgagcttagacgcgagaggtccatcaagtcagtccctgagaaggaccgtaccacttcagaagcccagacagaggttcctctggatgaccctgacagggcaggatggccagcaggaaaggacagcatccaatacggcagggtaaccaccagcttcacccacccctccccacccactgtgccacctccaggggcccaagtcctcccaccaaatgtagcacttggcagtgatactcacctttcttgagcacctactatgtgccagtagcattctagatgttcattttcttaatcctcacaaccaccctaaaaaatagatatgataggtctatttcagacataa

SEQ ID NO: 54037 - DNA, 465 bp, Homo sapiens
tttccataaatgaccagattgtgcatattttaggcctgtgggccacacagtctctgtcacaactgctcaaagcatgaaatagagaaatgaatggatgtggccgtgttccaataaaactttatttataagaaaaggcagcaggcaggatttggtctctgggccacagtttgcctccccctggattatgtagccatgggacacggacagaacaagaaccctgcggggtcacccacaagccagtgagtagcagggcaatttgttcagtgggagagatttcttcctgcagcctctgcccctggggggggcgggggatggtgcctgggggcctctccgatgcagaggccggccaggtcaggggtctcctgtaaatggcctcttgtgccctgcagctgccgggaaggattgcatcaccatacacagtgccaccttcgcctggtcccaggaaagccctccctgcctccacag

SEQ ID NO: 54038 - DNA, 492 bp, Homo sapiens
tctctgatcctgtctactcacctgcatcaagccagtttgtacaagctgatgtctgagggcttctttttgctctgcatgctctggttctactgaaggaagagagggacctgttggttgtatccaaatcccaatcccctgggcccaggtcctcagactgtcccattcctgcctcccctctttactcccctgggtctggcctcccagaaaaggttgggaaaccaggggggctgttgcaagccctcaagtggccttgccaaacccagccagagaggctttcttgcaccaggtgacccagacactgcagtgggttgttcgcaactggacagacctagagaacagcatcgtgtcagtggagcggatgcaggactatgcctggacgcccaaggaggtgatgggcgggaggtggggagggggtcccagcaaggacatattgtggggggggcaatgggtccctgttgacatctgctacaggctttggagtttataccctct

SEQ ID NO: 54039 - DNA, 724 bp, Homo sapiens
acagacgctgggacccacgacgacagaaggcgccgatggccgcgcctgctgagccctgcgcggggcagggggtctggaaccagacagagcctgaacctgccgccaccagcctgctgagcctgtgcttcctgagaacagcaggggtctgggtaccccccatgtacctctgggtccttggtcccatctacctcctcttcatccaccaccatggccggggctacctccggatgtccccactcttcaaagccaagatggtagctgccatccctgggagcctggaaccaggcaatgttcgggggaggcaggggacaggctggaacctggtgaagtcttaaagtagactcctcctatcggggtgtagaagggaatctgttaatcaaacagagcaatattagaaaggctacagaggtcaactcagtggaacacggttctcccaaacagattttgtaattccgaaaatccacgcatgcgcaaacatacgcatacactcccatgttcctggacagtttatagctaccataacctggcattttccaaaacataccatgtagactcttggatacacaaggtaattttagagccacattaggatgaaccttttaaaaagttatgcatttatttttatgttcccccactggctgtattataggacaatttttatatgtgatatgtatttaccttagtgtgttaaataaacactggcattccaagtgtaaaactttct

SEQ ID NO: 54040 - DNA, 2224 bp, Homo sapiens
agcgctagcgcagcagccgggcccgatcacccgccgcccggtgcccgccgccgcccgcgccagcaaccgggcccgatcacccgccgcccggtgcccgccgccgcccggcaccggcatggcgctccggggcttctgcagccgatggctccgacccgctctggccattgggctgtttgcctccatggctgcggtgctcctaggtggggcccgggcatccaggttgctcttccagaggctcctgtgggatgtggtgcgatctcccatcagcttctttgagcggacacccattggtcacctgctaaaccgcttctccaaggagacagacacggttgacgtggacattccagacaaactccggtccctgctgatgtacgcctttggactcctggaggtcagcctggtggtggcagtggctaccccactggccactgtggccatcctgccactgtttctcctctacgctgggtttcaggtggcttgcggccaatgtggagctcctggggaatggcctggtgtttgcagctgccacgtgtgctgtgctgagcaaagcccacctcagtgctggcctcgtgggcttctctgtctctgctgccctccaggtgacccagacactgcagtgggttgttcgcaactggacagacctagagaacagcatcgtgtcagtggagcggatgcaggactatgcctggacgcccaaggaggctccctggaggctgcccacatgtgcagctcagcccccctggcctcagggcgggcagatcgagttccgggactttgggctaagataccgacctgagctcccgctggctgtgcagggcgtgtccttcaagatccacgcaggagagaaggtgggcatcgttggcaggaccggggcagggaagtcctccctggccagtgggctgctgcggctccaggaggcagctgagggtgggatctggatcgacggggtccccattgcccacgtggggctgcacacactgcgctccaggatcagcatcatcccccaggaccccatcctgttccctggctctctgcggatgaacctcgacctgctgcaggagcactcggacgaggctatctgggcagccctggagacggtgcagctcaaagccttggtggccagcctgcccggccagctgcagtacaagtgtgctgaccgaggcgaggacctgagcgtgggccagaaacagctcctgtgtctggcacgtgcccttctccggaagacccagatcctcatcctggacgaggctactgctgccgtggaccctggcacggagctgcagatgcaggccatgctcgggagctggtttgcacagtgcactgtgctgctcattgcccaccgcctgcgctccgtgatggactgtgcccgggttctggtcatggacaaggggcaggtggcagagagcggcagcccggcccagctgctggcccagaagggcctgttttacagactggcccaggagtcaggcctggtctgagccaggaccctcaaccgtaccccagttggaccagcccgcacagcctgcagtgctggagatggaagtgacccgtggtcatcgatagctccacacgatattgagtctagacctgtgtttgctctctgggaggaaaatggcagagaaagtggccaattatcacagagcatcagagccggaaggacctagcaatacacaggtctgcccgggcagggcccatctcgccctgtccaccctgcagccaatgtcaacagcgactctcagccccgctgtactctggactcacctgggggcctcaagcacatgcccaggctcccggctagacccttaaatcagaatctctgaggctgggaactgccatgctgtgtgtactttttacaaattaacacttttattttgggataatcccagactcacatgcagttaaagaaacaataatatagagagattcgtgtacttggtaccccatttcacccaatggtaacatcttgcaaaactctaggataaagcatcacagccagggtgttgacattgacacaacaatcttgctcgatttcccgttttacctgtaaaaaaaaaaaaaaaaaaaaaaaactcgagttaaagggtttattgaaatgcctgtggataaattatcatcagcttaaaactgttttggggttttaaacagggggtcttttgctcttaaaatgaaaggaagctttgcaggtccattgtccaataggaaaaaaattttatttctttggtaa

SEQ ID NO: 54041 - DNA, 388 bp, Homo sapiens
gagaggtgggccacggggagcagattcctatctgatgggttatttgtacctaatgtacaaccggggtctcccaactggggcccgggagtggtttagaaagcacaatgaggtcggatgcggtggctcacgactgtaatcccagtactttgggaggccgaggcaggcagatcacaaggtcaggacttcaagaccagcctggtgaatatggtgaaaccccttctttacaaaaagtaaaaaaattggccgggcatggtggcgcgtgcccgtagtcccagctactcggtagactgaggcaggagaattgcttgaacccgggaggtggaggttgcaatgagccaagattgcaccattgcgctccagcctgggcaacagagtgagactccatctc

SEQ ID NO: 54042 - DNA, 1046 bp, Homo sapiens
agcatactgccctatggggacagcatggatagaatagaaaaggaccgcctccaggcatggcacccgcggcgggagcagacctggacaaaattgggctgcacagtgacagccaggaggagctctggatgttcgtgaggaagaagctaatgatggaacaggaaaatggaaatctccgaggaagccctggccctaaaggtgacatgggaagtccaggccctaaaggagatcgagggttccctgggactccaggtatccctgggcccttgggccacccaggtccacaaggaccaaagggtcaaaaaggcagcgtgggagatcctggcatggaaggccccatgggccagagagggcgagaaggccccatgggacctcgtggtgaggcagggcctcctggatctggagagaaaggggaaagaggggctgctggtgaaccaggtcctcatggcccacctggtgtcccaggttctgtgggtcccaaaggttccagcggctctcctggcccacagggccctccaggtcctgtaggtctccaagggctccgaggtgaagtaggacttcctggtgtcaaaggtgacaaaggaccaatgggaccaccaggacccaaaggtgaccagggtgagaaaggacctcgaggcctcacaggcgagcctggcatgagaggtttgcctggtgctgttggtgagcccggggctaaaggagcaatgggtcctgctggcccagacggacaccaaggcccaagaggtgaacaaggtcttactgggatgcctggaatccgtggcccaccaggaccttctggagacccaggaaagccaggtctcacaggaccccagggacctcagggacttcccggtacccctggccgaccaggaataaaaggtgaaccaggagctccaggcaagatcgtgacttcggaggggtcatcgatgctcactgtcccaggccccccaggacctcctggagccatgggacccccaggacctccaggtgccccaggccctgccggcccagctggtctcccaggacatcaagaagttcttaatttaccg

SEQ ID NO: 54043 - DNA, 330 bp, Homo sapiens
gattgctgttaccaccctttacagtgcagtgatcacacccttgagaagccaggcagaaccaactgaaaggcatcgtggggcgtgcacatagcagctgcttgcaaagatggaagctgcctcacactcccccacaaccagcaagggcagtggctgccaggtatgacctcaggtgaccatcctgtgcattctgaaaactgggaagtcaaactctccaggctcctgactggccagtaggcttcaccagagctggatcaaccagaagaagctgaaacatccaacctaagaatttcgaacttcaaatggaaaatctgggcactctaaaccaaaatt

SEQ ID NO: 54044 - DNA, 204 bp, Homo sapiens
agggaggccgtgtccctagtgattagttgctgcacacacttgttggagtgagtgtctttaagtccaacggggagccctgtccccagccatttcccgcttcaccttgggctcctccattcctcagccagcctagtttggactcttggtctgaactgagcagaactttcctctatcatgacagagtctgtatgtgtggggaagaga

SEQ ID NO: 54045 - DNA, 270 bp, Homo sapiens
catccttcgcttaccctaagaaggaaaaatgacaatagttacagacacaagagaaatatcaattatattcactggtgctaaccatccaagcaataagttatactgtcttcatccctgtaatttagattttaacagtgatatcagtaaagacatgaatgtacaatgctgagagtaaatcaggctgtagatgacttcccttgaagatcacgatgctaataattttgctcatcttgtatcataactagaatgtcacgcacacattttaagatg

SEQ ID NO: 54046 - DNA, 374 bp, Homo sapiens
tggggtttcgagggccagacggggcagagtagtctggaaagttacacaagagtggacatattcagagagcttaagacttgggaggggccatagagctagatcttcccaccaaaggggcctttttgacagatgtgcaaactgaggcccagagagggaaaaggattattgtctggggcaaaatagtttatagcatcagagttcagtttggctctgctaccagatctcccaagcttgaatcctggcacctacaatcttgggcaagttcctgagcctctctgtgcctcagctttcttagctataaaacgggggaaataattgagcttgtctcagggcatggtggggatcaaatgagtcaatgtgaagcacgctcgagc

SEQ ID NO: 54047 - DNA, 468 bp, Homo sapiens
aggtctgagccttggtccattcccccagtaagaggtaagggatatggacaggaaccagagaaagaggctaagaagatatgaccagtgatggaggaagaaaaccaagagaagatgctatcttggtgaagaaagtactttgatgagggggagagcttcatggtgtcgaggtctgttgaaaggggctgggtgcagtggctcatgcctgtaattccagcaatttggaagaacaagataggagaatctcttgaggccagtagtttgtgaccagcctgggcaacatagtgagacccccatctctatttaaaaaatagccaggcatggtggcacattcctgtcatcccaattactcaggaggctgagataggaggattacgtgagcccagaagtttgaggttgccatgagctagggccactgcactccaggctacaaaataaggccctgtccaaaaacagaaaaaaaaaaataat

SEQ ID NO: 54048 - DNA, 3093 bp, Homo sapiens
agcaagagcagaggcttaaggagctacactgggggaaggacaggggcaagcaggccaaggcctggccggggctcggggggagggaatatggagcaatcccggtcacagcagcgtgggggtgaacaaagctggtggggtagtgacccccagtaccagtatatgccctttgaacactgcaccagctacggactgccctctgagaatgggggcctccagcacaggctccggaaggatgcaggcccccgccacaacgtccaccccacacagatttatggccatcacaaagaacaattctcagacagggagcaggacatagggatgcccaagaagacaggctccagttctaccgtggacagcaaggatgaggatcactattctaaatgtcaagattgtatccaccgcctgggacaggtggtgagaagaaaattaggggaagactggatctttctggtgcttctgggactgctgatggctctggtcagctggagcatggactacgtcagtgccaaaagccttcaggcctacaagtggtcctacgcgcagatgcagcccagccttcctctgcagttcctggtctgggtcaccttcccactagtcctcatcctcttcagcgccctcttctgccacctcatctctccccaggctgttggctctggaatccccgaaatgaagacaatacttcgtggggttgtcctgaaggaatacctcacaatgaaagcctttgtggccaaggttgtcgccctgactgcgggcctgggcagtggcatccccgtggggaaagagggccccttcgtccacattgccagcatctgtgctgctgtcctcagcaaattcatgtctgtgttctgcggggtatatgagcagccatactactactctgatatcctgacggtgggctgtgctgtgggagtcggctgttgttttgggacaccacttggaggagtgctatttagcatcgaggtcacctccacctactttgctgttcggaactactggagaggattctttgcagccacgttcagcgcctttgtgtttcgagtgctggcagtgtggaacaaggatgctgtcaccatcactgctctgttcagaaccaatttccgaatggatttcccctttgacctgaaggaactaccagcttttgctgccatcgggatttgctgtgggctcctgggagctgtatttgtgtatctgcatcgccaagtcatgctcggtgtccgaaagcacaaggccctcagccagtttcttgctaagcaccgcctgctgtatcctggaattgttacctttgtcattgcctcattcaccttcccaccaggaatgggtcaattcatggctggagagttgatgccccgcgaagccatcagtactttgtttgacaacaatacatgggtgaaacacgcgggtgatcctgagagcctgggccagtcagctgtgtggattcacccccgggtcaacgttgtcatcatcatctttctcttcttcgtcatgaagttctggatgtccatcgtggccaccactatgcccataccctgcggaggcttcatgcctgtgtttgtgctaggagctgcatttggaaggctggtaggagaaatcatggccatgctctttcctgatggtattttgtttgatgacatcatctacaagatcctacctgggggctatgcagtaattggagcagcagcgctgactggtgccgtttcccacacagtctccacagctgtgatttgcttcgaattaacgggtcagattgctcacatcctgcccatgatggtggctgttatcttggccaacatggtggcccagagcctgcagccctctctctatgacagcatcatccaggtcaagaagctaccctacttgcctgaccttggctggaaccagctcagcaaatataccatctttgttgaggacatcatggtacgtgatgtgaagtttgtttcagcttcttacacatatggggagttgcgaaccctgctccagaccaccacagtcaagactttaccactggttgactcaaaagattcaatgatcctgctgggctcggtggagcggtcggaactgcaggccctcctgcagcgccacctgtgtcctgagcgcaggctgcgcgcagcccaagagatggcgcggaagttgtcggagctgccttacgacgggaaggcgcggctggctggggaggggccccccggcgcgcctccaggccggcccgagtccttcgcctttgtggatgaggatgaggacgaagatctctctggcaagagcgagcttcctccttcccttgctctccacccctctactactgcccctctgtccccagaagagcccaatgggcctctgcctggccacaaacagcagccggaagcaccagagcctgcaggtcaaagaccctccatcttccagtccctgcttcactgcttgctgggcagagctcgccccacaaagaagaaaacaacccaggattccacagatttagtggataacatgtcacctgaagagattgaggcctgggagcaggagcagctgagccagcctgtctgttttgattcctgctgtattgaccagtctcccttccagctggtggagcagacaaccctgcacaagactcataccctgttttcactccttggcctccacctcgcttacgtgaccagcatggggaagctcaggggcgtcctggccctggaggagctacagaaggccattgaggggcacaccaagtctggggtgcagctccgccctccccttgccagcttccggaacacgacttcaactcgaaagagtaccggggcacctccatcttctgcagagaactggaacctgcctgaggacaggcctggggccactggaacaggggatgtgattgctgcctccccagagacccctgtgccatctccttccccagagccccctctctccctggccccaggcaaggtagagggcgagttggaggagctggagctggtggagagtccagggctggaagaggagctggccgacatcttgcagggccccagcctgcgatccacagacgaggaggatgaggatgaactgatcctttgaccccctcccacgacctcctcataaagaccgtggagaggc

SEQ ID NO: 54049 - DNA, 332 bp, Homo sapiens
tatgcttttttctttagttgattagtgattgccctagagtttacaatatacatttataaatcattcaaactcacttccaaataacactataccatttactgcttcaagggtagtatgagtaccttaaaacaacaaaataatcctaacttctctttcttgcctcttgcataattgctaccattcattttacaaatatatataaacacatataaacatatgtattatatgtacatatgtagttaaatacattgctgctattattttgaataaactattatatgttagatctgttggctataagaataaaagtttctattttattgttacttatt

SEQ ID NO: 54050 - DNA, 349 bp, Homo sapiens
aaagaaaatgccttgggaagacagatgcattttttcccactggtgttgcaattgctcaaatattttgaggatgaatatcctcaccttggaggcaagtttttaagagtgaatttgaattactggagcagtgaacaattatttagagtctggtataagtgaagaaaagaatcatgaccagtaagctgtcttgcaggtaccagcaaactgactctaaaatttatatggaaaggcaaagggattagaatagccaacataatactgaagaagttggaagactcacactatccaatttcaagatttactgtaaagctacagtaaccaagacaatgtggcactggtgaaaaagtaa

SEQ ID NO: 54051 - DNA, 716 bp, Homo sapiens
ggttgaggctgcagtgagctgcatttgcaccactgtactacagcctgggggacagaatgagaccctgtctcaaaaaaaacacaaaacaacaacggcaaaaaactccagctaattattttgcacactctgatttaagcaatagcaaaatggtttcaaccttttgaatccagatgtaacttctacatacagctctgatccaatatgctgaaagtactgcacacaaatttaactttttcttaatgtgcaaagggcattttatgaatataattattttattattctaaatttttttttctcttagtttttggaacctgaaatggacaaatttgcccccctgctccctttttttttctgagatggagtcttgctctgttatcaggctggagtgcagtggcgtgatctcggctcactgcaatctctgcctcctgggttcaagcgactctcctgcctcagcctcccgagtagctgggagtacaggcgcgcaccaccacacctggctaattttgtatttttagtagagatggggttttgccatgttggccaggatggactccatctcctgaccttgtgatccgcctgtctcggtctcccaaagtgctgggattacaggcatgagccaccacgcccggcctagtggtcatttttaagtgaaatgtgttcctctttcctgaagtcactgaaggctgtggctgattcagagggactttctgtcagat

SEQ ID NO: 54052 - DNA, 396 bp, Homo sapiens
cctggaaacaatcggaaaccctgccccatcggcctcacatcagcttcctctttccccgtggccacttcctcttacggcgcagggaacctctcctcctgggtttgtgggcacaggtcacgtatcactcagggtggcgtcttatcacaggcactgggtgactagtgcttagatgtcacaacactgctgcacagatggagagactgacgcccagaggggatgaggtctcagctcaaggtcacaagggcgcttaaggcggagtctaattctttagactcttgctcaaaacaagtgcttcacttattttgaaatctgaggtcttagagaaaggaagtgactatcaaattagaggaagaaatttcgcttgaagatgtgcacggaggcggcaaatccgtgcct

SEQ ID NO: 54053 - DNA, 301 bp, Homo sapiens
gcaacatgtcactagccagcaggtaaggggtaaggctgttctgcctcatctcccataccagtagctcctagactgtgctatttgcctgttttgattccttcaccccaagtttgtaggacctgaagaaatcgcgttgagcagtactgctaacagagctcagataagaggctgttacctaacacctgggagccttgtggaggttggctgggggtcacgtgactgcacctggccattgtctccggcaaccggagaaggctgttagtagtctctcggccctggtctcctggtgacatcagcacct

SEQ ID NO: 54054 - DNA, 379 bp, Homo sapiens
ctttaaatagagatgaagcttcagtcgcttgcttgctgttcacctcctgctgtgtggctcagttcctaacaggccgtggagcagtactggggtcccaacccatgatttacatgttcaacagaaataagaaaaggtgcttagcatcattacctagttctccagaggacaaaactctcaaaataagaaatggcctaggggcaaaagtcaaatcccaggtactatcaggaaaacatagtcataagtaaagttcaagacaacaacaggtgcagcagctcacacctgcaatcccagtgctttgggaagccaaggtgggaggattacttgaggccaagagtttgggatcaacttgggcaacatagcaagactcctctgcaaaaaa

SEQ ID NO: 54055 - DNA, 1027 bp, Homo sapiens
gcaatatataactgaaacataattacatacctagaagcgggataatagaaatcaacagggtgattcctactgtaatagaaacctaaaacacatggcaggagctttgggatcaggtggaggatggaagctggaagaaccttgaggagtctgttattgacaaatactattaaagaacagtgagtggggctggccgtggtggctcacacctataatcccagcactttgggaggcagaggtgggccgatcacctgaggtcaggaattcgagaccagcctggtcaacacggtgaaaccctgtctctactaaaaataccaaaattagccaggcgtggtgacgcgtgcctgtaatcctagctactggggaggctgaggcaggagaattgcttgaacccaggaggcggaagttgcagtgagccaagatcgcaccactgccctccagcttgggtgacagagagagactcagtctcaaaataaaataaaataaagaacagtgaggatactgttattgctggctggagaaaagggggattgacttaggtattggaagaacaattagctaaactactctgcagttatgtgaaagctagagaaggtacctagtgaacatgtggatctggctatggagatttctggatagaatggtgaaagggtggaatggttccttttgcatgcctgtgatatagtaccagagaagtgcagtgagctaaaaaagaaactgttccatttttcatcagaatttagaagaagcaattaaagaagccaggacttgcaggatttgaaataaaactacttttcattcctagttctccagaggacaaaactctcaaaataagaaatggcctaggggcaaaagtcaaatcccaggtactatcaggaaaacatagtcataagtaaagttcaagacaacaacaggtgcagcagctcacacctgcaatcccagtgctttgggaagccaaggtgggaggattacttgaggccaagagtttgggatcaacttgggcaacatagcaagactcctctgcaaaaaa

SEQ ID NO: 54056 - DNA, 1027 bp, Homo sapiens
atgggctttgtacctatgttagctttgcagcagaaagctgcagtatctaccatgtgtgttgtgattgtctattaacccttcggctgagccaaagaagttattgaggccagaggggctgtattttattggtttttgtcatccttgacacctctctctcccttacctcgtgcctgctcacctccagctcctctccatcttcccctgatttttttattaatttatcattgtggcaaaagacacataacataaaatttaccttcttaaccactttggttttttggggttttttttgagatggagtgttgctctgttgcccaggctggagtgcaatggtgccatcttggctcaccacaacctccacctcccaggttcaggagaattgcttgaacccaggaggcggaagttgcagtgagccaagatcgcaccactgccctccagcttgggtgacagagagagactcagtctcaaaataaaataaaataaagaacagtgaggatactgttattgctggctggagaaaagggggattgacttaggtattggaagaacaattagctaaactactctgcagttatgtgaaagctagagaaggtacctagtgaacatgtggatctggctatggagatttctggatagaatggtgaaagggtggaatggttccttttgcatgcctgtgatatagtaccagagaagtgcagtgagctaaaaaagaaactgttccatttttcatcagaatttagaagaagcaattaaagaagccaggacttgcaggatttgaaataaaactacttttcattcctagttctccagaggacaaaactctcaaaataagaaatggcctaggggcaaaagtcaaatcccaggtactatcaggaaaacatagtcataagtaaagttcaagacaacaacaggtgcagcagctcacacctgcaatcccagtgctttgggaagccaaggtgggaggattacttgaggccaagagtttgggatcaacttgggcaacatagcaagactcctctgcaaaaaa

SEQ ID NO: 54057 - DNA, 701 bp, Homo sapiens
aaaattctgggattattataacatgagcccctgtgtctggctatatataaaggttcttaaaaataaggaaatctttatatccctttttttgttttctttttttgagaccagggtctgcctgtgtcacccaggctggagtgcagtggcgtgatctcggcccactgtaacctctgcctactgggtccaagagattctccctcctcagcatatttattattttctgttctctggaagactttaataagcttggtgtggtttctcccgtaattgaaagaattcactagtgaaaccatctttacttgagattttctttaaggaaagatttttaataatacattccatttctttatttgactttggggctatttggatattctgtttctttcagcattagtaatttaatttatattttttaagaaatgtgtccgttttatactgacatggttttttttgtttgttttggggggaattttttttttttttgagacagggtgtcactctgttgcccaggctagagtgttgtggcacagttatggctcactacagccttaaactcgtgggctcaagcaatcctcccacctcacaggctcttgagtagctgggaccacaggtgtgtgtcaccacacccagcttattttttttattttttgtagagatttcttctttgacctatagataatttaggaatgtagttttaggcc

SEQ ID NO: 54058 - DNA, 360 bp, Homo sapiens
gggactcctgtgttttagctggattctaggaaattcctctttgtcctccatatgcttcagtccttttatgtggctcctttgaactaggtccagtctccaggaaactggagatgcccctccacaactgttttccaccctgatttgaatccccagtgtcctaggaatcaatatgcggtgagtggttacagtggaggaacgtttataccacaacagcaataaattctctgagggttagtataatataaacaattgacagtgaaacatctgtgcaatactggagtacagcagagctttagcacatgctttagcactacagaactgggattttatgcacgtcaaatcatgtttgacacaccccca

SEQ ID NO: 54059 - DNA, 692 bp, Homo sapiens
agaaatagcatttataaatgctaaataaatacttgctaagtattacagtgcttagaagctgtaagtgatgtgttatgaaacaaacctattgcttcaaattattggaaacttgtactatacatggaatatactcagcttactcatgcctggtgggcctagcatttagctgctagtcttggcttatttaccattagaaattccattgattgttttctcatgtctgtgcctcaatataataaatatttccttgttgtatggatacatgcactaataccttttgattaactacatgataaacacagtctagatcgtttgggtgggtagttctctagaatggagtatttaaaaaatggagactataataaaaatctaaattttaggagtattacaaaataatgcttaacagtttgggaggctgaggcaggaggataatttgaggccaggagtttaagactggcctgggcaacatagcaagacactgtctctacaaaatagcaacaacaaccaaaacaaaaattagctggctgtggtggtgcacacctgtagtcgtagctacttgggtggtgcacacctgtagtcgtagctacttgggaggctcatagggaggattgattgagcctaggagatagaggctttgtgaactctgatagtgccgttgcactccagtctggatgacagcgagactctctcaa

SEQ ID NO: 54060 - DNA, 281 bp, Homo sapiens
gtaagggtggagagagagactcctgcttctgggtgggaacagggtgccagcgtgaattggcactgtcctattgctatgatgatgactttttcctccctgcagctctggagcacttggaagcggttctgaagctcatttgcagctttgcatctgtttgcacgggcgtctcctgctgggagttgaggcttcctgccctcattggctgtctgaggctgcgctccctacctgcccgcagcgtccctgccccccacatccacccccagtagtgtaatgggacagct

SEQ ID NO: 54061 - DNA, 278 bp, Homo sapiens
ttggtcttgagctcctggcctaaactggttctccctcttggcttcctaaagtggtgggattatggtctgaatcatcatgcctggccctgaaaaattattttaatttacaacaccattttacatgttgtgaccctttttaccccttttagagtgtgtgtcttccttactcatttgttaaaacccatttaaaatgtaatcttgtagagcaacaaagattttattatctcagtgcttctgtgcgttggaaattcaggcatggcttagctaggaacctctgg

SEQ ID NO: 54062 - DNA, 4758 bp, Homo sapiens
cttggcagacactggatggttatgagcctgaacaagctgaaaaggggcaggaaaagaagtggaggcagcattcttcctatttaaagctgcatcgcttgaaaaaagttttcgcagactgtgctggagctggtgctgaaaaagggggtttgcagaggctgccctggggctggtgctgaaagaagagcccacagctgacttcatggtgctacaataacctcagaatctacttttcactctcaggagaacccacatgtctaatatttagacatgatggcaaactgggcggaagcaagacctctcctcattcttattgttttattagggcaatttgtctcaataaaagcccaggaagaagacgaggatgaaggatatggtgaagaaatagcctgcactcagaatggccagatgtacttaaacagggacatttggaaacctgccccttgtcagatctgtgtctgtgacaatggagccattctctgtgacaagatagaatgccaggatgtgctggactgtgccgaccctgtaacgccccctggggaatgctgtcctgtctgttcacaaacacctggaggtggcaatacaaattttggtagaggaagaaagggacaaaagggagaaccaggattagtgcctgttgtaacaggcatacgtggtcgtccaggaccggcaggacctccaggatcacagggaccaagaggagagcgagggccaaaaggaagacctggccctcgtggacctcagggaattgatggagaaccaggtgttcctggtcaacctggtgctccaggacctcctggacatccgtcccacccaggacccgatggcttgagcaggccgttttcagctcaaatggctgggttggatgaaaaatctggacttgggagtcaagtaggactaatgcctggctctgtgggtcctgttggcccaaggggaccacagggtttacaaggacagcaaggtggtgcaggacctacaggacctcctggtgaacctggtgatcctggaccaatgggtccgattggttcacgtggaccagagggccctcctggtaaacctggggaagatggtgaacctggcagaaatggaaatcctggtgaagtgggatttgcaggatctccgggagctcgtggatttcctggggctcctggtcttccaggtctgaagggtcaccgaggacacaaaggtcttgaaggccctaaaggtgaagttggagcacctggttccaagggtgaagctggccccactggtccaatgggtgccatgggtcctctgggtccgaggggaatgccaggagagagagggagacttgggccacagggtgctcctggacaacgaggtgcacatggtatgcctggaaaacctggaccaatgggtcctcttgggataccaggctcttctggttttccaggaaatcctggaatgaagggagaagcaggtcctacaggggcgcgaggccctgaaggtcctcaggggcagagaggtgaaactgggcccccaggtccagttggctctccaggtcttcctggtgcaataggaactgatggtactcctggtcccaaaggcccaacgggctctccgggtacctctggtcctcctggctcagcagggcctcctggatctccaggacctcagggtagcactggtcctcaggggaattcgggccttccgggtgatccaggtttcaaaggagaagctggcccaaaaggggaaccagggccacatggtattcagggtccgataggcccacccggtgaagaaggcaaaagaggtcccagaggtgacccaggaacacttggtcctccagggccagtgggagaaaggggtgctcctggcaatcgtggttttccaggctctgatggtttacctgggccaaagggtgctcaaggagaacggggtcctgtaggttcttcaggacccaaaggaagccagggggatccaggacgtccaggggaacctgggcttccaggtgctcggggtttgacaggaaatcctggtgttcaaggtcctgaaggaaaacttggacctttgggtgcgccaggggaagatggccgtccaggtcctccaggctccataggaatcaaagggcagcccgggaccatgggccttccaggccccaaaggtagcaatggtgaccctgggaaacctggagaagcaggaaatcctggagttcctgggcaaaggggagctcctggaaaagatggtaaagttggtccttatggtcctcctgggccgccgggtctacgtggtgaaagaggagaacaaggacctccagggcccacaggttttcaggggcatcctggtcctccaggtcctcctggagaaggtggaaaaccaggtgatcaaggtgttcctggaggtcccggagcagttggcccgttaggacctagaggagaacgaggaaatcctggggaaagaggagaacctgggataactggactccctggtgagaagggaatggctggaggacatggtcctgatggcccaaaaggcagtccaggtccatctgggacccctggagatacaggcccaccaggtcttcaaggtatgccgggagaaagaggaattgcaggaactcctggccccaagggtgacagaggtggcataggagaaaaaggtgctgaaggcacagctggaaatgatggtgcaggaggtcttccaggtcctttgggccctccaggtccggcaggcctactgggagaaaagggtgaacctggtcctcgaggtttagttggtcctcctggctcccggggcaatcctggttctcgaggtgaaaatgggccaactggagctgttggttttgccggaccccaggggtctgacggacagcctggagtaaaaggtgaacctggagagccaggacagaagggagatgctggttctcctggaccacaaggtttagcaggatcccctggccctcatggtcctaatggtgttcctggactaaaaggtggtcgaggaacccaaggtccgcctggtgctacaggatttcctggttctgcgggcagagttggacctccaggccctgctggagctccaggacctgcgggacccctaggggaacccgggaaggagggacctccaggtcctcgtggggaccctggctctcatgggcgtgtgggagtccgaggaccagctggcccccctggtggcccaggagacaaaggggacccaggagaagatgggcaacctggtccagatggcccccctggtccagctggaacgaccgggcagagaggaattgttggcatgcctgggcaacgtggagagagaggcatgcccggcctaccaggcccagcgggaacaccaggaaaagtaggaccaactggtgcaacaggagataaaggtccacctggacctgtggggcccccaggctccaatggtcctgtaggggaacctggaccagaaggtccagctggcaatgatggtaccccaggacgggatggtgctgttggagaacgtggtgatcgtggagaccctgggcctgcaggtctgccaggctctcagggtgcccctggaactcctggccctgtgggtgctccaggagatgcaggacaaagaggagatccgggttctcggggtcctataggacacctgggtcgagctggaaaacgtggattacctggaccccaaggacctcgtggtgacaaaggtgatcatggagaccgaggcgacagaggtcagaagggccacagaggctttactggtcttcagggtcttcctggccctcctggtccaaatggtgaacaaggaagtgctggaatccctggaccatttggcccaagaggtcctccaggcccagttggtccttcaggtaaagaaggaaaccctgggccacttgggccattgggacctccaggtgtacgaggcagtgtaggagaagcaggacctgagggccctcctggtgagcctggcccacctggccctccgggtccccctggccaccttacagctgctcttggggatatcatggggcactatgatgaaagcatgccagatccacttcctgagtttactgaagatcaggcggctcctgatgacaaaaacaaaacggacccaggggttcatgctaccctgaagtcactcagtagtcagattgaaaccatgcgcagccccgatggctcgaaaaagcacccagcccgcacgtgtgatgacctaaagctttgccattccgcaaagcagagtggtgaatactggattgatcctaaccaaggatctgttgaagatgccatcaaagtttactgcaacatggaaacaggagaaacatgtatttcagcaaacccatccagtgtaccacgtaaaacctggtgggccagtaaatctcctgacaataaacctgtttggtatggtcttgatatgaacagagggtctcagttcgcttatggagaccaccaatcacctaatacagccattactcagatgacttttttgcgccttttatcaaaagaagcctcccagaacatcacttacatctgtaaaaacagtgtaggatacatggacgatcaagctaagaacctcaaaaaagctgtggttctcaaaggggcaaatgacttagatatcaaagcagagggaaatattagattccggtatatcgttcttcaagacacttgctctaagcggaatggaaatgtgggcaagactgtctttgaatatagaacacagaatgtggcacgcttgcccatcatagatcttgctcctgtggatgttggcggcacagaccaggaattcggcgttgaaattgggccagtttgttttgtgtaa

SEQ ID NO: 54063 - DNA, 701 bp, Homo sapiens
cttggcagacactggatggttatgagcctgaacaagctgaaaaggggcaggaaaagaagtggaggcagcattcttcctatttaaagctgcatcgcttgaaaaaagttttcgcagactgtgctggagctggtgctgaaaaagggggtttgcagaggctgccctggggctggtgctgaaagaagagcccacagctgacttcatggtgctacaataacctcagaatctacttttcactctcaggagaacccacatgtctaatatttagacatgatggcaaactgggcggaagcaagacctctcctcattcttattgttttattagggcaatttgtctcaataaaagcccaggaagaagacgaggatgaaggatatggtgaagaaatagcctgcactcagaatggccagatgtacttaaacagggacatttggaaacctgccccttgtcagatctgtgtctgtgacaatggagccattctctgtgacaagatagaatgccaggatgtgctggactgtgccgaccctgtaacgccccctggggttgtataaaaacaagaaacgattagttcattaaactttttctttaccttctggtagtaaaaatagataaaataattccgtttcaactactgtgtgtaaaaagcctgtatcatatgtaactgggacttttgtaaataaatgtttgtgcgctctgctaaaaaaaa

SEQ ID NO: 54064 - DNA, 208 bp, Homo sapiens
taaataaaaagaaatggattaaaggttcagcagatgggcaaaagttctagagtagataaaatgtgggttagatttataaaaacacttcctgggactgactactatttgagattataatcagttcctgaagaagaatactggatatctttttaaaacaaaaagagataacagtaatcctttatcaactgagtgcttcctttgtaccaag

SEQ ID NO: 54065 - DNA, 481 bp, Homo sapiens
tgaatgcctggtttgaattataagattatctcttagaccagtcactgtggccacagatagtccagcccagcggggtcactgtccacctgtttgacgttgtgtttgtgggttagagaggaaagcaggagggatgggttaggtgtggtagaagaactacagggaaaattttcagcttgatataagaaaataatttctgccagtactgtctaaggcagcctcttgaggtactaggctccctaccaatgcacacatttttggaaagaggatagaactgttccatgatgctattgaagggttcagatactacatggatggtttagctaattgccgtttaatatcccttttcagcctgtgagtctgtgagcctacaaaattctatcatgtaacttcgtttatgttaatggcaataatcgctcatttgtattgtactttacatcttgcaataaaaacatgttaacaatagaaaatgaatatacaaaaa

SEQ ID NO: 54066 - DNA, 377 bp, Homo sapiens
atttaaattctcttatttctttattcataagcgttgtttgccacttaatgatattcccctttgttttttcctggctgaactcatttccaaagagtttgagagctggggaaaggataaaagtaaggggacatcatagacatccccacacattgttgcagtggtgctgtagtctgattgtgatcccccgaaattcatatgcttatgacttaacctcaaaggtgatggtagtaatagctggggcctttgggaggtagttaagtcagtcatgacagtggccccttcatgaatgggattagtaccttataaaagagaccccagagagctaacttgctccttccaccatatgaggacacatggagaagttgctgtctatgaat

SEQ ID NO: 54067 - DNA, 365 bp, Homo sapiens
tggagggtggttcctgctcaatcagctcttggagtgcattacatttgtttcctgcagcaggtgtgtgtcctcgcagactggggccatcgacccagtgtccggggatgcccttctgactcctagagggccggactgtcaccaagcatgtgtcacctacccggcccacgccaagggcaacatactggactgagcagtgtgggtgcgtgaacactggcgcagggtttgcccctgagcctgggctggaggcctgggaccctggaccccaagttgccttccaggagcgacaatgacacttcaaagggtgggctgggggcagtcggggggcaaagtctagtggagggggtgacttcagtcaccaggagctg

SEQ ID NO: 54068 - DNA, 330 bp, Homo sapiens
gcaaatttacaaataaatacaaatccatatacaaaaaccacaacaaaaccataaagggacaagtaaagaaagaaagataatgtggtgtaagaagacagagggccaagacaaagcagagatgcccactggggctaaaattttctcagcctcaggctcaggtgacagtgagggataaaatactaaccttgagccacacaaatctgaatgaaaaggcagatcatggaggtttgaggcacggacattcttgccctgaagtttcagagcatcacaaattttcctagtttccttttcatagaatattattctgacttggttcccttatcatacatt

SEQ ID NO: 54069 - DNA, 547 bp, Homo sapiens
atatttgtgaaaaattggataaaggatgaggaacaggggcaatttagaagattgtttagtatctatattcttatttaacagcagccttcagagctaaagaagcccaaaggcctcttaacacctaatcacccatttattcctcttaaactctcacctgcaatcaaaacctattcagaaaaccagaattttaatgtaaagatctcagtatgaaggtttttggtattttatgatctaaacaaaccttccaaagtctggtgaggctcaagttggcaaaccacctgcaatcttcccactaaactatatttagtatcccactgtagcacccactgcaactgacatatgaatacactgtgctaacaaatacattacttaatacaaaactcttcaatttattacattgtgtcataaatttgttttgctttataagaaaatagattttaactcaaaaagtttcttatttggaacaaatgcatgaagcaaaggttttcaagcactggacatcaagcaaccaacaacttaattcccaggaaatgaaaaactgatgagg

SEQ ID NO: 54070 - DNA, 1551 bp, Homo sapiens
agaagggagggtagtggggacagtacctcacttgtctgctcgatgtcagcagtggctggagaatctctcgccaggtgccatcttgccaatctcttctccctctgccctctgtgggtcttttgttgagggctgggctgtacatgcatagtatgagattctgtgaggcctagaaaagagcagctgctatggggttgaaagaagaatggagaaggccgggtgcagtggctcatgcctgtaatcccagcattttgggaggccgaggtgggtggatcagttgaagtcaggagtttgagaccagcctggccaacatggtgaaaccccatctctactgaaaatacagaaattagctgggtatggtggcacatgcctgtagtacaagctacttgagaggctgaggcaggagaatggtttgaacctgggaggtagaggttgcagtgagccaacattgcgttattgcactccagcctgggtgacagagcaagactctgtctcaaaaaaaaaaaaaaaaaaaaaaaaagaatggagatactagaggttgcacagtgctgagaaatatgaggttctgacctagccagagtggagagaactttttaacatcataggcattcaattgaaaaaccacaccttaggggaaagaaccacctcctagagtaaagactactctaggcagggtgtggtggctcacacctgtaatcccagaactttgggaggccaaggtgggcgaatcacgaggtcaggagtttgagactggcctggccaatatggtgaaaccccgtctctaccaaaaatataaaaattagctgggtgtggtggcaggtgcctgtagtcccagctactcaggaggctgaggtgggagaatggcttgaacctgggaggcggaggttgcagtgagccgagatcacgccactgcactccagcctgggtgacagagtgagactccatctcaagaaaaaaaagaaaaaaaagatgagaagagaacagatggaaaattagagaaggggaggccaatgaaaggtagagaaaggaaagaaagggaagaggtgcacagaaaaaaaaaggtggggctgggcgtggtggctcccacctgtaatcccagcactttgggaggccgaggtgggcggatcatgaggtcaggagatcgagaccatcctggctaacatggtgaaaccccgtctctacgaaaaatacaaaaaaattagccgggtgtggtggtgggcacctgtagtcccagctactagggaggctgaggcaggagaatggcgtgaacctgggaggcagagcatgcagtgagctgagatcacgccactgaatagagccccagagacctgtgggacaataacaaaagaagtaaataacacatatcgcaagagttacagaataagaagtgagagaaaatgtggggttgaaaatatattggatgaagtaaggctgaaattttcctaaattttgtgaaaggtataaacttacagattcaagaagttgcgaatgaatgccaaagaggataaactcaaagaaatacatgctaagatactttttttttcttttttttag

SEQ ID NO: 54071 - DNA, 505 bp, Homo sapiens
aataaataaaaccatttttattccaccacaaaaatgagcatgaaaaagattttaaaaattgaactgtaacacacagaaaagtaaacaaagcaacttccatttctggaaatgctgggattacaggcatgagccaccgtgcctgacctgctaagacacatcttaatgaaacttttgaaaactaaaaggaaaagtcttgaaagtggctacagagaaatgatgtgttgtatataggggaacaccaatttgaatggcagcaaatttttcacctgaaacaatggaggtcagaaggcagtggcacaatatttttcaagttatctcaagaagataactatcaattacaaattctatctctggtgacgatatccttgaggaatgaaggagaaataaagacatttttacacaaagaaaacagagaatttgatgctagcagacctactctcaaagaatggctgatggaagttctccaaacaaaggaaattataacagaagacatggaacttcaaaa

SEQ ID NO: 54072 - DNA, 543 bp, Homo sapiens
agaagggagggtagtggggacagtacctcacttgtctgctcgatgtcagcagtggctggagaatctctcgccaggtgccatcttgccaatctcttctccctctgccctctgtgggtcttttgttgagggctgggctgtacatgcatatgctgggattacaggcatgagccaccgtgcctgacctgctaagacacatcttaatgaaacttttgaaaactaaaaggaaaagtcttgaaagtggctacagagaaatgatgtgttgtatataggggaacaccaatttgaatggcagcaaatttttcacctgaaacaatggaggtcagaaggcagtggcacaatatttttcaagttatctcaagaagataactatcaattacaaattctatctctggtgacgatatccttgaggaatgaaggagaaataaagacatttttacacaaagaaaacagagaatttgatgctagcagacctactctcaaagaatggctgatggaagttctccaaacaaaggaaattataacagaagacatggaacttcaaaa

SEQ ID NO: 54073 - DNA, 216 bp, Homo sapiens
aataaataaaaccatttttattccaccacaaaaatgagcatgaaaaagattttaaaaattgaactgtaacacacagaaaagtaaacaaagcaacttccatttctggaaatgatgggataatcgatactgcacctactctctccccataaacaactgtaaaactaaccaacatataatgaggcaactattttgagacattgcacaataagtactcta

SEQ ID NO: 54074 - DNA, 366 bp, Homo sapiens
atttcaccttgttagccagggtggtctcgatctcctgacatcgtgatctgcccaccttgacctcccaaagtgctgggattacaggtgcgagccaccgcgcccatcctgtattgttaatagagaccgggtttcaccatgttggccaggccggtttagaactgttgacttcaagtgatccacctgcctcagcctcccaaagtgctaggattacaggtgtgagccaccgcacccggcctcaggtgatgcttcttaaagagagcgtcctggggtgtgaggtctgcttgttggagaggttggtgctgagtcacccgcctccccagaactgcccagggtgggagcctctcagagtcgaaggtctctgcttct

SEQ ID NO: 54075 - DNA, 245 bp, Homo sapiens
gacctctgtcctggaaaattcatctcccaagttctcttccggcactggcgttcctgggtgtcctaaatttggcccctgttatttctgaactctgttttggctctgttccctcccaggagccaggacaggcacgttctctgcatcttgtcccctgacgcccagaggcttggctcggctcaggcattcttggaaatatctggctccaggaaaggcagaggcctcctgagtcggcccagagggaacct

SEQ ID NO: 54076 - DNA, 380 bp, Homo sapiens
gccaccttaagcaagttacttctctttagctgattattaaatagaataacatatggtaaatgtgtgccgtatagaagaaataataatgttagctgttccactagcaccactaagtcagcatgtcttaaaaatacatccactatctttcacccatgcactctttcagggctttttactttggctgggaatttgagagtcatccttggtactttcttctttctcacctcccacatccagatggttttaaggtccagccaattttttgatacaatgttatttatattcattcatatctgtccaaacctataatctactacactagttgaaatcctcattttctctcccctaaatcattgcatttagtttttaattggccttcc

SEQ ID NO: 54077 - DNA, 361 bp, Homo sapiens
cttcacaatctggccagtcagcatgggtgaaccttgaggacattatggtaagggaataaggcagttcccaaaggaccaacactgtgattccacttatctcaagtacctcagggagtcagattcctagagacagagagtggaatgtggatgccaggggctctggggaggggaaaatggggggttactgctcaatgggtacaaagtttcagttctgcaagatgaaatgagctctggagatggatgggggtgatgggtgcacgacaatgtgaatgtatgtaataccactcagtgtacactccaaaacgctgaagatgcttttatgttgtatgcatttttataataaataaattatacaataaag

SEQ ID NO: 54078 - DNA, 281 bp, Homo sapiens
gagggcgggacgtcactggctctgtccccgtcacccatgacctgcacgtcctggcagtggtgagcgcccagtgtgtgctgtgggacagaattatctctaaacccccgaaagaggatcctctccccaacttaactccagcctcggagggcctcgggggtctatggcacactctccctgctggctttgttctggaaagggctggcgggacatgaccggccccacgttgcactctgagggcagctcgggggtctgcaggggaccatcctgtgtaacctgctgac

SEQ ID NO: 54079 - DNA, 244 bp, Homo sapiens
gacatgacatgacatgacataacatgacataacataacataacataaaatacactgggaggctgaggcaggagggaggattgcttgagcagaggagatggaggctgcagcgagctgtaaacatgcactgcactccggcctgaatgacacagtaaaactctatctcaaaaagaaagaaagaaagaatgttaacttgccgacacacatgctctcttccattctttttcctctccttacaccatccc

SEQ ID NO: 54080 - DNA, 370 bp, Homo sapiens
gcaattccaagatatccattgtaattactctggatttaaatagaactggtctcgtagcacaagaattcctgatagcaagatacttttcataagataccttcaacccggttaattttttttctgtatctgataaggtaaagtttagttcaagagtacagaacacatttatttacttttttgtctttctgaaagtacaaaggaccacccttatcaatctgtctttcccagctacttggaactctagtgacttttctctttgtgttttatagaaatagtttgtttttatgattcatttttgaaatgtgatttgtaggtatgcagaggagtaaattgtgaaaatttttaaggtattctgaagagacactttaac

SEQ ID NO: 54081 - DNA, 238 bp, Homo sapiens
aggaaaaggattgatcacaggagaggtaccaagggagttcccagaataatagaaaagaggatcctcaagaagacagtcacgcaagagaccaagagaagagctaatccaattgatgcaggaggaagtagagcttcagaaagaatgtctcaaaaaagaaaaaaaaagaaaggagtgggttaagtatctgatgaatttaccaaattgagaggagttacatagctctattgaaaatcttaga

SEQ ID NO: 54082 - DNA, 366 bp, Homo sapiens
tcttataagtcacttgaaaatggctttgcttaccagaaaagtttgcatatgtatatgcgtggtttgtataaatgtggagtttctggttgaacttgctctgaactcatgacttacttaaatagccttttactactccattgatctcacctatttgattcctctagtaccaactcagtaggaaaatctcaccagcaaatcttaaaaggaagcccttgatctttgccatctcaaacatcttcatttagctgacatgtgcctctgttctttccaaaagtttcctgttcacagttaaccaaagtcaaagaactaaacttcacaaaaagcaaatgcaatgtctaccaaaaagattcaaaagagttgaaatct

SEQ ID NO: 54083 - DNA, 1415 bp, Homo sapiens
agcgggggaagggcggcggttgctgacggggccgcctggacgacggttgacggaggcgagggaaactgagggcgaaagttgtgtgtcgtgttggcaggagggcctagaagggaaagactgtctagtgggacaatgtcatattataaatttggaatgctgaatagaaaattatagattttgatattgaaggaaatgaagcgaagcctaagtgaaaattcagctcgaagtacagcaggctgtttgcctgttccgttgttcaatcagaaaaagaggaacagacagccattaacttctaatccacttaaagatgattcaggtatcagtaccccttctgacaattatgattttcctcctctacctacagattgggcctgggaagctgtgaatccagagttggctcctgtaatgaaaacagtggacaccgggcaaataccacattcagcttctcgtcctctgagaagtcaagattctgtctttaactctattcaatcaaatactggaagaagccagggtggttggagctacagagatggtaacaaaaataccagcttgaaaacttggaataaaaatgattttaagcctcaatgtaaacgaacaaacttagtggcaaatgatggaaaaaattcttgtccagtgagttcgggagctcaacaacaaaaacaattaagaatacctgaacctcctaacttatctcgcaacaaagaaaccgagctactcagacaaacacattcatcaaaaatatctggctgcacaatgagagggctagacaaaaacagtgcactacagacacttaagcccaattttcaacaaaatcaatataagaaacaaatgttggatgatattccagaagacaacaccctgaaggaaacctcattgtatcagttacagtttaaggaaaaagctagttctttaagaattatttctgcagttattgaaagcatgaagtattggcgtgaacatgcacagaaaactgtacttctttttgaagtattagctgttcttgattcagctgttacacctggcccatattattcgaagacttttcttatgagggatgggaaaaatactctgccttgtgtcttttatgaaatcgatcgtgaacttccgagactgattagaggccgagttcatagatgtgttggcaactatgaccagaaaaagaacattttccaatgtgtttctgtcagaccggcgtctgtttctgaacaaaaaactttccaggcatttgtcaaaattgcagatgttgagatgcagtattatattaatgtgatgaatgaaacttaagtagtgataaaaggaagtttagcataaattatagtagttttctgttattgcttaatttaccatctccatagttttatagctactattgtatttcacttgttgaattaaagtatttgaattcttttaaatgt

SEQ ID NO: 54084 - DNA, 1222 bp, Homo sapiens
agcgggggaagggcggcggttgctgacggggccgcctggacgacggttgacggaggtctagtgggacaatgtcatattataaatttggaatgctgaatagaaaattatagattttgatattgaaggaaatgaagcgaagcctaagtgaaaattcagctcgaagtacagcagattgggcctgggaagctgtgaatccagagttggctcctgtaatgaaaacagtggacaccgggcaaataccacattcagcttctcgtcctctgagaagtcaagattctgtctttaactctattcaatcaaatactggaagaagccagggtggttggagctacagagatggtaacaaaaataccagcttgaaaacttggaataaaaatgattttaagcctcaatgtaaacgaacaaacttagtggcaaatgatggaaaaaattcttgtccagtgagttcgggagctcaacaacaaaaacaattaagaatacctgaacctcctaacttatctcgcaacaaagaaaccgagctactcagacaaacacattcatcaaaaatatctggctgcacaatgagagggctagacaaaaacagtgcactacagacacttaagcccaattttcaacaaaatcaatataagaaacaaatgttggatgatattccagaagacaacaccctgaaggaaacctcattgtatcagttacagtttaaggaaaaagctagttctttaagaattatttctgcagttattgaaagcatgaagtattggcgtgaacatgcacagaaaactgtacttctttttgaagtattagctgttcttgattcagctgttacacctggcccatattattcgaagacttttcttatgagggatgggaaaaatactctgccttgtgtcttttatgaaatcgatcgtgaacttccgagactgattagaggccgagttcatagatgtgttggcaactatgaccagaaaaagaacattttccaatgtgtttctgtcagaccggcgtctgtttctgaacaaaaaactttccaggcatttgtcaaaattgcagatgttgagatgcagtattatattaatgtgatgaatgaaacttaagtagtgataaaaggaagtttagcataaattatagtagttttctgttattgcttaatttaccatctccatagttttatagctactattgtatttcacttgttgaattaaagtatttgaattcttttaaatgt

SEQ ID NO: 54085 - DNA, 1351 bp, Homo sapiens
agcgggggaagggcggcggttgctgacggggccgcctggacgacggttgacggaggtctagtgggacaatgtcatattataaatttggaatgctgaatagaaaattatagattttgatattgaaggaaatgaagcgaagcctaagtgaaaattcagctcgaagtacagcaggctgtttgcctgttccgttgttcaatcagaaaaagaggaacagacagccattaacttctaatccacttaaagatgattcaggtatcagtaccccttctgacaattatgattttcctcctctacctacagattgggcctgggaagctgtgaatccagagttggctcctgtaatgaaaacagtggacaccgggcaaataccacattcagcttctcgtcctctgagaagtcaagattctgtctttaactctattcaatcaaatactggaagaagccagggtggttggagctacagagatggtaacaaaaataccagcttgaaaacttggaataaaaatgattttaagcctcaatgtaaacgaacaaacttagtggcaaatgatggaaaaaattcttgtccagtgagttcgggagctcaacaacaaaaacaattaagaatacctgaacctcctaacttatctcgcaacaaagaaaccgagctactcagacaaacacattcatcaaaaatatctggctgcacaatgagagggctagacaaaaacagtgcactacagacacttaagcccaattttcaacaaaatcaatataagaaacaaatgttggatgatattccagaagacaacaccctgaaggaaacctcattgtatcagttacagtttaaggaaaaagctagttctttaagaattatttctgcagttattgaaagcatgaagtattggcgtgaacatgcacagaaaactgtacttctttttgaagtattagctgttcttgattcagctgttacacctggcccatattattcgaagacttttcttatgagggatgggaaaaatactctgccttgtgtcttttatgaaatcgatcgtgaacttccgagactgattagaggccgagttcatagatgtgttggcaactatgaccagaaaaagaacattttccaatgtgtttctgtcagaccggcgtctgtttctgaacaaaaaactttccaggcatttgtcaaaattgcagatgttgagatgcagtattatattaatgtgatgaatgaaacttaagtagtgataaaaggaagtttagcataaattatagtagttttctgttattgcttaatttaccatctccatagttttatagctactattgtatttcacttgttgaattaaagtatttgaattcttttaaatgt

SEQ ID NO: 54086 - DNA, 1373 bp, Homo sapiens
agcgggggaagggcggcggttgctgacggggccgcctggacgacggttgacggaggcgagggaaactgagggcgaaagtctagtgggacaatgtcatattataaatttggaatgctgaatagaaaattatagattttgatattgaaggaaatgaagcgaagcctaagtgaaaattcagctcgaagtacagcaggctgtttgcctgttccgttgttcaatcagaaaaagaggaacagacagccattaacttctaatccacttaaagatgattcaggtatcagtaccccttctgacaattatgattttcctcctctacctacagattgggcctgggaagctgtgaatccagagttggctcctgtaatgaaaacagtggacaccgggcaaataccacattcagcttctcgtcctctgagaagtcaagattctgtctttaactctattcaatcaaatactggaagaagccagggtggttggagctacagagatggtaacaaaaataccagcttgaaaacttggaataaaaatgattttaagcctcaatgtaaacgaacaaacttagtggcaaatgatggaaaaaattcttgtccagtgagttcgggagctcaacaacaaaaacaattaagaatacctgaacctcctaacttatctcgcaacaaagaaaccgagctactcagacaaacacattcatcaaaaatatctggctgcacaatgagagggctagacaaaaacagtgcactacagacacttaagcccaattttcaacaaaatcaatataagaaacaaatgttggatgatattccagaagacaacaccctgaaggaaacctcattgtatcagttacagtttaaggaaaaagctagttctttaagaattatttctgcagttattgaaagcatgaagtattggcgtgaacatgcacagaaaactgtacttctttttgaagtattagctgttcttgattcagctgttacacctggcccatattattcgaagacttttcttatgagggatgggaaaaatactctgccttgtgtcttttatgaaatcgatcgtgaacttccgagactgattagaggccgagttcatagatgtgttggcaactatgaccagaaaaagaacattttccaatgtgtttctgtcagaccggcgtctgtttctgaacaaaaaactttccaggcatttgtcaaaattgcagatgttgagatgcagtattatattaatgtgatgaatgaaacttaagtagtgataaaaggaagtttagcataaattatagtagttttctgttattgcttaatttaccatctccatagttttatagctactattgtatttcacttgttgaattaaagtatttgaattcttttaaatgt

SEQ ID NO: 54087 - DNA, 1514 bp, Homo sapiens
agcgggggaagggcggcggttgctgacggggccgcctggacgacggttgacggaggcgagggaaactgagggcgaaagttgtgtgtcgtgttggcaggagggcctagaagggaaagactgtgcgttgataccaaactgcccccactccgtgggcgggtcaggagaggcctttggaagagcgtctcaactcggactggagcctcttctctcccaccgcggtctagtgggacaatgtcatattataaatttggaatgctgaatagaaaattatagattttgatattgaaggaaatgaagcgaagcctaagtgaaaattcagctcgaagtacagcaggctgtttgcctgttccgttgttcaatcagaaaaagaggaacagacagccattaacttctaatccacttaaagatgattcaggtatcagtaccccttctgacaattatgattttcctcctctacctacagattgggcctgggaagctgtgaatccagagttggctcctgtaatgaaaacagtggacaccgggcaaataccacattcagcttctcgtcctctgagaagtcaagattctgtctttaactctattcaatcaaatactggaagaagccagggtggttggagctacagagatggtaacaaaaataccagcttgaaaacttggaataaaaatgattttaagcctcaatgtaaacgaacaaacttagtggcaaatgatggaaaaaattcttgtccagtgagttcgggagctcaacaacaaaaacaattaagaatacctgaacctcctaacttatctcgcaacaaagaaaccgagctactcagacaaacacattcatcaaaaatatctggctgcacaatgagagggctagacaaaaacagtgcactacagacacttaagcccaattttcaacaaaatcaatataagaaacaaatgttggatgatattccagaagacaacaccctgaaggaaacctcattgtatcagttacagtttaaggaaaaagctagttctttaagaattatttctgcagttattgaaagcatgaagtattggcgtgaacatgcacagaaaactgtacttctttttgaagtattagctgttcttgattcagctgttacacctggcccatattattcgaagacttttcttatgagggatgggaaaaatactctgccttgtgtcttttatgaaatcgatcgtgaacttccgagactgattagaggccgagttcatagatgtgttggcaactatgaccagaaaaagaacattttccaatgtgtttctgtcagaccggcgtctgtttctgaacaaaaaactttccaggcatttgtcaaaattgcagatgttgagatgcagtattatattaatgtgatgaatgaaacttaagtagtgataaaaggaagtttagcataaattatagtagttttctgttattgcttaatttaccatctccatagttttatagctactattgtatttcacttgttgaattaaagtatttgaattcttttaaatgt

SEQ ID NO: 54088 - DNA, 764 bp, Homo sapiens
attggcttcccgcaagctgcctgttttaacactccttgtgatttatttcaatctcatcttttacaaaggtacggcaatttgttccattttcctgcttccttctcctcttcctccttcttctaagatggcagagagaaactttcttacaggtcccagcaacactgccgtatagcttagaagactggagatatttattctcaatgtcctcagtttactttgcaactggagcattatttgaaagacggcctgccagcattcaactgaacagacacaaatgcaggtatgaatagtgaggggagagagtggtttgaaggctggggttgctgtcaggtctgatgaaccctccagcactcgccatcatcggctacaatgttgaggagactccatcacaacctcagatcaaaagtgtttctttgttcctccaaaccttccaaagcactttatggaccttgtatttggacaacacctccatgaagcttggaagccaataagtcacatcttcattgaacaattcatgaaattacagggcagacgtgaaatatgaccttcgagggaaaagctggcggtggagcccagaacttcattttgctgggatggttccctgccgttattctcctttctcacgaaaggatcctgcagtcaatttacggcatttgtaaataaaggcggctgtgtcagcctcctgcctggagaaaggaaggcagcaccttgaatgctgagagtgtatctcaggcttactctatacttccattacaatatctcag

SEQ ID NO: 54089 - DNA, 3338 bp, Homo sapiens
tagtccaggaattggtacacacagcgatagtgttcaatagcaactaggggattttggtttaggctcttgggaactgaattgtggtaacggaaccttaggaggctgggttggaaatcgagtaggaaggaagagaggatgctccgttgggacacgtgaccagaagttaggggctgcagcggcgctggctttaggtgaacgacgtgaaaattacttttcccactgaaacacacccaagtatatgcccagccttcatgaaagtgaacagagaaacgaagcgcctttatgtgggtggccttagccaggacatttctgaggcagacctacaaaatcagttcagcagatttggagaagtttcggatgtggagatcatcacacggaaagatgaccaaggaaacccacagaaagtttttgcatatatcaacatcagtgtagcagaagcggacctgaaaaaatccatttttcacgttatccagagggacagcagtgatgaagagaattccagtatcgtataactcagcaggtttaggtccattccatttggcatcagcagacatggtagcactttactggtatgtctgttttaaataaaacaaaatggaaaggtggaacattacaaattcaactagcaaaagaaagctttctgcacagattggcccaagagagagaagcagcaaaagctaagaaagaagaatcaacaacaggtaacgccaacttgttagaaaagacaggaggagtggatttccatatgaaagctgtgccagggacagaagtgccagggcataagaattgggttgtgagcaaatttggaagagtcttacctgttcttcaccttaaaaatcaacataaacgtaaaatcatcaaatatgatccctcaaaatactgccacaacctgaagaagataggggaggatttctcaaacaccattcctatatccagcctgacttgggaattagaaggagggaatgaccctatgagtaagaaacggcgaggagagttctctgactttcatggccctcccaagaagataataaaagtgcagaaggatgagagttccactgggtctctggccatgagtacaaggcccaggagggtaatagagagaccacccttaacacagcaacaggctgcacaaaaaagaacttgtgattccattactccttctaaatcatctcctgtacctgtttctgatactcagaaacttaaaaatctaccttttaagacttctggcttggaaactgccaagaagagaaacagcatttctgatgatgatactgattctgaagatgaattgagaatgatgattgcgaaagaggaaaacttacagagaactacacaaccctcaataaatgaatctgaaagtgatccttttgaagttgtaagggatgatttcaaatcaggcgttcacaaactgcattctttaataggtttaggtatcaaaaatcgtgtctcttgccatgatagtgatgatgatattatgagaaatgatcgtgagtatgactcaggagatacagatgaaattattgcgatgaaaaaaaatgttgctaaggtcaaaaacagtacagaattttcacaaatggaaaaatctacgaagaaaacttctttcaaaaatagagaaaactgtgagctttctgatcactgtattaaactacaaaaaagaaaaagcaatgtagagtcagccctcagtcatggattaaagtctcttaatcgtaaatctccctctcactccagtagcagtgaagatgctgattctgcatcagaattagctgactctgaaggaggtgaggagtataatgccatgatgaaaaactgccttcgtgtgaatctcactttagctgatttggaacaattggctggcagtgatctgaaggttccaaatgaagatactaagagtgatggaccagaaaccaccacccaatgcaagtttgacagaggctccaagagccccaagactcccactggcctccgcagaggccgacagtgtattcgtcctgcggagattgtggcttccctgttagaaggagaggagaacacctgtggcaaacagaaaccaaaggaaaacaatttaaagccaaaatttcaggctttcaagggagtaggctgtctatatgaaaaggagtcaatgaaaaaatccttgaaagacagtgttgcctctaacaataaagatcagaattccatgaaacatgaggatcccagtatcatatccatggaagatgggtccccatatgttaatggctcattaggtgaagtgactccatgccaacatgcaaagaaggcgaatggcccaaactatattcagcctcaaaaaagacagaccacttttgaaagccaggatcgcaaggcagtgtcccctagcagttctgaaaagagaagtaagaatcctatttctaggccattagaaggtaagaagtccttaagtcttagtgcaaagactcacaacataggctttgacaaagacagctgccatagtaccacaaagacagaagcttcacaggaagagcggtctgattcaagcggcctcacatctctcaagaaatcaccaaaggtctcatccaaggacactcgggaaatcaaaactgatttctcactttctattagtaattcgtcagatgtgagtgctaaagataagcatgctgaagacaatgagaagcgtttggcagccttggaagcgaggcaaaaagcaaaagaagtgcagaagaagctggtgcataatgctctggcaaatttggatggtcatccagaggataagccaacgcacatcatcttcggttctgacagtgaatgtgaaacagaggagacatcgactcaggagcagagccatccaggagaggaatgggtgaaagagtctatgggtaaaacatcagggaagctgtttgatagcagtgatgatgacgaatctgattctgaagatgacagtaataggttcaaaattaaacctcagtttgagggcagagctggacagaagctcatggatttacagtcgcactttggcaccgatgacagattccgcatggactctcgatttctagaaactgacagtgaagaggaacaggaagaggtaaatgaaaagaaaactgctgaggaagaagagcttgctgaagaaaaaaagaaagccctgaatgttgtacaaagtgttttgcaaatcaacttaagcaattctacaaacagaggatcagtagctgctaagaaatttaaggacatcatacattatgatccaacgaagcaagaccatgccacttacgaaagaaaaagagatgataagccaaaagaaagtaaagcaaaacgaaaaaagaaaagggaggaagctgagaaactacctgaggtgtcatcagacaatgtat

SEQ ID NO: 54090 - DNA, 3775 bp, Homo sapiens
tagtccaggaattggtacacacagcgatagtgttcaatagcaactaggggattttggtttaggctcttgggaactgaattgtggtaacggaaccttaggaggctgggttggaaatcgagtaggaaggaagagaggatgctccgttgggacacgtgaccagaagttaggggctgcagcggcgctggctttaggtgaacgacgtgaaaattacttttcccactgaaacacacccaagtatatgcccagccttcatgaaagtgaacagagaaacgaagcgcctttatgtgggtggccttagccaggacatttctgaggcagacctacaaaatcagttcagcagatttggagaagtttcggatgtggagatcatcacacggaaagatgaccaaggaaacccacagaaagtttttgcatatatcaacatcagtgtagcagaagcggacctgaaaaaatccatttttcacgttatccagagggacagcagtgatgaagagaattccagtatcgtataactcagcaggtttaggtccattccatttggcatcagcagacatggtagcactttactggtatgtctgttttaaataaaacaaaatggaaaggtggaacattacaaattcaactagcaaaagaaagctttctgcacagcagttgccagcctactgtgtacaggcactagagccccatgctgagcaggttgagcacacagtgctgctgcttggagtatctgcgtggatatgcctgagaagcatgggtctgatggttattctgggacataaaggagacagaccagaggcaaagaggccagtgaggactgctctgtgcagttgtccaggcctgaagaaggtggcggtgatttgaatcagaagaggtggcattctcttcattaggaggatatggataatcaagacctaacaaattgggctccgaaagataccttcgtcatggggaagagtgaatggagagaagataatataaaatgccaaacgtatataaattgaaaggggaaaattgagagaacttgcgatccatggtcttggtcttccataaaggggaactgggacatccactggagcagagcacagattggcccaagagagagaagcagcaaaagctaagaaagaagaatcaacaacaggtaacgccaacttgttagaaaagacaggaggagtggatttccatatgaaagctgtgccagggacagaagtgccagggcataagaattgggttgtgagcaaatttggaagagtcttacctgttcttcaccttaaaaatcaacataaacgtaaaatcatcaaatatgatccctcaaaatactgccacaacctgaagaagataggggaggatttctcaaacaccattcctatatccagcctgacttgggaattagaaggagggaatgaccctatgagtaagaaacggcgaggagagttctctgactttcatggccctcccaagaagataataaaagtgcagaaggatgagagttccactgggtctctggccatgagtacaaggcccaggagggtaatagagagaccacccttaacacagcaacaggctgcacaaaaaagaacttgtgattccattactccttctaaatcatctcctgtacctgtttctgatactcagaaacttaaaaatctaccttttaagacttctggcttggaaactgccaagaagagaaacagcatttctgatgatgatactgattctgaagatgaattgagaatgatgattgcgaaagaggaaaacttacagagaactacacaaccctcaataaatgaatctgaaagtgatccttttgaagttgtaagggatgatttcaaatcaggcgttcacaaactgcattctttaataggtttaggtatcaaaaatcgtgtctcttgccatgatagtgatgatgatattatgagaaatgatcgtgagtatgactcaggagatacagatgaaattattgcgatgaaaaaaaatgttgctaaggtcaaaaacagtacagaattttcacaaatggaaaaatctacgaagaaaacttctttcaaaaatagagaaaactgtgagctttctgatcactgtattaaactacaaaaaagaaaaagcaatgtagagtcagccctcagtcatggattaaagtctcttaatcgtaaatctccctctcactccagtagcagtgaagatgctgattctgcatcagaattagctgactctgaaggaggtgaggagtataatgccatgatgaaaaactgccttcgtgtgaatctcactttagctgatttggaacaattggctggcagtgatctgaaggttccaaatgaagatactaagagtgatggaccagaaaccaccacccaatgcaagtttgacagaggctccaagagccccaagactcccactggcctccgcagaggccgacagtgtattcgtcctgcggagattgtggcttccctgttagaaggagaggagaacacctgtggcaaacagaaaccaaaggaaaacaatttaaagccaaaatttcaggctttcaagggagtaggctgtctatatgaaaaggagtcaatgaaaaaatccttgaaagacagtgttgcctctaacaataaagatcagaattccatgaaacatgaggatcccagtatcatatccatggaagatgggtccccatatgttaatggctcattaggtgaagtgactccatgccaacatgcaaagaaggcgaatggcccaaactatattcagcctcaaaaaagacagaccacttttgaaagccaggatcgcaaggcagtgtcccctagcagttctgaaaagagaagtaagaatcctatttctaggccattagaaggtaagaagtccttaagtcttagtgcaaagactcacaacataggctttgacaaagacagctgccatagtaccacaaagacagaagcttcacaggaagagcggtctgattcaagcggcctcacatctctcaagaaatcaccaaaggtctcatccaaggacactcgggaaatcaaaactgatttctcactttctattagtaattcgtcagatgtgagtgctaaagataagcatgctgaagacaatgagaagcgtttggcagccttggaagcgaggcaaaaagcaaaagaagtgcagaagaagctggtgcataatgctctggcaaatttggatggtcatccagaggataagccaacgcacatcatcttcggttctgacagtgaatgtgaaacagaggagacatcgactcaggagcagagccatccaggagaggaatgggtgaaagagtctatgggtaaaacatcagggaagctgtttgatagcagtgatgatgacgaatctgattctgaagatgacagtaataggttcaaaattaaacctcagtttgagggcagagctggacagaagctcatggatttacagtcgcactttggcaccgatgacagattccgcatggactctcgatttctagaaactgacagtgaagaggaacaggaagaggtaaatgaaaagaaaactgctgaggaagaagagcttgctgaagaaaaaaagaaagccctgaatgttgtacaaagtgttttgcaaatcaacttaagcaattctacaaacagaggatcagtagctgctaagaaatttaaggacatcatacattatgatccaacgaagcaagaccatgccacttacgaaagaaaaagagatgataagccaaaagaaagtaaagcaaaacgaaaaaagaaaagggaggaagctgagaaactacctgaggtgtcatcagacaatgtat

SEQ ID NO: 54091 - DNA, 1139 bp, Homo sapiens
tagtccaggaattggtacacacagcgatagtgttcaatagcaactaggggattttggtttaggctcttgggaactgaattgtggtaacggaaccttaggaggctgggttggaaatcgagtaggaaggaagagaggatgctccgttgggacacgtgaccagaagttaggggctgcagcggcgctggctttaggtgaacgacgtgaaaattacttttcccactgaaacacacccaagtatatgcccagccttcatgaaagtgaacagagaaacgaagcgcctttatgtgggtggccttagccaggacatttctgaggcagacctacaaaatcagttcagcagatttggagaagtttcggatgtggagatcatcacacggaaagatgaccaaggaaacccacagaaagtttttgcatatatcaacatcagtgtagcagaagcggacctgaaaaaatgtatgtctgttttaaataaaacaaaatggaaaggtggaacattacaaattcaactagcaaaagaaagctttctgatggtcatccagaggataagccaacgcacatcatcttcggttctgacagtgaatgtgaaacagaggagacatcgactcaggagcagagccatccaggagaggaatgggtgaaagagtctatgggtaaaacatcagggaagctgtttgatagcagtgatgatgacgaatctgattctgaagatgacagtaataggttcaaaattaaacctcagtttgagggcagagctggacagaagctcatggatttacagtcgcactttggcaccgatgacagattccgcatggactctcgatttctagaaactgacagtgaagaggaacaggaagaggtaaatgaaaagaaaactgctgaggaagaagagcttgctgaagaaaaaaagaaagccctgaatgttgtacaaagtgttttgcaaatcaacttaagcaattctacaaacagaggatcagtagctgctaagaaatttaaggacatcatacattatgatccaacgaagcaagaccatgccacttacgaaagaaaaagagatgataagccaaaagaaagtaaagcaaaacgaaaaaagaaaagggaggaagctgagaaactacctgaggtgtcatcagacaatgtat

SEQ ID NO: 54092 - DNA, 1135 bp, Homo sapiens
attatgatcatatataaattgattcctgggggataaaaaggaatttcaatgtgctaaaacttgagctaagttattttcccatagtgacttttaaaaatgtggaaatattagaatgttctgattgtcagttctgttaaaaactcaaatgtgttttaaaatcatttcaaatttaaactagcatgggagaatatgtgaaatgtgagaggaaaaaaacaaacaattaaaattgggttcaaacactagaaatattgtatacttttcagattatttataagccataaattgctcaaatcataggcatagaattttagttttccaaggaaattgtagattatttagcataatcatttatagatgtaaagagtgtagactttggagttacatacacctgcatttgaatcctagctctttcattttcttgttgggttccttgggcaatttattcaatttcctggccttcatataggaacctggatcacctttgtcttagtctgttcaggcagctataagaaaataccataaagtgggtggcttataaacaacagaaatgtatttctcacaattctggaagctgggaagtccaaaatcaaggtgctggcaaatttgatgtctggtgaggattgacttcctggttcatgtattgcgccttctccctgtgtcctcacatggtggaagggacagggtagctctctgggacctcttttataagggcacaaatcccaatcttgaggactctgtcttcattacctaatcacctctccaaaggccccctgccaatattattaccttgggaattagcatttcagcacatgaatttttgagggacctttccctatcaaataagaaagaatacagaagagaaaacatgtactgatgacaacctaagaagtggtagtaacatagttttttagcttatatagaaagttagaactgaaaagattattttatctagtctctcaggaaactgaagccctcagaggtagggtaatttgtttaaggttctagctttcatattgcctaagaatagaagatgcagtctttgtgggtttatgcaaattatacagaaatcatatgcaaataaagtatactgtgcctgaatttcatgtttgacatttcaagagacacagaacaccac

SEQ ID NO: 54093 - DNA, 815 bp, Homo sapiens
ataattattaatcacttaattaaagtactttgtcaaatatattaattaattgaatacttgctgttttagtcaaaacagtgttctaaatactgtgagtaaaagaagagtgagtcataaaattttgcgctgacatttacaaattgatagaaatattatcatttattttaaaatacatatgtaaaatcacataaagataaatttgtattcaattaaaaagaaaaataaaatagtcacaatttcagagtctaagtctccaaataaaggaagtctggcaattgttacatgaaatttggaccaaattaaagatggccactctaattcctttatgttgcgtctaatgtggaaaatgatgtgcttgtatgcttcagaaaagacccgataaaccccattgtcaaatggaaacttgagaaaactaagtgtggtagaccaaattatggacccaaagatgtccatgccctaatccctggtacttatgaatatggttgttaaacaaaaagaggaattttgcaaatgtaattgaagatatggacctttaaatatggagataatcctagattatccattcagatcagcctaaatctaatcacataagccctgagagacagagaactttctcagtctggtggcctcaggcatgagccagaaagtcaagtcagcgattccacgtgtgaggattttacacactgttgctgaatctgaaatagaggaaaccatgtgcaagaacttgagagaggtttctagaaactaagagaagccaccagctaacagacagaaaggaagcagtaatttccgttatatagcttcaaaaaaaaaaa

SEQ ID NO: 54094 - DNA, 1166 bp, Homo sapiens
ctctctctccttcctattttcattctatctcttttcctcactctctttttctcccccttgaaggcactgttactagaaatagagagctctggggcttgcctgaagccatgggcagtcaccactccaggattccccttttagcgcctcctccccatcttaatctcaaagtccagcaggatagtgagcagttagagcccggcctccaatctgcttccatgggggttggctttctgagtgggagaaatgactctaatctggagacatttgctgagacccttgtgcctggtcacttccgctcccaggatccttgagatgcatcctttcctgagcctaggtacttcccggacatcagtaaccaagctcagtcttcatacaaagcccagaatgcctccatgtgacttcatgcctgaaagataccagtcccttggctacaaccgtgtcctggaaatccacaaggaacatctttctcctgtggtgacggcatatttccagaaacccctgctgctccaccaggggcacatggagtggctctttgatgctgaaggaaacagatacctggatttcttttccgggattgttactgtcagtgttggccattgccacccaaaggtgaatgcagtggcacaaaagcagctcggccgcctgtggcatacaagcaccgtcttcttccaccctccaatgcatgaatatgcagagaagcttgccgcacttcttcctgagcctcttaaggtcattttcttggtgaacagtggctcagaagccaatgagctggccatgctgatggccagggcgcactcaaacaacatagacatcatttctttcagaggagcctaccatggatgcagtccttacacacttggcttgacaaacgtagggacctacaagatggaactccctggtgggacaggttgccaaccagtgagtttggagatttttctcttgtttctttaaagactgctgggtatgtgaagtagttgatcaggttttcctggtataaggattagaaactaatataaagcctgtcattaatcaggggctcaatttgacctaattgaattggagaccacttgaggacaccattagaaaggccttccgagtctgagtaataattaatgacagagttttaaaatgtattttgcttttaaataaaatcaagtaaactgcaa

SEQ ID NO: 54095 - DNA, 2405 bp, Homo sapiens
ctctctctccttcctattttcattctatctcttttcctcactctctttttctcccccttgaaggcactgttactagaaatagagagctctggggcttgcctgaagccatgggcagtcaccactccaggattccccttttagcgcctcctccccatcttaatctcaaagtccagcaggatagtgagcagttagagcccggcctccaatctgcttccatgggggttggctttctgagtgggagaaatgactctaatctggagacatttgctgagacccttgtgcctggtcacttccgctcccaggatccttgagatgcatcctttcctgagcctaggtacttcccggacatcagtaaccaagctcagtcttcatacaaagcccagaatgcctccatgtgacttcatgcctgaaagataccagtcccttggctacaaccgtgtcctggaaatccacaaggaacatctttctcctgtggtgacggcatatttccagaaacccctgctgctccaccaggggcacatggagtggctctttgatgctgaaggaaacagatacctggatttcttttccgggattgttactgtcagtgttggccattgccacccaaaggtgaatgcagtggcacaaaagcagctcggccgcctgtggcatacaagcaccgtcttcttccaccctccaatgcatgaatatgcagagaagcttgccgcacttcttcctgagcctcttaaggtcattttcttggtgaacagtggctcagaagccaatgagctggccatgctgatggccagggcgcactcaaacaacatagacatcatttctttcagaggagcctaccatggatgcagtccttacacacttggcttgacaaacgtagggacctacaagatggaactccctggtgggacaggttgccaaccaacaatgtgtccagatgtttttcgtggcccttggggaggaagccactgtcgagattctccagtgcaaacaatcaggaagtgcagctgtgcaccagactgctgccaagctaaagatcagtatattgagcaattcaaagatacgctgagcacatctgtggccaagtcaattgctggatttttcgcagaacctattcaaggtgtgaatggagttgtccagtacccaaaggggtttctaaaggaagcctttgagctggtgcgagcaaggggaggcgtgtgcattgcagatgaagtgcagacaggatttggaaggttgggctctcacttctggggcttccaaacccacgatgtcctgcctgacattgtcaccatggctaaagggattgggaatggctttcccatggcagcagtcataaccactccagagattgccaaatctttggcgaaatgcctgcagcacttcaacacctttggagggaaccccatggcctgtgccattggatctgctgtgcttgaggtgattaaagaagaaaatctacaggaaaacagtcaagaagttgggacctacatgttactaaagtttgctaagctgcgggatgaatttgaaattgttggagacgtccgaggcaaaggcctcatgataggcatagaaatggtgcaggataagataagctgtcggcctcttccccgtgaagaagtaaatcagatccatgaggactgcaagcacatgggactcctcgttggcagaggcagcattttttctcagacatttcgcattgcgccctcaatgtgcatcactaaaccagaagttgattttgcagtagaagtatttcgttctgccttaacccaacacatggaaagaagagctaagtaacattgtcagaaataaataaaaccacaagtctcaagaatttgccacgtatgttcaagggtgaatttgaagaatttcagaaccactggtatccagagaaagcctgcagctctccacaggagctgtaaaagtcatggttgactgcctaccaaccatatttgttagcagagcccctcttatcttgagaactccattcttcagggaaaggatctccctagctcagagaataaatcctaattagtttatgttaggtatggtaatttgattcccctttgcagtgattggtttatgcatgaatatgtgatgtatttttgtccagtgaatcttgaagaaaaatcttttggtggaggtgccttcagggaaagttttcttcaccctcactcttcagttcaagaagagatgtcttcttgttgcgctgagaacaccatatgttcatgacgagattcctggcaccatgtcagccggcttgtagtcatgaggacaaccctttttggtgaggttggaagatggatggaagccaagtgcttagtgatgtcaaagaagcactcacttaagcattcctggagccaccctacctcagggcctcttgatatttgaggtaataaattcattgttctgta

SEQ ID NO: 54096 - DNA, 1824 bp, Homo sapiens
ctctctctccttcctattttcattctatctcttttcctcactctctttttctcccccttgaaggcactgttactagaaatagagagctctggggcttgcctgaagccatgggcagtcaccactccaggattccccttttagcgcctcctccccatcttaatctcaaagtccagcaggatagtgagcagttagagcccggcctccaatctgcttccatgggggttggctttctgagtgggagaaatgactctaatctggagacatttgctgagacccttgtgcctggtcacttccgctcccaggatccttgagatgcatcctttcctgagcctaggtacttcccggacatcagtaaccaagctcagtcttcatacaaagcccagaatgcctccatgtgacttcatgcctgaaagataccagtcccttggctacaaccgtgtcctggaaatccacaaggaacatctttctcctgtggtgacggcatatttccagaaacccctgctgctccaccaggggcacatggagtggctctttgatgctgaaggaaacagatacctggatttcttttccgggattgttactgtcagtgttggccattgccacccaaaggtgaatgcagtggcacaaaagcagctcggccgcctgtggcatacaagcaccgtcttcttccaccctccaatgcatgaatatgcagagaagcttgccgcacttcttcctgagcctcttaaggtcattttcttggtgaacagtggctcagaagccaatgagctggccatgctgatggccagggcgcactcaaacaacatagacatcatttctttcagaggagcctaccatggatgcagtccttacacacttggcttgacaaacgtagggacctacaagatggaactccctggtgggacaggttgccaaccaacaatgtgtccagatgtttttcgtggcccttggggaggaagccactgtcgagattctccagtgcaaacaatcaggaagtgcagctgtgcaccagactgctgccaagctaaagatcagtatattgagcaattcaaagatacgctgagcacatctgtggccaagtcaattgctggatttttcgcagaacctattcaaggtgtgaatggagttgtccagtacccaaaggggtttctaaaggaagcctttgagctggtgcgagcaaggggaggcgtgtgcattgcagatgaagtgcagacaggatttggaaggttgggctctcacttctggggcttccaaacccacgatgtcctgcctgacattgtcaccatggctaaagggattgggaatggctttcccatggcagcagtcataaccactccagagattgccaaatctttggcgaaatgcctgcagcacttcaacacctttggagggaaccccatggcctgtgccattggatctgctgtgcttgaggtgattaaagaagaaaatctacaggaaaacagtcaagaagttgggacctacatgttactaaagtttgctaagctgcgggatgaatttgaaattgttggagacgtccgaggcaaaggcctcatgataggcatagaaatggtgcaggataagataagctgtcggcctcttccccgtgaagaagtaaatcagatccatgaggactgcaagcacatgggactcctcgttggcagaggcagcattttttctcagacatttcgcattgcgccctcaatgtgcatcactaaaccagaagttgattttgcagtagaagtatttcgttctgccttaacccaacacatggaaagaagagctaagtaacattgtcagaaataaataaaaccacaagtctcaaga

SEQ ID NO: 54097 - DNA, 1995 bp, Homo sapiens
ctctctctccttcctattttcattctatctcttttcctcactctctttttctcccccttgaaggcactgttactagaaatagagagctctggggcttgcctgaagccatgggcagtcaccactccaggattccccttttagcgcctcctccccatcttaatctcaaagtccagcaggatagtgagcagttagagcccggcctccaatctgcttccatgggggttggctttctgagtgggagaaatgactctaatctggagacatttgctgagacccttgtgcctggtcacttccgctcccaggatccttgagatgcatcctttcctgagcctaggtacttcccggacatcagtaaccaagctcagtcttcatacaaagcccagaatgcctccatgtgacttcatgcctgaaagataccagtcccttggctacaaccgtgtcctggaaatccacaaggaacatctttctcctgtggtgacggcatatttccagaaacccctgctgctccaccaggggcacatggagtggctctttgatgctgaaggaaacagatacctggatttcttttccgggattgttactgtcagtgttggccattgccacccaaaggtgaatgcagtggcacaaaagcagctcggccgcctgtggcatacaagcaccgtcttcttccaccctccaatgcatgaatatgcagagaagcttgccgcacttcttcctgagcctcttaaggtcattttcttggtgaacagtggctcagaagccaatgagctggccatgctgatggccagggcgcactcaaacaacatagacatcatttctttcagaggagcctaccatggatgcagtccttacacacttggcttgacaaacgtagggacctacaagatggaactccctggtgggacaggttgccaaccaacaatgtgtccagatgtttttcgtggcccttggggaggaagccactgtcgagattctccagtgcaaacaatcaggaagtgcagctgtgcaccagactgctgccaagctaaagatcagtatattgagcaattcaaagatacgctgagcacatctgtggccaagtcaattgctggatttttcgcagaacctattcaaggtgtgaatggagttgtccagtacccaaaggggtttctaaaggaagcctttgagctggtgcgagcaaggggaggcgtgtgcattgcagatgaagtgcagacaggatttggaaggttgggctctcacttctggggcttccaaacccacgatgtcctgcctgacattgtcaccatggctaaagggattgggaatggctttcccatggcagcagtcataaccactccagagattgccaaatctttggcgaaatgcctgcagcacttcaacacctttggagggaaccccatggcctgtgccattggatctgctgtgcttgaggttggttccagcggccacattaacctcactcatttcacaaatgactctttcaaaaccacacatgcattagcagaactctatcatgctgagttgttaaaggggagagttaattcatagtttatccattaaagttagatttccatttattattctgccttctccctttttaaagacctactttgggtgctgaaagtattggataagaaataatatataataaacctcacatacatgggaaatataagaattttcctagccagctgaaatttctttgttatcttggtagtgatttatagatgttaactgctatccttgtatttagtttcatgttggccttctcttgtgtattttttcttccttccttttgttgtactattataaattgaatgactaaggagacactgagttctacgtgcttacagcaaggtaattcagctgttcacccctacaccattgatttagcctgggatcgcatctgtttaaaaaaagattttttttaatgttcttgttaacacgcctaatatcatttgcttaaagaactgtaacaaatttctggaagaatgt

SEQ ID NO: 54098 - DNA, 2472 bp, Homo sapiens
ctctctctccttcctattttcattctatctcttttcctcactctctttttctcccccttgaaggcactgttactagaaatagagagctctggggcttgcctgaagccatgggcagtcaccactccaggattccccttttagcgcctcctccccatcttaatctcaaagtccagcaggatagtgagcagttagagcccggcctccaatctgcttccatgggggttggctttctgagtgggagaaatgactctaatctggagacatttgctgagacccttgtgcctggtcacttccgctcccaggatccttgagatgcatcctttcctgagcctaggtacttcccggacatcagtaaccaagctcagtcttcatacaaagcccagaatgcctccatgtgacttcatgcctgaaagataccagtcccttggctacaaccgtgtcctggaaatccacaaggaacatctttctcctgtggtgacggcatatttccagaaacccctgctgctccaccaggggcacatggagtggctctttgatgctgaaggaaacagatacctggatttcttttccgggattgttactgtcagtgttggccattgccacccaaaggtgaatgcagtggcacaaaagcagctcggccgcctgtggcatacaagcaccgtcttcttccaccctccaatgcatgaatatgcagagaagcttgccgcacttcttcctgagcctcttaaggtcattttcttggtgaacagtggctcagaagccaatgagctggccatgctgatggccagggcgcactcaaacaacatagacatcatttctttcagaggagcctaccatggatgcagtccttacacacttggcttgacaaacgtagggacctacaagatggaactccctggtgggacaggttgccaaccaacaatgtgtccagatgtttttcgtggcccttggggaggaagccactgtcgagattctccagtgcaaacaatcaggaagtgcagctgtgcaccagactgctgccaagctaaagatcagtatattgagcaattcaaagatacgctgagcacatctgtggccaagtcaattgctggatttttcgcagaacctattcaaggtgtgaatggagttgtccagtacccaaaggggtttctaaaggaagcctttgagctggtgcgagcaaggggaggcgtgtgcattgcagatgaagtgcagacaggatttggaaggttgggctctcacttctggggcttccaaacccacgatgtcctgcctgacattgtcaccatggctaaagggattgggaatggctttcccatggcagcagtcataaccactccagagattgccaaatctttggcgaaatgcctgcagcacttcaacacctttggagggaaccccatggcctgtgccattggatctgctgtgcttgaggtgattaaagaagaaaatctacaggaaaacagtcaagaagttgggacctacatgttactaaagtttgctaagctgcgggatgaatttgaaattgttggagacgtccgaggcaaaggcctcatgataggcatagaaatggtgcaggataagataagctgtcggcctcttccccgtgaagaagtaaatcagatccatgaggactgcaagcacatgggactcctcgttggcagaggcagcattttttctcagacatttcgcattgcgccctcaatgtgcatcactaaaccagaagttgattttgcagtagaagtatttcgttctgccttaacccaacacatggaaagaagagctaagtaacattgtcagaaataaataaaaccacaagtctcaagaatttgccacgtatgttcaagggtgaatttgaagaatttcagaaccactggtatccagagaaagcctgcagctctccacaggagctgtaaaagtcatggttgactgcctaccaaccatatttgttagcagagcccctcttatcttgagaactccattcttcagggaaaggatctccctagctcagagaataaatcctaattagtttatgttaggtatggtaatttgattcccctttgcagtgattggtttatgcatgaatatgtgatgtatttttgtccagtgaatcttgaagaaaaatcttttggtggaggtgccttcagggaaagttttcttcaccctcactcttcagttcaagaagagatgtcttcttgttgcgctgagaacaccatatgttcatgacgagattcctggcaccatgtcagccggcttgtagtcatgaggacaaccctttttggtgaggttggaagatggatggaagccaagtgcttagtgatgtcaaagaagcactcacttaagcattcctggagccaccctacctcagggcctcttgatatttgaggtaataaattcattgttctgtataaggcttttttatttttcactgttacggtcaaaagcatactgagaaatgaggcagaaaatactccc

SEQ ID NO: 54099 - DNA, 1346 bp, Homo sapiens
gatccacgattacgtggagaagggtactcaagggaaaattgtggatgtggtcaaggtgtgaatggagttgtccagtacccaaaggggtttctaaaggaagcctttgagctggtgcgagcaaggggaggcgtgtgcattgcagatgaagtgcagacaggatttggaaggttgggctctcacttctggggcttccaaacccacgatgtcctgcctgacattgtcaccatggctaaagggattgggaatggctttcccatggcagcagtcataaccactccagagattgccaaatctttggcgaaatgcctgcagcacttcaacacctttggagggaaccccatggcctgtgccattggatctgctgtgcttgaggtgattaaagaagaaaatctacaggaaaacagtcaagaagttgggacctacatgttactaaagtttgctaagctgcgggatgaatttgaaattgttggagacgtccgaggcaaaggcctcatgataggcatagaaatggtgcaggataagataagctgtcggcctcttccccgtgaagaagtaaatcagatccatgaggactgcaagcacatgggactcctcgttggcagaggcagcattttttctcagacatttcgcattgcgccctcaatgtgcatcactaaaccagaagttgattttgcagtagaagtatttcgttctgccttaacccaacacatggaaagaagagctaagtaacattgtcagaaataaataaaaccacaagtctcaagaatttgccacgtatgttcaagggtgaatttgaagaatttcagaaccactggtatccagagaaagcctgcagctctccacaggagctgtaaaagtcatggttgactgcctaccaaccatatttgttagcagagcccctcttatcttgagaactccattcttcagggaaaggatctccctagctcagagaataaatcctaattagtttatgttaggtatggtaatttgattcccctttgcagtgattggtttatgcatgaatatgtgatgtatttttgtccagtgaatcttgaagaaaaatcttttggtggaggtgccttcagggaaagttttcttcaccctcactcttcagttcaagaagagatgtcttcttgttgcgctgagaacaccatatgttcatgacgagattcctggcaccatgtcagccggcttgtagtcatgaggacaaccctttttggtgaggttggaagatggatggaagccaagtgcttagtgatgtcaaagaagcactcacttaagcattcctggagccaccctacctcagggcctcttgatatttgaggtaataaattcattgttctgta

SEQ ID NO: 54100 - DNA, 442 bp, Homo sapiens
ggtacttcaattggaattgtcatgaggcagagttttaactggagaaattgaatgggtttcaaatgaaacttagtctttcctattgtttttaaggtctccccaaaccccttcgaagtgacagccgtaatgcaaagggattgctatgggcgatctcatttgtttcccggtatccccgagaggtgggtactgtgattgctctaactccgtcagagcgcaggcttatagaaggcactgtctccgagctgcgcccctctccccgccattctattaattcccaatgaagaaacgtaaggtgttgtgtatttcagcttcaactgaaggaggctggttaaaaaaggcaggaatcttcagggcccactcctatctggatttgagttaggaatttggcatttttaaataggacttgtgtggcacttggacgatttgagaagccctagtccgg

SEQ ID NO: 54101 - DNA, 208 bp, Homo sapiens
ctgctctaacacgtgaccacagtctagacgcacaatggaccaagtggaaggcaaagcacaagagattatatgacatgaatgaagaaggatggaggagagcagtgtgagagaacatgaagatgactgagcagacaatcaggaatacagccaagggaaacacagcttcacaatggccatgaacacctttggagacatgaccactgaagaa

SEQ ID NO: 54102 - DNA, 903 bp, Homo sapiens
agaatttaagctttccagtcaatgaagctttacattattggcagaaatcatgtcaacaaacagaaaagcgggctgagaaagtgcatatcgttatcaagggttacggaagagaggaattcagtcaactgagaaggtttttttattatgaattttttaactttttgaggttgcaatgagccgagatcgcgtcactgcactccagcctggcaacagcaagactccgtctcaaaaaaaaaaaaattgtgaccaattgctgttagttttaaactggtgcatgaaggtgagttctctccctggccctcaagagatttggaagtttgttttagagagtgctctcagtcacttaaggatgtaaatcttacttacttatttatttattattttttgagacacagtctctcactctgtcatccagggaattagcagcattcccgctgagactggatttgaaacaaagttacagttccttagagccactacagatttctttcctcaatggatacctttagcttaggataaccactaataggaattaatttgaatttacttgaaattatttatgactcttgaccatttgggatacccatttgtcatcttttctactaaaggaaactaaaatattgctctctcaaatactgggtattgttgagctgaagacagagtgcaggggctctctctacctctcctttgtttgcctaaaggtaggacataaatccttttttactgaagacagctactccgcagcccacagatggtgccagtggggcagaggaatctgtgagcagactttaaaccccaaaagactttctaaaaatgaagtctcagttcaggccgaagtgaagtggcttgatcacagttcattgctgggactacagatgcgccaccatgcctagctaattaaaa

SEQ ID NO: 54103 - DNA, 716 bp, Homo sapiens
gaatggcatgaacccaggaggcggagcttgcagtgagccgagattgcgccactgcactccatcctgggcaatggagcaagactccatctccaaaaaaaaaaaaaaaaaaatcccacaaagaaaagctcaggctcagagccttcacgatagaatttttctaagcagttaaggaagaattaacaccaatccttcacagactctttccaagaatacagcaggtgggaactcttcccattcatacggaaacgggaggccgcaccccttaggaatgcacacgtggggtcctcaagaggttacatgcaaactaaccccagcagcacacagagaaggcgcataagccgcgaccaggaggggttgctcccgagtccgtggcaggaaccagaggccacatgtggctgctcgtatttaagttaattaaaatggaacgttggccgggcgtggtggctcacacctgtaatcccagcactttgggaggcggaggcgggcagatcacttgaggtcaggagttccaagaccagcctggccaacacagtgaaaccccgtctctactaaaaatacaaaaaatcagctgggcatcgtggcaggcacctgtaatcccagctactcaggaggctgagccaggacaatcgcctgaacgcgggaggtggaggttgcagtgagctgagattgcgccagtgcactccagcctgggtgacagagcgagactccatctaaaa

SEQ ID NO: 54104 - DNA, 368 bp, Homo sapiens
cacttttttcagttttgactctttcaaacaatgcagccatttaaaaatattgtaaattttatcctctacacaaatacatgattttttttctgtgtgtatatatatacatacagggtggacatacatatatatgtagagactacatatatagctttctttttgtgtgttgtttaataaatccttactatgtgttcattaacatttggtcttattttaatgtgtatattatattagggttctttagaggggcaaaactaataggacagatgtatatatgaaagggaatttattaaggagtattcattcacatgatcacaaagtgaagtcccacaataagctgtctgcaagttgtgaagcaagaaagccag

SEQ ID NO: 54105 - DNA, 223 bp, Homo sapiens
cactggttacctaaagtcaggggtgtgtgtgtgtgtgtgtgtgtgtgtgtgtctgtgtgtgtgtacacgtatgtttacagaaaactgaggaaaaaggaaaaagggaaatggtgagattgtgtatttctcttctacaaatacttaatgccagcaagataacgcaattttatgtataagaataaggacaaacaaaaaacccgtgggtatttcatgaaagttaagg

SEQ ID NO: 54106 - DNA, 430 bp, Homo sapiens
ttggttccaggactcccaacagataccaatatctatggatgctcaagtccctgatatgaaatggcatagtatttgcatataacctaagcacatcctcccacatattttaaatcatctcaagattacttataatacctaatacaaggtaatagctctgtaacagttgttgtactgtattgttaagggaataatggcaaggaaaaaacatctgaacatgttcagtaatgatgctcttttcccaacccaatattcttgatctgtggttggttgaatccccagatgaggaacccacagatacagatggtcaactgtactattagtatggttcaaataaatttaaatcatgctttcaacatatgaaatttgttattctgtgacactctggtaatgtatcttctctttgtccccaaggttctgctaaaccagcaac

SEQ ID NO: 54107 - DNA, 408 bp, Homo sapiens
ttttgctcacagctacatcttcagaggtgagaaccatgcatgacacagagaagatgctcactgatggatttaatgagtcaaacattgaagaatcaatgagtgccggaaataaacaggataggtggcagcatagcatgcccttgagaacatggctgtggattcaaatcccagaccaatcactgaatttcaagccactttgcctctctgagcctctgttttctcatctgtcaagtggcaataacaataaatggtacgtgcctcataggggcaccttgaggattaaaagagagggtttcaataaatcaagtactgatttcaaaacctggcacatagtaggcactcagcacatggcccttatatacttatggccagcagcggctgggcctcatccctccctggctggctcca

SEQ ID NO: 54108 - DNA, 327 bp, Homo sapiens
caaagttttaacaataatggtggagtaattgatgtttctggagctgaaaccccaaaggtgttaggttacttgtaacagaaaaagtcttacaaatagttgttttggaaaaggggacagtatatataattcagaaagcattgttaacctgtgcaaactgtaattataacttagtgtcacaattttcttgccctcttccccttgcactcagatcttatcttgtagtaatgatatttattaactctttccacctaaactgcattgcttgactgtaatgctatgaacacactaggtgtcagatataagctgagtgtatcttcagaaaccaag

SEQ ID NO: 54109 - DNA, 417 bp, Homo sapiens
tactgggatgggcactgcttggagtggcagagatttcattcctccactttctggtcaattcttattttaaccttattcccaatttagaattttcatattttatcatctgagattaaatcgttctagaaggtaagcaattctttgtaggccaaaaacttcccacctccctcaacctacctagagaattttaaatgcattttccaaagatgttgggtaggtttttatacatggcaagaccctgatctctacaaaaaaatttttaaaaattagccaggtatggtggcgcacacctgtggtcccagcaactctgaaggctgaggcaggagttttgcttgagcccaggaggttgaggccacagagagctatgttcacaccactgcattccagtctggttgacagagtaaaactctgtctcaa

SEQ ID NO: 54110 - DNA, 500 bp, Homo sapiens
ttgttgtccagatcacagatggtaagacttaggcttctggggagcgacaaaccccacctaatcttgaacccaaacttcataatccatcccagtgtgccagaaagttgttcattacaactgatcagaagcagatgataaaaagtggcctcttacgtaagacttgcttttgttccttaaggttctcactccttcatgaacttcaaaaagagactgagttggcaaggctaagagggtagtagagcattcctgggtcctgtgatcatcaactcattactgttgtaaagcctctctgacatttattactgctttatttatgtcatgctacatgtggacatttcccccctagtgatacacagagatctacctcagcgttttaaaccatgactgtagtgaacactgtgatgtgccctccaggtaccccattcaggggaagatttattgccccatgactgggagtgctgtctgcagacagccccaagctgctagccatgcaggatgtg

SEQ ID NO: 54111 - DNA, 164 bp, Homo sapiens
tacaggcatgtgctctgggtccagtgtatttgctggtttacttatgaaaagtaagaacatgtgatatatatggcatgtgatttttttcacctatctatattgtgtacattcttctatgtcaatcttttttgtagttgtaataaatcagtaagttgtaattcatt

SEQ ID NO: 54112 - DNA, 169 bp, Homo sapiens
  misc_feature (3)..(3): n is a, c, g, or t
tgnaaaagatttcacaggccattgaaacatgggcaagacccagtgcctagagtctgcaagattggtcctaaagacatccaccacgtgtattgcgagtggaaaatagaaattcatgtttgactcaagctttagagattttgtaattctgtgagcatttaaaaatatttcc

SEQ ID NO: 54113 - DNA, 450 bp, Homo sapiens
gcagatttgtgtaggggatggagaagaacgtattatcatcaagtaaacaaaggcatggagctgtgaaggtgagggtttctctagacacctcacaatgagtccagagttcaagcaggaaaatggtacgtggtaggcagttaggtaagaaaaataagttgaatcccaaaataaagggccatgaggagtaggcaaagggttttggactttgcatcctgcctcctcctcctagactggtgacttacttcctgactagaatatgagatttctgaggacatgcccagcatcatgttctgcacgtaatctgcaaacaacattccatttattggtgactaaacactccggccctggggtgaaactgcctgggttcaaatcctgccccattccttcctgactgtatggccttggataaggtagttaacttctgcacacctctgtttccttatctgttta

SEQ ID NO: 54114 - DNA, 403 bp, Homo sapiens
caattctcccaccttggcctcccaaagtgctgggattataggtgtgagccacacctgtattatttacaatggttctcctacatgccaggctttgtttggtatgtggaaataaaaactgtgatgaataaataataaaccaccttcaaataacattaggattagagctgggtgtggtggctcatgcctgtaatcccagcactgtgggaggctgtgggaggctgaggtgggccgatcacgaggtcaggagatagagaccaccctggccaacatggtgaaaccctgtctctactaaaaatacaaaaaattagctgggtgtggtggcgggcgcctgtagacccagctacttgagaggctgaggctgaagaatcgtttgaacccacgaggtggagggagactctgtctc

SEQ ID NO: 54115 - DNA, 327 bp, Homo sapiens
aagaagagaaatggggtagctatttttgagtgtcctgctgttgggagggggaagatgttttctctcttctgatagctgtagaccagtgggaaaggatttttcctactctcttttccctcattgagcactgtgtacccaagtgtatccttgcagagtagtttggtgatgtttgtttcagctcaacaggctcccaaaatccagttcagcctgcagaatttgttttgtcagtgccattacccggccacctgctgggtgcagaggcgtaaagcatttgttagctgggcacatattgtgtgttaggagtttttgcatctcttctcggcgtcg

SEQ ID NO: 54116 - DNA, 695 bp, Homo sapiens
taggctttgatgcgaccttgactgctgccctgccctgccctgccctgccctagacaaaccccactttcctgtccatctgcccatagcatcctcagaagcatgctttgatagccgacagtaacagagggtcctaggcattggggtcctaggttcctgtgtcccaccgggtgcctctgatacttgccctcccctcccgctaagccacagggactccactatgagctcctttgcagggcaggttaaacaaggaaatagcatagaggtggagagaagcctttgttttctgtcaccatacctgagctgtaggtctagctggaagccatcctagccacgtggatctccatggcccaggagggtggtgcacgtcatctgaagtcactcagacctttgatcctctgtgagtcaccagtaagagtgtcagctgtacctgcctcacagatgcagtgaaggttcaatatgagcctgtggaaatcaagcatgcggctcaggcttagaccctggcatgcaggaagagccaggggcagtgccagcagcaagcacactcagcccagggccggtgtgctcaagggcaaacagggtcgtttgtcaccagcagctaacatagactaagctgctctgggacactctcctaggatgtctcatttaattcttacacaaaatttgcaactccccgggaacaggctgagtggttaagt

SEQ ID NO: 54117 - DNA, 385 bp, Homo sapiens
gtcacaggtctcaattgcaagtagcatgcaagcaagtaggctgaactcttgtctgtcaatctagctccttcctggatggggtatttaatcagctctcccttccccaagcacccagtggacttgaagctcacagttagacagagatggcctagaggtgcccaagtgcctgtttatccataggtgacatcacctgtgtgctcagagttataaacataggcagcttgcctactgccaaatccattacaactttcagaggtgttcacttaggaagaggaggaaagagttttttgagaaccagatgggaacttagaaataagtaacattgacaaccaaatccttcagacacatcttcaagtttccaagagagtcagttaacaaaaaaaaa

SEQ ID NO: 54118 - DNA, 139 bp, Homo sapiens
  misc_feature (95)..(95): n is a, c, g, or t
gaccatatgatttgctgtccaagctgggacaccttcaagaataaaataaatatttaataagtttgtccagacaatgtatgtaaaacaggcccatntggaaaaaaacaagtatcttcatccttgctcaagttcacagatc

SEQ ID NO: 54119 - DNA, 1307 bp, Homo sapiens
agtgatggcttacacataatctagcacatttggagacgaggctggtggattgctttgagctcaggagttcgagaccagcctaggcaacatggtaaaacccagtctctactaaaaaaaaacacaaaaatttgcctggtgtggtggcatgtgcctgtagtactactcaggaggctgaggctggagaatcgcttgaacccagaaggcagaggttgcactgagctgagatcgcaccactgcactccagcctgggcaacagagtgagatcacacacacacaaaaagttaacacttctgtatgggaaaagacaagatacacatctaaaagacaagccaagactgggaaaaacaacgtaacacatataaccaaaagaggattcataagtagaatttataaagaactccaaagaatcaataacaaaaagatgacccaatttttaaaaaggacaattgatataaaaaagctatcgaatgggaaacacaaatacctaataatatatacatatgtgcatatacgtacatacacatatacatttaacctcactagtaatctaggaaagactaacaatattttgcactcatttatacactagaaaaattaatttaacaagatcaagtcttagcatggatgtgaaacaaacagaactcatgccgttgtggatatatgaaacagtacaatttggaaagcaatttggcaataactagtaaaaaataagggtgaagaagtatgtatcctataaacccgcaatcccattctgggtagatagtcactgaagcattatttgtatcacagacaatgtgaacacacttcatgggtaatgtctatcaacacaaggatgggcaaactggtataattcatataataaaatactataaagcagctgaaaattaatccttccagctgcaggttagtcctcccaccataaacaactgtagacatggacaaaatgtattgattaataaatttgttaaaaaaaaatctggcagtctgctgatccagactttggtttaactcatgctgtggtggatatataaaacagtacaacttggcaactactttcaggcagaggacaacaggaagcaaaagactgatccctaagtgtaaggaaacttgtgagatgagccccaaagtcacctagttcctctacctggggatcgtttcccaactgcagtgcagagagctggagtctgagcacagtagggagatcccgctgggctgaagaggcagagatgaggaggcagagatcaggctgagacagctgaaatggcagagaaatggggcagaaaaaagaaaggagggcactatgcaaa

SEQ ID NO: 54120 - DNA, 512 bp, Homo sapiens
ttcccctgggcctctctcggggtcttcagggcgtcgtgccttcagctatcctctatcggctgccctcctcctgctcttcaagagctgcttcttcctgctcctcctcctcgtactcttccacgacctcttctatgtagacatggacaaaatgtattgattaataaatttgttaaaaaaaaatctggcagtctgctgatccagactttggtttaactcatgctgtggtggatatataaaacagtacaacttggcaactactttcaggcagaggacaacaggaagcaaaagactgatccctaagtgtaaggaaacttgtgagatgagccccaaagtcacctagttcctctacctggggatcgtttcccaactgcagtgcagagagctggagtctgagcacagtagggagatcccgctgggctgaagaggcagagatgaggaggcagagatcaggctgagacagctgaaatggcagagaaatggggcagaaaaaagaaaggagggcactatgcaaa

SEQ ID NO: 54121 - DNA, 393 bp, Homo sapiens
catcaggccacctcaggtgatctgcctgcctcagcctcccaaagtgctgggattacaggtgtgagccaccgtgcccggccattggttctttgtttttattcacttattcaacaaatgtattttaggtgtcaggctctgctctaggccttggagatacattgctgctcagaaaagtctggatcttgcctactaataatctaaatctagcaagagagacaaacattaatcaaattctccccaaaatgaaagtaaaattacagacatgataaacattagaaagagaaaatatgtcacaggcaggcatgacctagaagggtgccaaggaagacattcctaaggaagtcaggctggagtcgaggcctgacacggaggaggaggggagggagcctctca

SEQ ID NO: 54122 - DNA, 449 bp, Homo sapiens
ttgagccccctctctggtctgcttaggcctctcctgcattttcaccaggtggacctgtcccgaggcccaagggatactgtttgttgggggcttaggtgaagcctggggcatccaaatgcctacacgcaggccccctggggcactgggcaaagccggaggtgggaagagacggaggtgggaagagccacaggcccaggccagctccttccttgctgccacttttggcaccacactccaaggagtctgataattccaaattggcccgggcattccatggagtccgggaggtgtatatgccaaggtaggaggggaatgtgattttgcttgttagtttcatggataccttctaaaccctttaaaacattgagacagatggcatgtgggcccacaggtgtgaggagcgggcctggctttgttctttctgttttcccgcagcctaggacagcgcc

SEQ ID NO: 54123 - DNA, 470 bp, Homo sapiens
agagagagtcaagctgatcaagtggtgggaggcaggatgtgtggacagacctggctgtagttagaacagccactcctgcctgtacaaccctgactttactgtgtttcacatgcaccttcacgcccgttgtcttacttactctttgcagttaccctttaaggaaggaagggcattcgttgttatgatgatgatttgagggccaggtaaactggggctcaggaggtgaaatgactggtctgctatcgcagtgctgatatggacagagccaggagcagccccacggactctcgttagagcttcctcacacttactgtgtagccttgggcggttgtgtccctgtcctgggcctcagtttccccattcatataacaaagggctgagatttgagtcagcttggccatgctgggtggggtacaccagagcctggagccagaattcctcctggaatccctcccctgtcttccagctct

SEQ ID NO: 54124 - DNA, 359 bp, Homo sapiens
atttttagtggagacggggtttcaccgtgttagccaggatggtctcgatctcctgacctcgtgatccacacgcctcggcctcccaaagtgctgggattacaggcgtgagccactgcgcctggcctaatattttcatttttggctcacaaatttcccccttttaaacttcccatagctgttccccagacctcacttcccctgtgcctctgccctgggccctggagctctggagaagcctctctgttctttgaagcctggactgtcatttgaagctctagactttccaggttgatgcctaggagcataggaggccatcatcaacccctggaaacatctctgggcgtaggctgccaggctgg

SEQ ID NO: 54125 - DNA, 239 bp, Homo sapiens
caacccgtatttgggatcatcctccatttcaaataatacattctctctgttcatccgagttctttgtgagggccaggccactctgcacatgggccatagtgagggtgagtgtgcaccctgttccagacacttgtttcctctttgaattctcaccaaacaaggcagaagtatcagcaaaaataaaccaaaaaatagtatatgcagtttcactgcacctcttcttctggggctgaagataa

SEQ ID NO: 54126 - DNA, 753 bp, Homo sapiens
gtgcatcagaatcttaacaatgaggggctaagacacaaattcctgccctcctccctgccgcccccctccagagtttcagattcataggtctcggttgggtctgagaatttgcattcccaagcaagttaacaggtgatgctgatgtttctcaggggataacgggcaaatggtgaaacccagaaagttttgtttctagatatgagatcccattgtctttgccaatgaagctgtgctgtaactccatcttaacaagtaaccccaaattatacccacctgaaagacctttgtgggttgtggaaaacctggaagatggctgagagacagtaccctcgaagtagttctgaggagattgttctgcttgtattcccatgcagcgccatcactgcctgacttccttatgtgtgtctgatttgaggcagttctctaggaaccagttcctggtgctgcagtgccactggcagcttcccagggcttccagaaccctagtggcatggtgggaactcctgttcctcacccgacctctccacagccctggacctgtaaggtttcttccaggctacatggaattagatttccacttttccttggtgaatggtgatgctgattatttggaagctttagcaccaaagtttgaaattcccctaagtgaatggttttggcgatccccttcctttagttatactattggctttctctcatgttcatttaggttgccaaatcttctgtataatcctcatcccccatcaaaagaga

SEQ ID NO: 54127 - DNA, 856 bp, Homo sapiens
gtgcatcagaatcttaacaatgaggggctaagacacaaattcctgccctcctccctgccgcccccctccagagtttcagattcataggtctcggttgggtctgagaatttgcattcccaagcaagttaacaggtgatgctgatgtttctcaggggataacgggcaaatggtgaaacccagaaagttttgtttctagatatgagatcccattgtctttgccaatgaagctgtgctgtaactccatcttaacaagtaaccccaaattatacccacctgaaagacctttgtgggttgtggaaaacctggaagatggctgagagacagtaccctcgaagtagttctgaggagattgttctgcttgtattcccatgcagcgccatcactgcctgacttccttatgtgtgtctgatttgaggcagttctctaggaaccagttcctggtgctgcagtgccactggcagcttcccagggcttccagaaccctagtggcatggtgggaactcctgttcctcacccgacctctccacagccctggacctgtaaggtttcttccaggctacatggaattagatttccacttttccttggttcacagggggcaggagccaggttggaacggctgccaaggagactgtcttttttcagagcccttaactggcagtcagcaagaccgaactcctctgctccttggtgaatggtgatgctgattatttggaagctttagcaccaaagtttgaaattcccctaagtgaatggttttggcgatccccttcctttagttatactattggctttctctcatgttcatttaggttgccaaatcttctgtataatcctcatcccccatcaaaagaga

SEQ ID NO: 54128 - DNA, 675 bp, Homo sapiens
tgaccaaggacaaggacacctacatggacactgtcaacagataccacctcacggagccggaaagaaacacatcctctaaactcaaggactgcgtgaccgacacaatgacccccgaggagacagaggccgtcgtgcagcaactggtgagtgcagcagggcccggccaccagcgccaccccacagcccttgacctcctttgagagcagggactctgttccctgagagcctctctctccacccaaatacctccccacctctcaccaagcaaccacctctcacacgggcagctgcccagggacaagacctcagggcgctggacctccgcgctctgatgctcagcctccgcaatcaaccccatcctatccctccttccccagaagacccctcccttcggcctcccacccctccccacaggaagaaatcaacaaccagtgtgccgacacgatactgaagtaacaccatccataggcacctcgggttcctgtccaggctgcctgtcccaaccatgagaatctgggcccagggccccaccctccctagctcccgccctgctgctgcctctactctctctcctgctgtgctgattggggcaagcctgggaacggctgccccccacctccccacccaggcctgtcccctgcgggacaatgctgcctaataaactcacctgcatcc

SEQ ID NO: 54129 - DNA, 222 bp, Homo sapiens
cagtagagaaatttggtgctggaaatatttactatagtgctggcacataaaccaagagctatcagactttaatgcttttttccctaaactttttataggctttcatttttaattgttgccaatctgctgattttattttaaatagatacttcaaggctgtgctttgtcaaaacagacagatgtatcattaaattccctcccaaattacacattaggcaatgt

SEQ ID NO: 54130 - DNA, 343 bp, Homo sapiens
caatcagaattaaagtcaaagttcttacaattattcccataatatacacctgaatgatagcctccaattcttacatcttaactactcacttcctcagcagtccactctttgaatatgtgagacatatttctctcaacatcttcctctagttctctccaaacctggttctccaacttccgtaagtctttactcaaatgatatcccctgagtgaaacattccctatctaaaaaaaataactctgtcctctttttttgaatacttcatatttccattccatgctacatgtttttttctccttgatactcatcagcatcctatacgctatgtattttatttattttc

SEQ ID NO: 54131 - DNA, 1509 bp, Homo sapiens
caagagggaggccgggccaggggctggtggcttcctccgcgagctctgccagtttctggcctcaggtcctgagttgttatcgcaagtccaggaagaatgaggttactcaggcaactggagggtgaggatggagaagagctttattgagcaacagaacagctctcagcagagaggagacccaaagtgggtagctcctacctgcaggaaggtttctgaagggggccaagatggcccaataggaacagctccagtctgcagctcccagaaagaccaacgcagaagatgatgaattagagcggttgttatcgaatctgccaccagagggcgatccaggctgaaggtgacattacacttagagggatccacagattcaagaggctgcttggggagggcagcacagtgaagtacaaggactttgacatcagagaggcctggattcaagtcccaatttctgtgtgtggtaaccagtctgcaagacagcctgtgatggttcctgcctcctcgtattcatgtccttcttagttcccttgcgcattgaatcagggctggctctgggtgaccaatagaatgtggaggaagtgatggggtgtgaattccgaggctaggtcacaaaaggcattgtatcttccacctcttagatctctctctctgcggaagccagccaccgctctccaaggactctcgagcagctccatctacagattcacatggagaagaattaagggttcctgccaatcaccagcaccactttgccagccttgtaagtgggccaccttggaattggagcctccagttcctactgacatctgactgcaacatcatgagagaccctgagtttgaaccacccagctgagctgcttctgagctaacccactgaaaccgtgaaagtacctgaatgaaacaacacccagtagccactagcacacctagctcccagatctgtttttgatgccattcttcagtaaaaggaagcaaggctgcttggagaaattgctatcaaggactggggtagaaaatatacaagatgaaattggagcatcttgtagtgcttgaaaacagttggcatctgtgtgaagatgtgaatggaggaggcagagtaggcagtgagtgccgcagccacagcttgtgttctctgcagccctggcacagaagataggaacactcatgggggatgcggccactgtgatgtcttcccacacaagaagtgccaagtgcttttctcatgcttttctggattgtcccatggtggacgagtcagcaggagtgagatggagcagcacagtagagggcacctgctctgttttgtcccaggccaggatatcgttgtacatattctcagctaagtgagcaccaatagaggagagggagagtctcatggaagttccttctaagcctttggctctttttaccttcaacaaggtgtgccacctctttgatccagcaagtgggaagaacagtcccggcctctttgcacacaagaccgtgataccaatgcaccatcacaggccc

SEQ ID NO: 54132 - DNA, 1313 bp, Homo sapiens
caagagggaggccgggccaggggctggtggcttcctccgcgagctctgccagtttctggcctcaggtcctgagttgttatcgcaagtccaggaagaatgaggttactcaggcaactggagggtgaggatggagaagagctttattgagcaacagaacagctctcagcagagaggagacccaaagtgggtagctcctacctgcaggaaggtttctgaagggggccaagatggcccaataggaacagctccagtctgcagctcccagaaagaccaacgcagaagatgatgaattagagcggttgttatcgaatctgccaccagagggcgatccaggctgaaggtgacattacacttagagggatccacagattcaagaggctgcttggggagggcagcacagtgaagtacaaggactttgacatcagagaggcctggattcaagtcccaatttctgtgtgtggtaaccagtctgcaagacagcctgtgatggttcctgcctcctcgtattcatgtccttcttagttcccttgcgcattgaatcagggctggctctgggtgaccaatagaatgtggaggaagtgatggggtgtgaattccgaggctaggtcacaaaaggcattgtatcttccacctcttagatctctctctctgcggaagccagccaccgctctccaaggactctcgagcagctccatctacagattcacatggagaagaattaagggttcctgccaatcaccagcaccactttgccagccttgtaagtgggccaccttggaattggagcctccagttcctactgacatctgactgcaacatcatgagagaccctgagtttgaaccacccagctgagctgcttctgagctaacccactgaaaccacagttggcatctgtgtgaagatgtgaatggaggaggcagagtaggcagtgagtgccgcagccacagcttgtgttctctgcagccctggcacagaagataggaacactcatgggggatgcggccactgtgatgtcttcccacacaagaagtgccaagtgcttttctcatgcttttctggattgtcccatggtggacgagtcagcaggagtgagatggagcagcacagtagaggggccaggatatcgttgtacatattctcagctaagtgagcaccaatagaggagagggagagtctcatggaagttccttctaagcctttggctctttttaccttcaacaaggtgtgccacctctttgatccagcaagtgggaagaacagtcccggcctctttgcacacaagaccgtgataccaatgcaccatcacaggccc

SEQ ID NO: 54133 - DNA, 564 bp, Homo sapiens
tggtcaggctagtctcgaactcccaacctcaggtgatccacccgccacggcctcccaagtgctgggattacaggcgtaagccaccacgcccagacaagaataaaattttaaagaaggggtagaaacacagtgcaatatcgtacttctctaatttatcacatctaaaatggggagactcattgagtttatatgatgaatttgccagatttgcagtgtatgtggccagcactgttttaaaagaattcatcttctatatagttaaatttttgttaaccataatacttccttctgttagaccacaaaattagccacagagtagcattaccttatagctattttcttgttctcaataaaagaaatgtgctgtttaataaaagttttttttaattatatggaatgataggattaaaccttacctagtagaaatattgtcatagatgaggcggtatgagtgggaaacactttgtaaataagtaagtgctggacaatcgtttcttattttacattgtgtaaagtctaggattaaaccatatgacagcagttttcaaactttttcttttcagg

SEQ ID NO: 54134 - DNA, 449 bp, Homo sapiens
tggctgtccaaggtcacacagcctgtgggtcctgggctgccaccagggggtctcccaacatccccattccgtcacccatctgtccttcatgcccgtgatggcagctttatcccaggtcccagcagaagccgcggctgcaggggcagttaggcaggcaggtaaataaggcatcctgggccgggcgcggtggctcacacctgtcatctcagcactttgggaggccgagaccggcggagttggagaccagcctggccaacatggtgaaaccccgtctctactaaaaatacaaaaattagctaggtgtggtggcaggcaccttataatcccagctactagggaagctgaggctggagaatcacttgaaccggggaggtggaggttgcagtgagccaagattgcgccattgcactccagcctggacaacagagcgagactctgcttcaaaagat

SEQ ID NO: 54135 - DNA, 270 bp, Homo sapiens
aaaactttttagttttagtgaagctgaatttatgttattttgttgcttatacttttgttatacctaagaaaccatggtctctccaaggtttttaatttactcgtatgttttcttgtaagggctttatagttttagctcttatatttggtttttggtctattttgagttaatttttgaatatggagcaaagtaaagcttttgaaaactaacagatgtgcaaaattatttttaatttttgaatatggagcaaagtaaaacttttgaaaacta

SEQ ID NO: 54136 - DNA, 373 bp, Homo sapiens
agataaacaacttcaagtgcattaatatgttgtggaaactgcaatgaaaaaataatggccttgcattgtcaaagcaaagacatgggaagcttagcaagtaaaacaataaaatgagcagagcgatattgaaacaggtgaagaaaagagcatgatgtgttgagttcagaaaaattattgatggcacagaaatggagagaaagactgatgagtgaatagagaagtagctcataagagattcaagctcacactgaggcataaagccaacctgactgcaaattttgtcaggttgcagctaggagagtgacaaggcagaatgtgttcagaagatggaaatttttatcaaaagctgttaattctagaaggaatattggag

SEQ ID NO: 54137 - DNA, 717 bp, Homo sapiens
tttttttgagatgcaattttaaatagggtggcttggacagccacctgagttgggtttaaaagctgccagctccagccgtccagctgtggggccacggtgccagacagtggtggtggttataggaccgtaggtgtttaccaaaactagacaagtccacataacaaccaactgcacaaataaggagtaaaataataaagagaaggacgtgtgaggcaggactggattgtagcccaggataaagagaagttgcgggatgacagctgtgccgtcggcccagacagaaccatctggacagaggacagaggataagggagatggttgaaaatactaccatcatatgataatgacaactaagccacaggaaaacaaggcagttttaacctcaggggaaatccctcagaaatggatggaatctaccagaagcatcatgagaggaagaggaagggaaacagagctaaattggggccaggtgtggtggctcgcacttgtcatcccagcacttttggaggcccaggcgggaagatcactggagcccaggagttcaggaccagcctgggcaacaaagcgagatcccctctctacaaaaaataaaaaactagccaggcatggtggtgcatgcctgtggtcccggttactcaggaggctgaggtgctggggaacaaggctgcagtgagctgtgattgtgccagcctgggtgacagagccagaccctgtatc

SEQ ID NO: 54138 - DNA, 341 bp, Homo sapiens
aaaagaactgtatgcttctcaggggaaatcctcaaaacaggatccagagacctaagctctgctaacagggctacagcagctgtatacatagctgcacgtgtccttgcagatgtgcagcaggacaagctcccaaggctgtacttgcatttacaagggaataccaggtgaggagcaatggactgcgaaacatgcgtcatctatcagtaaaacaacgaccagtgaaccagcaacaggatggtacaagcttgtcagagacagagatttccactgtatcacctggggtgcctagtacaatgctggcatttatgatgtaccaggatccgtgctaagctctttacaag

SEQ ID NO: 54139 - DNA, 397 bp, Homo sapiens
gcagagcctgctctatgccccgggcagatccatcacgtaaatatgtagcacaaacctttctctcccactagcatgctgactaagcttaactcacagggaaggatgtggctttcatgtctgaggctccagagcacagagtgtggcaccagcaggggcccagtcagtatctgcttgtgaataagcctgtgagctgaggcagtaccctctacattcaagtctgtcctctgaggtcttctgggcatcttgagactgtgggttccctgaatggctttgggcatacccagcattaagcactttatctgcttccttttgaaatatgtggttgatttaccaagcatttctagagtgctcactaagagctggctaggtaaccacttaataaatacttgattcaatt

SEQ ID NO: 54140 - DNA, 142 bp, Homo sapiens
agtggagactacagtgatgatgcaaacagcctgcttcacggctgctccccatcagcccggacctgtcatcagccttgacctgtcttctgaaaaacactccatccctgtcctccctgtgtcctggaggagggacctgaagccc

SEQ ID NO: 54141 - DNA, 1025 bp, Homo sapiens
  misc_feature (815)..(815): n is a, c, g, or t
  misc_feature (820)..(820): n is a, c, g, or t
  misc_feature (824)..(824): n is a, c, g, or t
  misc_feature (831)..(832): n is a, c, g, or t
  misc_feature (836)..(836): n is a, c, g, or t
  misc_feature (838)..(838): n is a, c, g, or t
  misc_feature (843)..(843): n is a, c, g, or t
  misc_feature (846)..(846): n is a, c, g, or t
ctgcatttggcgggatctgtgtctctcgctggtgctggcacaggaacttgggatccgtctcctctttcgcctcctgcaccttgggagccccgggctactctttcacagcccctgttgccctgtgatctgtaggtccttggggacgcatagttaaggtgccaggacatcctggaagctgggaaatgatttcttccagaccatggctggagaaggaaagaagattgttgcagtggcaggaccaaggtcaaatgagttatagccaagtctacagtaagatgtggcagtattctgttttgaagccgggaccatgattggcaagcttgccacttggtcaagtgctcaccctctgaaaatgtcttccttggtctttgcctccagctgggtgccacaaactctgaactggattccaaggctttcatgaatgcacttatgtttgctgtggcagctgcattatgtcgtgggggatgtggatgcagaacctcacattctgtcgtcttgcttatgttactctcctttatgtttcactttctcaaatgaatgtcaagcaggtgattttcagattcaaaagttctaaaataaattgctcaaatttacacattatgtaagctgttaataaaatttctgtaggtgctacatatttgttaaaattttggttgtaattttaagctcactgtaggcagaaaggaatcattaagatttctattctttttagtctgtatctaaatgaccatatattttaattccaaatatttactttatacttcagtaatgcccatgtgtatttgcaaattatatgtgctttattgaaatatagnttttntagnctgaagnnattntntagcnatngtgtatattggtttggaagaagagccggccttttgggaccggtaatcggggcttaaggatttttaattccctaagcctataaggggggttcgggaggcgcgtaagccgcgtggaaaaaaaaaaattggcccggaataaatgggggggaaaatgcaggaggggttacgcgcagatgtgac

SEQ ID NO: 54142 - DNA, 990 bp, Homo sapiens
  misc_feature (780)..(780): n is a, c, g, or t
  misc_feature (785)..(785): n is a, c, g, or t
  misc_feature (789)..(789): n is a, c, g, or t
  misc_feature (796)..(797): n is a, c, g, or t
  misc_feature (801)..(801): n is a, c, g, or t
  misc_feature (803)..(803): n is a, c, g, or t
  misc_feature (808)..(808): n is a, c, g, or t
  misc_feature (811)..(811): n is a, c, g, or t
ctgcatttggcgggatctgtgtctctcgctggtgctggcacaggaacttgggatccgtctcctctttcgcctcctgcaccttgggagccccgggctactctttcacagcccctgttgccctgtgatctgtaggtccttggggacgcatagttaaggtgccaggacatcctggaagctgggaaatgattgttgcagtggcaggaccaaggtcaaatgagttatagccaagtctacagtaagatgtggcagtattctgttttgaagccgggaccatgattggcaagcttgccacttggtcaagtgctcaccctctgaaaatgtcttccttggtctttgcctccagctgggtgccacaaactctgaactggattccaaggctttcatgaatgcacttatgtttgctgtggcagctgcattatgtcgtgggggatgtggatgcagaacctcacattctgtcgtcttgcttatgttactctcctttatgtttcactttctcaaatgaatgtcaagcaggtgattttcagattcaaaagttctaaaataaattgctcaaatttacacattatgtaagctgttaataaaatttctgtaggtgctacatatttgttaaaattttggttgtaattttaagctcactgtaggcagaaaggaatcattaagatttctattctttttagtctgtatctaaatgaccatatattttaattccaaatatttactttatacttcagtaatgcccatgtgtatttgcaaattatatgtgctttattgaaatatagnttttntagnctgaagnnattntntagcnatngtgtatattggtttggaagaagagccggccttttgggaccggtaatcggggcttaaggatttttaattccctaagcctataaggggggttcgggaggcgcgtaagccgcgtggaaaaaaaaaaattggcccggaataaatgggggggaaaatgcaggaggggttacgcgcagatgtgac

SEQ ID NO: 54143 - DNA, 937 bp, Homo sapiens
  misc_feature (727)..(727): n is a, c, g, or t
  misc_feature (732)..(732): n is a, c, g, or t
  misc_feature (736)..(736): n is a, c, g, or t
  misc_feature (743)..(744): n is a, c, g, or t
  misc_feature (748)..(748): n is a, c, g, or t
  misc_feature (750)..(750): n is a, c, g, or t
  misc_feature (755)..(755): n is a, c, g, or t
  misc_feature (758)..(758): n is a, c, g, or t
ctgcatttggcgggatctgtgtctctcgctggtgctggcacaggaacttgggatccgtctcctctttcgcctcctgcaccttgggagccccgggctactctttcacagcccctgttgccctgtgatctgtaggtccttggggacgcatagttaaggtgccaggacatcctggaagctgggaaatgatttcttccagaccatggctggagaaggaaagaaggtgtgtttgcctgactcagtgactatagagagaaccaagttctgcaggcctgtcacctaagtctcagcagctgggtgccacaaactctgaactggattccaaggctttcatgaatgcacttatgtttgctgtggcagctgcattatgtcgtgggggatgtggatgcagaacctcacattctgtcgtcttgcttatgttactctcctttatgtttcactttctcaaatgaatgtcaagcaggtgattttcagattcaaaagttctaaaataaattgctcaaatttacacattatgtaagctgttaataaaatttctgtaggtgctacatatttgttaaaattttggttgtaattttaagctcactgtaggcagaaaggaatcattaagatttctattctttttagtctgtatctaaatgaccatatattttaattccaaatatttactttatacttcagtaatgcccatgtgtatttgcaaattatatgtgctttattgaaatatagnttttntagnctgaagnnattntntagcnatngtgtatattggtttggaagaagagccggccttttgggaccggtaatcggggcttaaggatttttaattccctaagcctataaggggggttcgggaggcgcgtaagccgcgtggaaaaaaaaaaattggcccggaataaatgggggggaaaatgcaggaggggttacgcgcagatgtgac

SEQ ID NO: 54144 - DNA, 653 bp, Homo sapiens
ctgcatttggcgggatctgtgtctctcgctggtgctggcacaggaacttgggatccgtctcctctttcgcctcctgcaccttgggagccccgggctactctttcacagcccctgttgccctgtgatctgtaggtccttggggacgcatagttaaggtgccaggacatcctggaagctgggaaatgatttcttccagaccatggctggagaaggaaagaaggtgtgtttgcctgactcagtgactatagagagaaccaagttctgcaggcctgtcacctaagtctcagggcggggagaccttccttccccacgggtttgaggctatggctaagtggtgagccttggtgagacgcagaaaggatccatcccaggcacttggctagaggtaagtaaaaatagcctttgggccagaagacctgatagtttgggtactcgtctggacataagtccccatcttcccagaaatgtcgtcttttgtctgcaacaactggctggagaaatatttcagaaagatgtgtgcctggaacacccaaaggcatacctttcctttctccttggcataggcctgcagcactgaagaaagaccaggtttgcaacggagccttcaatactcttcatcctatggatctcaggggctcatagggtgacaggag

SEQ ID NO: 54145 - DNA, 410 bp, Homo sapiens
ctgcatttggcgggatctgtgtctctcgctggtgctggcacaggaacttgggatccgtctcctctttcgcctcctgcaccttgggagccccgggctactctttcacagcccctgttgccctgtgatctgtaggtccttggggacgcatagttaaggtgccaggacatcctggaagctgggaaatgatatgtattcatttcctaccaccgtagtggaagagatactatccctatctttacaactgatagcatttccaacagtaagctgtgagattctgcttgaaatcacctctcaaacaaataatgtgacatacatctttgcccagctcctgagtgttttagctctggttcctgtgtccagctcacagaagggattctgatatatcactgaagccagcacctagatgatgc
